United States Patent Application Publication US 2013/0096032 A1 - sequence listing, part 11

SEQ ID NO: 330 - DNA, 108484 bp, Arabidopsis thaliana
gaattctcttgagttcaaccagtcaggcaagactccaggtaatatagctgggaaaactacgtgtctctctactgctactggacatgacgtgaaaacattattttcggaggactttgctgctacagattatatgaagttgctagagttggataacttggaagaagaaaattattaccagatggctagagaatcgcttctgtcccctgatcttcctcaggtagattttttgggttgtgagatcatgaatgaggacaaaaatcctgctagggctattgacttggctgccagtaatagcatgtatttacgtgagaccatactttctagtgaatctcctagtctcaacactcagaatatctcagtgacagttgaaatgccacccatgttgaaaccgttgcatgggcatcttcttaaacactttattgtgttttcaaatattgaagaccagaacagtatcatcataataattcatgctactaacaattgtctacagcgttgcccgtcagttactaaagaacagtgggcagtgccagcgattttgtcttctttgaaaatggaagaaaaccttttggcccagtaagatattctgctttctgatgcttcttcagtgtatagtggtgatatagatttcctttttcaactcaatcagtaaactagtgtctaggcgctaacaaatacccttttttcttttcagggaaagggcctgtgtgttcctctccttgttgctgcataacttctccatggttcacacaacaaaaactgggaatactctgaatgttgattctttctcctgcttggattctttctcaaagcatatacgtggtggtatgccccaaaataatttttcttttctttttctttttcttctcaaaactaatattttatctgcttttgattttatgttttaatttattgaacttgtaattttctggtctagttatggctgatactgaagctggagttatgctttctggattttcggaagaactcctttgtcttcttcaggacctcctttctgggcagcgggtattattttcggttaaatcctcagaaacatgtgaatctgatttaagcatccctgtcaccctgaatggagaaaatgtagctctcgtcaacaaaatcgctctaactgatcaattggtggccggaagcgctattttggcggcaatatgtactgcacttgatcgtattggatatatctgcgaagcttcctttgaaatcctgcacaagtacagtcatgagaaaacctcagtgctactgaccattcttcacgtttttgcttacattgctggagagaaaatggtgttgtctagtgagcatggcatatcaattgcagtgttgaaatacattgtcatgtttctagaaaacaaacattttggtactgtggagggcagttctcgattgcacccaggcaagaacaagtgtccattctcagacaggtcttcctcgctggaggctatggcatctaagctcatggaaattcttcaggaatttactgagtctaatactttgcataaaagcttgactggttcattgggttctagccacctagagaagaccgagtttaggccggcacacaaagatttccagtgtgtattgaccagggatcaaagtatcaatctctgtgacattctatcattggtggagcttattgcttgttatacggtgcgcatttaagaaagttcaagagcatttccaactttgacataacgttttgctaatttttccatgtttattgaaccaatttgattttatatctaaatgcaggcttgggattggactagtgcgaacattgttgctccactgcttaagatgctgggaatgccattgccaatgaacctctctgttgcaatcgtctcccttcttgggcaacttagcaggtaatattattaagtttgtctctttatacagaagggaccaatctgatgcaatattatccaaaatctcatctccttttctttttgtatgttccagtattggagtggatgctggtggctatgaaaacgaaggaatctcaaacttgagagtgaaactgtcagcatttctacagtgtgagacgacactaaaggccggttttgcagtgcagatagcaactgtgagctccctcctgaagacgctgcagctgaaattcccaatagactttcaagacaaaaccaccatgattccgggtagtggcgaccaaagcttatctggttcagtcaatgtggtgaccaagtggttgtcgttgttgagcaaggaacaacgagttttcgcatttgagtttctacaaaccaatgttgttagatgattcctcagttcaaaaagtcatcaaaagcagtaaattttggacatagtctcttactgtttgattcttcattgactgcctcctttggtcataggatgatgcagatatgaatgaagattgcattgaggttccaattttttctattatttaaaattggagctttgtgtttgtggtgacaatagtataaaccactacacgatttgtgtctaattcagaatgttaagcaaacccaaatgacaccactataagtaaagattgttatatatcaaaaatagaaatacaaaatgtagaattctccctatgacaaaacacaaatacatattatttctatcttgtgtatatattttctttattagaatttaaaaacccattgaacaaggaactccaaatccatcaaccaatctttgtcggaacactctgttcatgcctgaagaaattatcaggatcaaactcacccttaatcttcaccaacctctcgaaattccctttgtaatacttagcaccccactctctagcatcagtctctccttcattagtccccaaatcaagatccctgtaattcacatacgcctgtctcgggttcttcgacacatactgctccatgtaactatacatctccctaatccacttcatatgcctttcctcgctcactttcccatcttgccacgtgcttagccactgaatcttgaacaatgtcccgttcctatgagggaaaggtatctctgactcggagatcctcgacatcattcctccgtaagggttccatatcgttaacggtgaatcttcttctagaaacctttcccataatccttctaaaccttctactggaattggctctttcacaaagtctgacttggctttgaagtgattcttgaacaatgattttccggctagtaaagcttccggtgctgcactgtttggaaaacctgcaatgtacatcactgatttgatccagctcatttctgtgcagtccttcttcgtcagtcctaactcagggaaactcttctgcatcacctgttggggttgaaattgacaaatttaaaagtttattgcttgaattgttaaaaccgaaaagataaaagagttcaaatttagacccttaagtttggatttgaacactatcatacctgcaagagccgattggagtctccgagaaactgagcttggtacgacatcgagatggttcgatttcccggtttggtggttttactggccggtgaaataatgacgcgaatgaagagatcatcgtcaagcttatcagcgatttgttcccatttgtataaaactttagttccgtcttgctcaagcgtcttcgtgactgtgaataccgtaacggtcgccggaacggggacgagcttaatcttccaggccaatatcacgccgaagctaccaccgccgccgccgcgaatcgcccagaagacgtcttctcccattgccgcgcgatcgaggatttggccgttggcgtcgacgattctggcgtcgaggacattgtcagcgccgagaccgaacttcctcatcatggaaccgtacgctccaccgactaagtggccaccgatgccaaggcttgagcataaaccggccggaaaaccatgggtttggcttttctcttggatcctgttaaccgagacacaacaaccgattaattatcggatcattaacgaaagctcaaccatgtgatcggtttgattttattttggtttggttccggcatttggttaaaccggttctgattgaatcgacgaatggaatatttctacatatgccattgattatgattaacttttcaattaggtgtagaagatagtaagaatgaaatctattggtataactcactctaatgggtattaaaatttggctaatgaggggggaataactgaaagtattttatatataataaactaaatttgaccaataaaaaagaatgttagtttaaatatatattaactttaagaacaaagaaataactattaggtttttgcatttgggtaaataagttttgagttcgagatgacaaaataactatagatggaaaataaatatattaaaagtcataaaaatagaaaaaatataataatataaaataaacactgaaagcaatgaaagaaatgttaccaactacaaattcacaatgcgttgtaacgaatagggcttggcaaaatattcgttcgatccggtttgactcggtattcgatttgatttgattcgaaaaatccgaatatccgtaagattttggaccaaagcaaatatgaaaatatagtattcgtaaaaaccgaatcaaatagcaaatattgttttttttaaaatcgaatatccgcttcgatccgtatcttttgatatatatcagaatatatagttatatctatatatagatatcataaatagtttgtgtattgttgctaccttatgttttgatgttaagatgtttgtttgatcatttttttttatgttgtgttttgatcaatgacattaaaaactatcgggttttagtttttagaattagtttgataacatttttgttgaccggtaataacaacaaaggttatgtttggtatttataacttattttgaaagcatgttaagtaaaagttttgaatatctgatatgcttatatagtttacagatttttttaatatttatacgtatcaaagcggatatccgcaaatatcacaaaaaattccggatattcgaaattccggatatccggaaagtttcgaatcaaagcaaataataaaatcaagtattcgattaaaacgaatcgaataacaaatagtacaattttttccggatattcgcttcgtgcccaagcctagtaacgaaagtagaaaaagcaagtcatcctttaaccgacgtttttagggaatccacgaataaagttagcaaaacaaaaaaaggtttccccaaatggcaatagacaataggcaatgggaaaagaaaaacttagcctaagacgtcaaaacttccgttactatttggagtcaaaaatattgcgaataagttctaaccaaacaaaatcagtaattatcatcctacttaaaaattaaagaataatctcgccataaaaaattatgcgtcaaattaatttgtttttactattcaaaaatctgaccaaggaaatatatatataatcatgcgtaagcgttacctgtaataaacctctccgatggtagcaccagcatgagcccacgcactgttactgtccaaatcaacgtcaacctgtctaagcttcgacaaatcaacgatcacaaacggcgtttcgtcctcggcaacaaacgagagcccttcgtagtcgtgaccaccgctacgtagccggaggtgaagctgaagcttcttggcacacacgaccgctgcttggacatgcgtctcgtacaaaggctcgaatatgaacacgggcttcgggtttgacggcgtcaagtaacggagattctgtgccgttgattcaagctcctctttaaacaaagtagcgttttggtccggtgagaaaaacgacgccgttatggggaaggagacgtcggagttgtcgacaaggcacttcacgaaatcttgttgtagcgtggaggaagacaatggaacggagattagtagtagcgttacaagaaacaaggttgcgtttcgctttgatatcgcaaacgccatttttctttttatgtcgatgaggtttttgcttttggttgtttgaggtatgtgtttaggtttatataggaggttgatgtgtgtgtggggatggcttacacgtaaagttggtgtaaatattacttcattactatttttattctattactaaaatctcaacttttatctccttactataattctatctttatattttgattacttgaaaaataagcagtatatcccttaagcatataacgtaaccaaatatatatgtttcgccaaccaaaaaaagaaaagaaatgaattattagaatattcaagtaatttggtcaatttcttgcattgtcctttacttcattgctaatttgctatgatctgaatctttacatgtaaatctgatgtgaatattatatcattactgaaacagcgacactgtactgtataatgtttatatcattattcattactaaactgtattaattagtttttaattaattgctatacatacctgtatcttaatttatagtagtaacttgattatttaaaacgcatgcataacttagaagtttatacaagtcatgcaagtgaattttccaacatagccaaagagaatgcatagtatcaataagttttgtgtgtatatactatattgtaatgattattcagacatattatagcaaaaggttctgaagaaatatatgtcgtttgaaagtaaggaacaatatatatgtgcctttagggataaacaatgctaatacgcactaatttcaacttttcaaggataccgacacgactttatgtttatcacatctaaagatagcgacaccactatcttcagtagttgtggcgtgaagcctaaatacattctctcctgtcctagaattgtagtaactaataatcttccttgttaaccggttaccctttgactaggcaatcaaaaaatctacacatacattataccctacgctttattacctcgacaatattgacgaaccaaaagagtaagtgtaatataaatatttctatttcaaaaattacggacttgaatatttactaatttttatattgtttttggtcttgattggtatgacacaaaaatcacaaaataattaattgaataactttagcagaaaaaactgaactaaattaagttttcgtaaaataattacggatgctaaaagtgagttttagtagattaatgccgttttgacttttctacttatattttttacacactcatttttttaaaaaattgatgagtattatgaatagtaaaaaatagcaaaattgagttttcaaattgagtttttcgcttttccttaacaatattaacgtgactttttcttcctatttttttttatatatatctttatttttggaaaatctaaaacccaaaatctaaaattcaaaaaccaaaaattataatcttaaaactatattaaaatcgataaccattgatgacctataaatatttttagtttcttaatacatgtaaaatgtgattggtctcagtttcatcctcgctagaatcaaaacaaccatctttattttacttttggtttcgatttaggttaacgaattattgcagaaagtggtgtgattgatggtattctgagactctgagctatgtatagcttaaaagcaacaaagtgagattgtctaaagactcaaacttgcttcaaagtttcaatatgcacacacgctatacacacatataataaaattgaatcaaatatatctaatgactatatagacgaaaaaagaaaagttgaaccaaaactaaaagtctactaaacagattctttccaaattccgcataatattattcaactttatataatatcttatgtaaaaactaaaaagtgtacactgttcatatttaatttttgctttaaaaaaaaattcagtgctattttgactctagtgtaaaatgaaattgaaaaatcaactaaagacaccaacaattttccatcccggtcaaagtcaaaatcactaatttactgcacttttcaccaaacgggtcgtccgtccgttttgcattaggatattttgaatcctaatgctaaccataaaatcactaattactaaattttccgtaatatgtttcacttatttattgcatgctttgccttgatatttgatgaaattttataagcataaatgatagggatcaacttgggattgtgcccgttcattattacacttgagtgggaaaaaatgctaatggtcgaacattcacattcgcattatcataactatgttattatcatgatatagtctggaccagccctaactcctaaggatgtatcatgtatcatgtctgagatgtgcaaaagcacaagattttcaaaaaaaagaaaaatgtgtcaaattcatagggtgtgaatgtgtgattcatgaaggaccctaaaattaatttggacagaattgaaggaaaaaatgtagaaaaaataaactacgctcgcgaaaaaaaaaaatcatgtgaaataatgaatcaaaaatagtaacatttggacttgatcattacagaaagtccaggaaaaccacttatattattttatatgggtctttttcgttttgtacgcgcagagagcctccataataattgaatgagcatatgtataatttgaaacaaactcaaaaagaaaaaaaaataagtctaccaactttatgtaaaatctatgatatttgaaataaaatattctctaaaagcttgatcttaatttttatttatagaatattagcgaccaattacaattacacacctaccaccttctctgctttcaatttttctattgcaataataactaaacgcttacacacactgtttgttcagctatgttgtaaaaaaaactggaaatgacaaagaagaattaataccactatgtctctttatcttctgagaagatttataatcggtatgactggtcaatatttgctccttattcaaccatacgaaaatgtatataatttaagtaagtttttgaaagaaaatggtaacgacattttttttttgggtaaaaggtgaaattaatgtagatccgacaactcggtcaaggccatccaatatatatagcctcacacatacatttgtttaatacaaaatttactaaattttccttcaccaaatatgttttgaatatatataatggtttctatatttttgttgattttgttgtcttgtcagttatatttaagggtgaatttcctaaataatcatatagatgatgtatatttgaaaaacaacatggtgacaaaaatcttcagtagtagaatgtgatataatttaaaaacattcttcaataattttggcttaaaataagtaagtttaaaaatctaatattgttttggttgataaaatgggcatacccaatgggcctttatacatttgcctagtcttttatttaaggcttcactattattattttggtgaacaaattgccaagcccaagtgactgagctcaatttaaaggcttagtttaatatttcattttttggggacatatattcagtttaaatttaaaactgtaaaattgtaagacttagcataaaacatcaaagatattaggagaatttatatgtaacattttttttttggtggtaaatactaaataggtgattatttaattttactcttatagcatagtgaagaaagatgtgttgtaataaaacaatgcgaccacttatcaattaagactgttagtctagtcatttaaaaataatgttctatttgggttgctctggttcgttttggtaaattagtttatctttatggattctgcgataggttgagcacctttaaatgtgtaattgcccttctctttataacttttttttggcatggctcatctatagagattgattttaattgcttaatcggaaaagttcatggcttacatttgaagcttggtttaaactttaaagttgtggttaattttagataataaattgatgtatgggtttgtggcctattgggcctggtcttttatttggggtccccttgacagccttgggtttgtttgttcattactttaacattaatgtctcattataatgtctaaaacaacaagatataaagactcatgatggcaaattggcaactcaaaatggggttcctctcttgtcccattcatctaatattactaaatataaattgtagagatttctaacttttcgggcataaattccaaatgctctatctcttagtagtttggaaaatctatgtgcaaaaaactattgaataattgtagaggacttctaacttttattagaaaacttcagtaccagactataagaagtttcttagtctcttaaaaacgaataataattaagtaaacgtgtattgattgttttacagtgattggggagagtattttgtgtgtggttctttatctctacaatacaatgtaacttgaagagttgaaatcaaaatcataattctagggtgatttatatagcattaataatttagaaatgataagtacgtccgtgattactacctcgggatatcaccgacccacatttcgtttggctttttcgtatatgtattattgttatagtctttgtcaagttaaacatatcctatttgaattgttccacgagaatctctctatatttttgccattagtgtttcatatcttagttgcaatcgcatattcctagtaattgtatatttgggtacgtaacagcaaaacatgcgatgcaaagtctacgtacgtgtgataagttgggccgaccactatcgccataaaccacattaattatttaaatttattattgttttctggtcaaacaacaataataataaaaaaaatccacacaattaggacaaaataaatctacgcaattatcaactaccattataaaaggaatcaaaggagaacacaactatgattgcgaaaagaacaaccacttattgttgatgtcaactagttaagcaagtaaaacgacaaaacacaaaaagatagttgtttgattgatcgatcgttgtccttcgaagttcgttttagtgtgctattttatggtgttcttataaaaatattattagatggattttctattttgttaaagagtagatatatatactaaagatcttattcaatgtaccttttttgtaatagagatgaatcaatatttgattattttgttactcgaatttagtattaacattgactttgctggggtttttctgcgttgttcgctttcgttctggatgtagtggttctcgccatattaaatagactgaatacgagtgctctttcaggtattttagtcgtatgagcattttcattcgtggcatctcatctacccataaaaaaaattaggtgaaaatttgtaaatagtggagaaatcctaattatatatgaaaaattctttccaatgctcttttcatgatgccatttttcaactttatccttatgttttattcatttttatttctaccctctttaaatgtttaatgaccattttacctttatttagaaattgttttagtttaataaaatgaaatattaatattttttcacctaaaatattctaaaataaaattttcgccaaaaattttcccgccaaaaaaatttcgaaaaacaaattcccgccaaaaaatttcccgccaaattttgttttcaaaaatatttttcccgccaattttttattttttggcggtaaatagatttacaagagattttataagatttacaagggattttaaaaggtttttaaaagatttataagggattttaaaagggttttaaaagatttacaagagattttaaaaggatttaaaagatttgcaaaggtcttttaaagatttttaaagggtttaaaattgttttaaaagaattttaaaatatttacaagagattttaaaagggttttacaatatttataaggaattttaaaggattttaaaagatttacaaagaatttgtaaagatttttaaagggtttaaaagtgttttgaaagatttacaagggattttaaaacccttttaaaatctcttgtaaattttttaaaatccttttaaaatctcttgtaaatcttttaaaactcttttaaaatctcttataaatcttttaaaacccttgtaaatctatttgccgccaaaaaatatttacaaagatttttaaaatcatttttttagctgaggaaaattgttacgaaaaagtttttggcaggaattgttttttttggcgggaaaaaagtttggcggaaattttttttttggcggaaaataaaaattttggcgccaaaaaattggcgggaaaagttcagtttccaattacatgtttctattagatgagggtaatttggtcattttgttcaagggaaagggtacttttaaaaatggaaaacataaaagggtattgttgcaaaaaaatagtaaaaaatgggtagttttgcaaatctccaatcatatatatactaagcttcaaactagtttagttttgatttgttttccgatcctaaacttgaattaagctcatgatgttgggagcctatataaattattagaacgtgatattcatgcatggtgtattcaaagaattacacatatataagagagactaggataaaactaattacgtttagataatactaaatactgaggtatgtcaaggatgctctaacatatttgttaggtggatccaaatccactatggtcgaagcggtgggtaaccgacgccaaatattatatactgtgcagttgtacaaaatggatgaacgctatattcagacaaataagtactataacaaaacaagaaagaactctttaagtacttcaattttgagcaaaggaaaatttcgagaataatggtttgtagtagcccggaggggaaacattaccattttggtctaaacacttcacaataaacttgaaaacaaaatagctagactagctagagatatatatgtttagtttcataatatgcatgtgacctcataattaaaccttattttgaaactataacttataaacagatgaactggtctttcgatctttaacaaaaataaaaatgaactggtctttcttttaacaaatttctgaatcttgtgggaactctattggataattggattcgtaagcacaaattgatccacgaccactacattatacatatgcagatatgttaatgctataagaccatctcttttattgtatgacttttggagataacagaaaagggaatcttttacagataagagtttagagtaaagagaaaagaagcctatttggttgattttgattcactgattaaaacaacacttgtcttttttatctttgccttcacgagaatcataactacactcaccgtcctcgccgatcaaaagtcctcgtgtgataagaaattcatgtggacaattttattgcaggtacgtatttttcatcaacttatccataacgacacgtgttgaccttcttacgtagctcttctgtatttgatcgccttggatttgctctaagacctaatttaatcacgccacatgcaacaattaactaccaagggtcccaaaaaaagaaagaaacacatactactctatttaatttgataataaacaaataaagtccgtttagtagattatgttttacatataaaaacaattaaagtccgttttgttaattatgttttacctataaaaaaaaaattcaccaaaaaacattaatcaaatcatatcctagttgatcattggtgaggtgactgacaggtcgtggaattctggcatcctatcgtcgacaaatcttaaactaaagtaactcttactgttactttttaaatatgtcaaagtaaccaatatcttctacggaacttatatccaatttgcatacttttactcatactatacaaaatacaagcggatataaacaacaaaataagaaaactacactaatatctatagaaacttcaaattgaattgaatattatcgtgatatatatatatatatatatatcgccgaatattccctggaaaattaaatacaaagactatactactctattggctataaatacacacacaaacccaacaaagctatttcattattcaaaaaccaatcacaaataacaaaacgaaaatgaagttttggtcacgaccattaacgtttcttataattattatctatctcataattcaacaagtcaactcatcaccaccgtcattatctataccggagcattttctccgatgcctcgacactcaaccatccgaccacggcagtcccaactcaagaaccgccgtgatcccaacaaactcatctttctcaacaaacctaatgaacggcgtcagaaacctccggttcgcttctgtctccacaagaaaaccagaagttatcgtcgccgccgtcaccgaaactcacataagagcaacaatctcttgctgcaaactcctaaacctcgagctaagaatccgaagcggaggccacgactacgaaggcttctcctacacttctccggtacctttcgtaatcttagacatgtacaacttcaacaaaatcgatatcaacatgaaagacgaaaccgtttggatccaatccggagcttcactaggtcagctttactataacattgcaagtaaaagcaaagtccacgcttttcccgccggagtttgtcctaaagtcggcgccggaggacatttcagcggcggaggattcggtaacctcatgagaaaatacggtttatccattgatcatataatcgacgctcaaatcatggacgccaacggtaaagtgtaccgtaaccgtcaagctatgggagaagacgtgttttgggctattcgcggcggaggcggcggaagctacggagtcattcttgcctggaagataaaactcgttagggttccggagaaagtcacagtttttaaactagaaagaacggtgagagaaggagccgttgatttagttcataaatggcaacaagtagctccggttatcgacagagatttgtttatccggttagagattaaaccaataaaccggaaaatctcaaaaggtaagacgattaaagtctccttcatcggaatgtttcttggtttacctgagagacttttaaacataacgaaacagagtttccctgagctacatttaacgaaagaagattgtatggtcaagaaatggatcgaatctagtgttttctgggcgaattatccagaaaaagcaccgatagagttacttctcaaaagagtatcaaccaacgaatactactggaaacgtacttcagattttgttcaagcaccaatctcaaaacagggtcttgcaaagatttttcaaacaatgattgatcattcgccacttccacgacgagtttggatgcaatggaatccatggggagggaaaatggctgagatagcgtctgatgcgacggcgtttgtgcatagaggtggtaatgttttcatgattgagcatttcatgaattggtatagacctggagatgagcttgaagagaagttcttggcgattgcaagaagttttaaagaagctatggctccgtttgtttccaagaatccgagagaagctttctttaattatagagatgtcgatatcggaattactacgccggggtataatgcgacgtatgaaggagctaaggtttatggggatagttatttcaaagggaattatttgagattggttaagattaaagcccggttcgaccggactaattttttccggtctcagcaagggattccggttcttgcttagtttggtgattggtgagtgtttgaattgattgtattgttgtgtgggaaggagtatactattaagttattaaaagttgaaatttgggatcatatccaatgaatctattgggtatatatgttccttagttgttctggcatgggcagttgataattttgtgttaaataatggtttacttcaatctccaagagaagttatgtgctaaaatttttaataataaatggatcggagttgtatatctctaagagaattcattgattataatcaacaatatatgattagttttagttatagcataaatgaacaatatatggtctttaatttgcaaagaatactgattgcaaaatcttaaataaatttcataataaaaaatcaaccagattttacgcgtctttttaaacaaatatcatgtactaatttatccgatgacaaactatattatatgatatcactatatgtttctaaatcataacctaatattattttatttacaattggggtcaagtttaccgctaatttagttatctagcaaagaagcctaataatttttgcatgaatctatgcaacttttgtttttttttgtcaaaaacatagtatgtcagtatgaccgatgagcgatgaacaaaatcattgggtccattgcaaaaagtgtgtttttcagaaatcttggcgcagagtcacagatgaacacgtgataggatttatatattaaatgcttgaacaggacatggtcgagttgcttccaataattgtaatgaggtcacagttttaactatatgatatagacttttcgactggtcgatcggtccaaactggtccgacattttgggatagggttagttataattgttagttcaatattttacacgtgggcaaaattccgagactttctcaccacaatttgaaaaaatctcgattccaatcaatcaaatgaccaatatcaccagtcaaatgtttaaaagagaaaacactagcttgaagccaaaatgtatatatatcatctaagttacaagtgggtacgtacttgtatttgttcttgtccaccctagaacaaatatgttgtatactactatactagctgatggtgttgtaggggagacaattgactgttaagtaaacttttaaatagtgttacaaattatttcagatcatgatggaaaaaatagatttaataatataattaaaaagagagaaaagatttatgtttaacaccttgtactaacgagtacttcaacccaaatttcatttagaagaatatataaatcatgaaaatatcacatgtatttgttattttggaatatttttatatgaaacaagaaaaatattagagacgtatgggttttagtaactaacgttactagcagtctagcatgatatatattttttacaaattaaatgttgtttttaatttatacttgtccttaaatcttaagggttcaaagagtttctcttcttttgccctctgttttcacttgtggccttgtgggtgtctcattctaacacttttcaagttttcatcattttgtactgattttcttctaccttcgaaagaaagtaaaatgggcttcaaagtgattaattaattggctcttttcatttagcatattccagctcgttttagtgttttacttaggtgggttagtaaacttggcggcaaagtcaaagaatgaagcacgtggaaccactaaaccagctttacccgccaaagtcgccgtcttttaccaagtccaccagagaatagaagaaataaatttttcataattatctttgttaagtaaattatgaaaaatgaaggattaggaaatcgagagaggctattggttaaaaaatgtaaggcctaggcccaaaccaaaagaatcgagagtatgcagttattgagtgagatgagtaacggcaagctgagtaaatatgtgctaattattcaattattatgtctaattaattattcgcattaattctaaaaatagctgccaaataactttaaagtgacggttactcttaaatttgtagctcaattctcagtttctcatatatcgataataacttacaattaaaaaaaaaaaacttacaatctaaatatgttatgaatatatatattataaataacatatatgttaacataagaatatttcttaattgatttttcttatctctaatttttactcagctaattatgcacgttcttatacaatacacacttcttcctactaaaaaaaaatatatttgattatgtttatgttggcgaggaaactgattaataagaaatatttatttaagctagatattttattaaaataaataaattatgtcctaataattcggaggtggttaccaaaaaaagatgtaaaacccgaagtaactcctcctttatcttcgctaaaaccctaacctctctcagtccgactctttctctctcatatataacgcgtaagagacagttaactagtaaatcaacttacaacgttgaagtctacttgaaacaaaaaagacacaacattatcgtctaaaatcaatctacaggtctttcattgattctctcatatatcctctcctgtctttacttttttttttcttaacttgttttatacgtctatctatatatgtaagctcgttactagtaattaaagcttagttaagcttaataataatgtattaaaatagtctgtaactcctctcctgattgcttcaccttcttctttactacaggtttcagctcctcaatgtccatggattgcttaagctacttctttaactacgatcctcctgtccagctccaggattgctttattcccgagatggatatgattatccctgaaaccgatagtttcttcttccaatctcaaccgcaactggagtttcatcagccattgtttcaagaagaagctccttcacagacccactttgaccctttctgcgaccagtttctttctccgcaagaaatctttctccctaaccctaaaaacgaaatcttcaacgaaacacacgacctcgatttctttctccccacgccaaaacgccagagacttgttaactccagctacaattgtaacactcaaaaccatttccagagccgtaacccgaatttcttcgaccctttcggcgacactgatttcgttccagaatcttgtaccttccaggagtttcgagttccggatttctctttagctttcaaggtaggccggggagatcaagatgactcaaagaaaccgacgctttcatctcagagcatcgcggctagagggaggagaagaagaattgcagagaagactcacgagctcggaaaactcatccccggtggcaataaacttaacaccgccgagatgttccaagccgccgctaagtatgtcaagtttttgcagagtcaagttgggattctccaactgatgcagaccacaaagaaggtaataaccaaccccaaataagaactttatcatccaattgaaactctaatcgtgttttctcacaagcttcttaatttgtttacgcagggtagctctaatgtgcaaatggaaactcagtatttgcttgaatcgcaagcaatccaggagaagttatcaacagaggaagtgtgtttggtaccgtgtgaaatggttcaagatctaacaactgaagaaaccatttgcagaaccccgaatatttctcgagaaatcaacaagttactgtctaaacatctggctaactagttttagtttcaagcctgaagttctctatgcctaaatttgtgtctgttatcgttgttttgtcttcttagttagtgttttgtcttgttgatttaggggctaattatcctggttaatctcctcttaactgggaactaatacttcatctgtattagtctatgtattagcttttgtctgacattgttcttgttagttaatgtatgtccgcatgttgaagctttcttacatttaaaagagatctttgtgtaaaatcaagcttttatccataagaattttggggctttattattttctgggttttacaaattcaaagcccgaacattttctccgatttacccgatcgataaggggacttgattttccggacttctgatttactatatacattttttttttttacaacttcatataaaaaaatatgttttctgtaaatttgaattatttatggattgaacatcaaaactttagattaaacaacaataacaactttagattaaattttggtttaaattctttaaatctagttaatcacaacttgttgtcaaaacattttcttatgatttgtttcgatcatttgtttgatgatttgttttgatcatttctttcactggcagttaaaatttccatcattttcactattttacacaaaattaataagtatggttcaccaaacagtgcgcatgacctcataaaatattcaatggttacaaataactaaacccatcccaaacattctttatttagcaacaaacccacactatataatagttgtaaattcaatggtaaaaaagtaaaaaaaagctatccaataaaataaaaatggttctatccaagaaaacaattatgcaatcattcgctcttatgattattctatctatcgtcatgagcacaacagaagcaaaaaccataggcaatccagctatgcgagaagatgaacctaaaggttgtcctcctggatccccagcaagttgtaaaatgcaaccggctaatccatataaaccaggttgtgaagctagtcaaagatgtcgtggtacttgataatatgatatattattttatataaataaaaataataatgttacataaataagagttaatttcccaacaaattttgtaaaatataaaatacaaaagttttgtaactgtttttatgagaataaaactattttaaagtaattatgcctaaatttgtgtctcttcttgttattttgagttatgagttagtgtttaatcttgtttattttgcagctaattatccatgatgttgtttaaataaaatttgaagatgagtacataaaaggtcattaacttatacaaccatcaaactaaaaaaagtatataaaattcagaaatagatgagcggggttcttttctagtaaaagttttttaaaaaaccaatgtgattattcgaagaatttatcgttacggtctcataaagaatgttcattattattttcaagaataaatgtttaatcaatattttcaatacatcaatcttctcctaccattctttatatctgcaccataaatttattttatacttatttcgaggattattagccaaccatcattatcaccagcttattctccttagtaggatttaaggttataacgacgctagtctaaaaagcttatcgatgggacttaccaccatattttatcatatgttataactaaaaatcatatatacataatgtcccacaattataacccaaaaaaaaaaagtaaaaaaatttcattaatctaaataaggtgacgccaaatagtagcatccattagcctatttgcccaccaaacacctcttagtctctgtgtcccatcgtgagaggataaaaaaaataaaaaacatcgaaaagtaaaccttatgataattaaacgtgtaatattcgactgttctttttctccatccctctcatcaaatcaaacactttgtttaaaaaattaaattaaaaataagttgtgatggaccttttctttctatcaatcaaagtccgatggatttgacaaaacttaaggtcactattttcaaatacttttgatcaaaagttgagatcccacacactttcgtaatcccatatcaacagtgaggaaaaacataaaaatgggaaagtttaaatgtgataaattggatattacgtacgtgatttttattctaatatataggttttgattttacagtttttttttctttttttttaacatgccactgtaaatgatttacacataaattccgttagcggtaaaccgtgaacgctagccgtaacagtcagatcagttcaagactatatggacaaatacttattgaaaacaaattactatatctcaataacattaattacttattctattctgtaagactgttgtgtaacgcatgaatatagcaaggaagcagcaaggtataagacacgatttacgttataaaaaaaaagtttttttgtacaatagtttagacggctctgtttaacggggcagatttttttttttttgttcactttctcaaataaattagataaacatcatattcattgtcacaagtcagaatatatctaaatacattattatatcaatcttgataattattatggattctcatttaattcgtcccgtaagaaaagccatgaaaccagagctttcttcctgccttccgagatcatccacatgcattgtcaaacagacaaattattcccttaacaaaaaagataaattattattaccattcattaactattttcttatatccgaccatatatagttacatcgatcatagtattgagctcgtaagcttgcacagctctaatcgcaacgacactatctacctcttgaatgtaattttctgtatctagttagaattaaggactagtacaaatcatgttttgaattttaatttgtgcattacagtttcaatattcatgtttgtctactttgtaaaataatgattcatttccgaccaaaaataaattagtttataacatgtcttgggactttagtttaagtttcgattcaaactacgctgattatgtaaaaaaatattttttaataaaagtctttaatagaaattaatttttaataaaatagtggggttttatgtttcaactatagatggaccccaccaaaaattgtagtgtaaataacgaggttacccttcatcggcttccacaggcaaaggttgcaaaggcaaataccgtcatttaacacaaaacgaattacatgaataatttcatttctatgtatacattaacaacaatatttataacgaccttgaggactcgtcgtcgtcaaagaaatcactaaaaacgtctggaatcgtcgttttgttttccatgttgcctccgccgctactgtgagagagcaacatagtcaaagaatctccctcaagctcgtcgagatcggcaaagaaatcctccggctgatgttgaaactcttgcaacaactccggtctataggtattttcaacgtcattataatcgaactccatcttttcctgacgctcttccacgttctcctccttaattgcggcggcgtcaaaaggaggatgagtggaagaggaaggcaagttggagttattgggttcgtctttgctgctgttgttttggaaaactctggatgagggagaagtagtggcggctgcggttgaggatttggaagaagggtttaaagaggaggaggaagaggaacgagtggaacctgcgagagcgttgcgttgagtaggccatgggtggttatgctcagaggtgtaagtaatgactaacatgtttggatcagtgcggctacgttcgacttgtttcctagctgaacaaccttttgagctgctacatctgtagtaacccctgcgaaacatataattaatcctaatccaagttatcaaagacttacattaaccatattttaggtaaccatgtgtaacaaataagaagtaactgcccatttgatcacttacgctcaattggatcaaggaataaacgaatcttaatgatatcttagcttttccgatgggatatatatatattatgatttataagataagtttgcatcaaatgtcacaataaggcatataaaaggcttaatgtgcgccgtagaaaattgaaggaactttatacttttgtagttccatgctaatgattgcacctgcaatattgtttgtcaagggaaaagcatagttgtagatcctacttaattgtgagttttttcaatggttgataaaaaaaaaaaaacttttccgcttactaaaattcacttttttagcatcacatatatattatatatacgtttgtaatataaaatagttatatccaatttgttagaaaacattcctattgaaagaacatacttatattttatatctatataaatttcatgtttctaattaatatgtagaaacggagtcacagacatagggttatataaacacatgtgagtaaatatataccttggataaggagaacctttgataggtttttgaccgtactttcgccaagcccatagatcagacggaacaacttctccactggaccggctgttcatagcggctggagccggtatgcacaccactttctttgcctggctcttcctgcatgaaccatcagtatattgagagtttgagacatatatatgtaagtatacgtctaactgttgtaatgtaaagctgattttgaggtcaattttagtgtgggacatgatgagttcagttttagatatggtgcataatgtagatgttcattgtttgtttatgatgtttacacttcatacataactacgtactgcgcatacctttttcagttttgaaaagataaatatgtctacaaaaaaaatcatataaaagcaaaaataaaagagtaaaataataagtttaacaaaagcaaacgacaggattaaaattgaacagcagaaaaaggacgaatgtaatgtaagaattcagaaaatttcatatacatatataatacattacacaaaacgaaaccctagctatttccactcgttttttttgtttgtttcatttattaattttcaaaaatatagaacggcgagtaacctaatcaagttttcaaatatgtaaatctgaaagactaaaaaaattatgtaattcgtcaataaatgaaaatctccgaagggaaaataatttaatcacatggtgttattttattttatcatgaacctctaataaatgatctcgtttaatcaagaagggaaaaatgataattaaatcacgtagatcgaatttttttaccttctcttaattccgagattccgaggggaagaagagatctgaacctgtgagcatgatgacgtgttgttattattatcgacaagtaaacagtttcttggactgttagtggtattaacgttgatcatgccccacggcgaagctgctacggcggcagaggagacggttatggccggagaattacacgtggaggcatcgtggatattgttactttgcgagatcttaattcttgggaagacactgcattgactcttaatatgatcatcctcaaaaatctttggaaagattgcaaaacttttgttgcttttattatcaccggcgccggagatgtagctggccgggaggtggatgagaggatccttcatgcttacgaacgggtctccgaagggatttgcgagacagctggcagaagtagcggcggaggggaattccacgtggagatctgatgttggcggcggagacatgctgctcggagatggaccttccggtggtccaggagatggtgacacgtggcctgatcctattcctcgtacgacgtctgttagatctccttggaagttgtccatgtcttgaaactcaaagacgctgcacataatatatatgtatgatgcgtgtttatatgagatttatacacgggaagaattagcaaatatccaaatataataaaaatgattaggaatccgtgagagaaatctgattataattctcgatcgttttgtagttatttgggaaaagggtgatcagtgatgttggattgtttacttggggaaatttggtgatcttattggggaaaagaagatgaatggttgatgaaacgagaaagagacgctgacttttcagaatgagaatatcttcgacaacttctccaagttaaagagagagagggagatcaaattatgtactctttttatataatgagctgattaataaaccattaagtagtgtatatcttaaggaggtgaattgtgatataattttttttttaaaagaaattcatggatcgagaaatacggccaagtcttgtacttatttttctttatatactagtatatcacaatatcatataatgtgaaagactgaaagggcataatgagatggtgcacttgagaaaggaaaaaaaaacaagtgattgggaaataaagagataggcaaagagccgcatttatcggagtacgtttcatttttcatccaatgtcattgggccacgtaaacattctgaaatacatttttctgttgtcttgagtaccaaaaaatctctttgtctgtatgtatatacaagttttttaattattatattaaagtgaatcattcttttgtgaatactttttgtccacaaccatgtataatagactgtattatgtattaatggtttataaatgatttcataatttatgatccaatgttttcttatttatttcgtttatcttaaagagacttcagctagatataacaaaagaagttatccgttactgatattgaatattgtcatttgttcaagtcaaccgtagttgacttgtatttagctggtcatttcacaattacaagtgactagaaaaaataagaaataaagcagtttttgtttttatattaaacaaagagagagggagagaagcaattttagtgactattatatgccccataactaaaattatattttaaatcaaaatttgcagaggattaatcaagaagaaatcattagcttgcatatatttacagcgggaaagacgaaagacgacgaagaattcgtttctgtcagaatcgtaaatgacaaaatgtaatttactgtcactaccttaaacgaccccgtacgtgaacaaactttcatgttgataaaagttaaatatagcttgggaacttttttggtgaatttcagcaaacttttcaaatttgtgctagaagaattctaaattttcgagaaaatattgaaaggtaggttgagccttgattagacggtcatgatcggagacaaatttataaaattattctaaattttaaaagagttttactgtgagtaagcggttttatatccaaaaattaaggaaatgaatgaagtataaatcaatataagtggctgatatttggaaaaatctcgcataaatggtagagagtagagacgaagccagctattctttgcatgaatgcgtatatagttatgcatgagcatgacactttgaatgtcacttagaaacctaagtaaactaaacaaacattatttgatctttaaatttcatctccacattagcttattcgtgtgacatagttatgcttgacgggatattcacttctcgttgttcaataacatgcaataaaaaaataatgttaacctaatgtccacattactaatgaaaatttaatatatattttttttggtatgagaaaatgtagtttcttaaatttattattacgtaatttgtttattttctatatattcgttagtgtttttttaacaagtgttataaagaacgatcttgtttgtggatagaacacttctcttaactcatcctctgagtcacggtttagatttgtaaagcaattataattgtttagacataatcaaaccaaacagtcttataaaacaaatataataattgtttacatcaaaagacatatgatgtaatggaactggccaggacttgtagaataacgactcttcaaaatatacgaacacacaatttataatttattcaaatctgagttgggttaaaataagaaaaacaattctcagttggtgtatatatggctgtagattgatttagtattggtgccaactaattatatacgtttgcagttatctcattctagatttgccatattgtcgccaactatatatttatatactactctttacattgttttattgtttatatactatttacaccaaatttcttggaaacatatttgtctattacatatatatgaatttccatgtatggtacgattaaaaataaactgaagaatgagagtagtatcatgggtaataaattcctcacatggtattagcatgtgtttatgtgcatgttggacttaattaattattttatttatttataatctaattcctaattattagtggaattaatgcccatactatatatataatattgtagctcacctacttggttatttttttgttagctagctggttaacaacaaacattttcgtgtgttgattaaacgaaataattttttttccaaactagctgctagattattattggtcaaattaaaataacccatttcttaacggcttgagatataataaggtactattttgtacacataactatataatatgtgctaagcttagcccactcatttaataatctaagtccctctcgatcaggacatacatcatgtaaatgtgcaatgtacttgtttgtggtaagtttgattgttgtgttaataccagattcaaatccatcactgtgccactaccatattcaaatctgcatggacatggtatatgtagttataaagaaattataaatgttttacattcactctaataataagaaatggtgtattcatcatatggtctaattttttcactccttactttttgtcaccgcatttaattatcttgatatgatcatacaaaaacaattgtaaattataataaccacaccggtcatgtaagatgcttcatagaatatataatttacatgtttcacagaaaagaagatgacgagaaaataaagaacttcatcattggcttaaataacacttctctttacaatgttaccgatatagttgctgttaaatagaaaacttatagaggaaattaaccacccaaaaacaaaaattgacattttttttcttcaaaggatcagaaacattttttttgttgttgctaaaaatgtaaatatttcatagaaaaaatatatattaggtttatgatcgatcattttcaacctagacaaatgaacaaaaaacactatcgaaatgcctagatttgcaatgtgaaaaaatggtcggcttcatgacaaacacttagatccacgttggtgcattacaacctcatcactactacatatcttttatcccatattatatttctctctcttttgtttttccttttatcaaattatatagggtctcaattaaatatccattcagtttgcgacgttgcgtgtgttaaacagatacaaaatcgacgtattaatatacacccagatttatgcatttcgacatataaaacacaaaaattcactttccttggaaagtttggaggttggatcaagtttataagtgaccgtctccaacaaggcaacaactcaagttcttagtagaaaaaacactgcacatacatctggatcggtaatccatttggatgattttattccaaaaagaaaacccaattacaatattttttttgaagtctagatctagaaatatctttgctattacatattcctctatatatatctatgttttaattcctctacaaacaattttttttttgtcaaagctctacaaaacatttctgtttttactttttaaattggaagtcaaaaatatctttgttcaacgtttcttttatatgtagaatgtagactgtagttctctcacttcccggccatttggcttcttttagtattttatcaaaggagataaagaaaaataaaatcgcgacccatatgatatgaagcaggcctcgtctctaatggccacgcagattcattttaatatgaaacggcatgaacttatatattgtttactacaataattagaccatacggtgcaaaaattaaaacaaaataagtcatgcatccctcgttctacggtgacgcatgttgatgaacggattctataaaaatagtaatatttaatatctgttatccagtcagatatatttaaaacaatataagaatttaaattgacaaagaaagataaatctgattaaccacggaatatgtgtgtttagattggtaacgtatgattagacacatcaatgctatttaaaagatgcatatgatgataacttttagaagtgagaaggcctttggattattagggattacaaatagtaaacttattatagattacttgagaaaagagattcattaaaacaaaatttgcataaagtaagaaccaaactagaggagcttattccaagaagatgcattttacatttaaaaggtgcatgtaattaatgtctgataaccataactcattaattattctaattcagctaaaagcgagcctaaacccattacacagagaattgcacgaatcacaagtacacaaattgatagaacatttagactttagaggttgatattttttgataaactatagtattgatttatgttattaattgggttgtgtagcacgaggacttctttgaacatgtgaaatgaatattgactttacgtaaaatcgaccatgccctttaagtgttcctcaagttcatacaaaaacaacagtcatactcttatatgtatattataacatgatttaaatttgaactatgtttatttaactatatcctatatataattattacgattgagagatgagaaagtttgttacagatgaagaagaagatattttccccttaaatttctgtaaatgtattttgtacaagtatatatacgatgacaatacaaccggttaatataacccgcgtaatacaaaatcaattaaaccgataaattaaatcaacactctctgatatgacccctcaatatgaggattcgaaaatgttgagaatgctcatcttggactttagatgttcaaactgatgtgagaacaaatgtttagcaaaatatcagctatttgatcatccgtgggaacatgaagcagtttaagctcaccatcatccaacttgtcacgcacggtatggcagtcaatctcaatatatttcgtgctctcatggaagatataattgattgcaatatagataacatctgtactgtctgaaaacaagataagaatcgaagtagtatccgtttaagatacgagcaatgtatgcaaccaaaccaactcacaagtagcaagagctaatgctcagtatctagaaataacatgttgcttcttagatcgacatgagatgatttatgaagaaatttgagctttgatggctctaataccatattacgatcgagagataagaaagtttgttacagatgaagaagaagatattttctgattaaatttccgtaaatgtattttgtacaagtatatatacaatgactattcaaccgattaacatcaccgtaatacaaaatcatctagaccgataaaactaacctaacacattctgataataacaaatatgaatttattgattttcttttaattaagaatagctcgttcaaccaaatgttgacatcttttttttttttgaacactaccaaatgtagacatctagtacactaattcaaccatgtctgtcgtctaatactatttcgagtagtgtgtgatatgcttaatatataaaaaaaacttgttcacgtttctgattttaaaacatagactgaccaaaagctcacaacacacaactagatataaagcccaggagtcaaacaaagaacctgattcgttattttgccgcacaaggcccaaatcaaattagtgatgttacttgaacagttcaaaaagaactgggattattatgcattcagtttataacttaaggggttattatgttattaacccgtttactttcgtttggattttggaattagacgcgaagctgtgaaatctagaagaagaagaagaagaagaagaagaagaagaagaagaagaagaagaagaagaagaagaagaagaagaagaagaagaagcaatgtcagccatgggagcaggaccagatcacctcttcaacctcagaaacaatttctatttgggagcttatcaaacggcgatcaacaacagcgagatcgccaacctctcgccggaaaacgccgtggaacgtgactgtctcgtcttccgatcttacatcgccctcggtagctatcaggttacttctctaatcatatcgataatgtcttcttctttagattcgattacgttttgttttgatctgttcttccaaattttggtgtgtataagcttgttatcagtgagatcgatgaatcagccgctactccactacaagcagtcaaactcctcgctatgtatctatcgactcctcaaaataaggtaattacggctttgattcgtgttcacgaaacatgttgtaaagagattcaaatgcttatatggaacgattgttattggttcaggaatcaacaatttcaagcttgaaggaatggttagcagattcaacaataggaaacaatgatacattacgattgattgctggtattattttcatgcatgaagaagattataatgaaactttgaagcatactcatgctggaggaactatggatttgtaagattttttcgatttttatttggtggattgagtatttatactgtgttttaaaacatgttcttagatggctcattgctattgtttttctaggtatgccttgaatgttcagatattcattaagatgcatagagcagagtatgctgagaagcagcttagagtgatgcaacagattgatgaagaccacactctcactcaacttgctagcgcttggttgaacctggcagtggtataatgcgaaatattcaatgtgttctggcttattctttcaaagagttgtgtatttgcttcttatgctaaggcgttatttgatttcagggcggttcgaagatacaggaagcttatctcattttcgaggatttttctgagaagtacccaatgacatgcttgatcttgaatggcaaagctgtttgctgtatgcaaatgggtaacttcgatgaagctgaaacactacttcttgaagcactcaacaaggtaactacaaattaggcttgtgtaccttaaatttgctctgtacattagcattctcgggaacaatatgaaactagggacctctctaaatttctcacactgcacttgtctcttggcttttctgtatatggggaagtgtgtttatactaatttgtggtgattgcaggatgctaaagatccagaaactcttgcaaatcttgttgtgtgcagtcttcatgtcgggaagtcttcttcacgccacctaaggtaaattttcattatctactcttatattaggcatcatttgcccaatcaatcagtagaactcactgaaaagttaatcgagagtaactgtgtccttaatcctaataaaaacattggtcggtctcgtttgttaacttcatttgtatcacctatccttcttgcagccagctaaaactttcacacccggaacacatacttgtgaagcgtgtatcatcagctgaagataacttcgagagagcagttcaattggtcgcctaaagactcttccatggttcaagctaaaagacgtgcaggatttgtttgctttaccgcatattttcaccgggttggtaaatctaccagaacaaccatactgtcttgtcttttcgaaaccagtatatgaaccagcttttgccattagatatgttaagttacatttcattacttgaaaatatcaaattccacctctcgcactctcaattccgtttgtcatttacttaatttcgaacctaaccaatccagatcgtgtaactcaacccgaaaccttgagtgaattcaaccgatcgtttgaatccaaactagaaataccaaaacaaacaaaagcttctcacttggaaatacttcaatttttttccaaccaatgattttcactttttacacaaagaagcgacatatgtcttccgttaggattttgataaacctcaatcacaataaaataggtgattgacatggatgatattttattaatcaataatctcatatataatctctatatatggataagatgaatactattctactaagaataaatccatcttcttctactaccttcactaccatctagaatcaagactctaatgaaggagtccttgaagggcaatgctcacatacctaatgcataatggtcagtatgcagaaaccaaggaagaagatccatagccactgcgatgaagcttttgccatctccatgccatctttaaactttcttgaagattggtgtgcttagctgtccaattcagctcttctttgatttttcttggatcgctgtaaacctctgcgtaatctcctgcccgtctttccaagtaatcgacttttatatcaacgccggtcgcctttttgcacgcttccacaaactccttcaccgagctacctgcttgcacaacaattaataccacattctctgaaatccattcacttcactatcctagaatctttgccaaacatctaattttatacctttcccggtaccaacattgaagataccaactttgcggggtttcgccttttcaagagctttaacatgagcatcaaccaagtcggtgacatcaatgtaatcacgtacacaagtcccatcaacagtcttgtagtctgttcctttaatctgcagataaaaaccaaataaacttttaacagagattatatgtggtgattacgcacaaaaaagagcctggtaaatacctgcagcccgggaatgatgcctcgtgcagcatcaaagcaagcaccagagatccgtccatgctcactgagttcaggtcttggagcttcacctagtctaccctcaggatcagacccaatcacattgaaatatctgaagaaaaccaatttgaagacagaatgaactcaacttcagggcaagagaaaacaaacacagaggtcacacacacacacacataacagaattaactaacaaccttaggatcataactgccataatagaattcttggagaaatccaagatgatatcttctgccatctttttagcctttccatatggattgattggaacctgtggagtttcctctgttattggcattttctcaggctctccataagtagcacatgtgcttgaatatatcaaagtcttcacaccatgagcagccattgtctctaaaactaccaatgtgttcgatgtgatattgtgataatacttgcaaatgacagaacacaaaatattatttacatcaatcttacagcaaaggttaaatcattttgagaaggaacaaaaatactcacttgagaggaaactgtgtgctttctccaacataagcaacagcagcaaaatgcatcacagcgtcaaatgcgttttcagaaaatattttgttaacctgaaagaatttcttatcaagaaaacacacacaaaaaagcttgtctgtgtgtttatggtggtcttatatctaaaatcacaatgaaggatcatacagcatttgcatctccaagatcagcataaatgaattgaagctttccaggttccggaaacagttgttgcaagatcttgactgcaccgaggttccctcgagatagattgtcctgccaaaacatgaaaagatttacttctttacttagatacaacacgagaagcatgaatctatgtaaggcaatggagatgtatgtataccacaatggtgacacggtatgaatcttttagaaggcgtaaagctgcatgtgacccgatataccctgcaccaccagtgactagaacatgtgtaactcctggttcacttcgagaaaactgaaagatgaagaaaacattactactacaaaaatgagacactgtatcaatatcaagttaagtacatataagaagtaataccacgcttggggtattgaaggttggggattggttgagcaagagaatgcacattgctgtaagtgtcatgaccaaaacaatcttccccatgtaattgttgttcttctttgggtctgcaaaatccaatcctacactccaaaaatcatcaacatgtgtgaaattttgaatccaaataagaaacacaagaaaagcttatgactttggagctaactaataagcccccagaaaatctaaaatctctatcaacttaccaaccacttctaaacaagtaagcaaaatatttcagacaaataaaaaaaaacagtagaaaaatcaggttttatcataaaagtctaaaagatattcctgtgtgtaccttcaaaagacatagatctgttttgcctcccggttctagctctgcctaaattcagcattttgattctgaaagtacacggcgtagtccagtttcagctgtaagagattaacaactcgaaatatttagaaaactcgcacctgcaaaaacctcagtaactccagtttgggtgggaacatgtaggtctttcaaataaaaatgaaaatgcagaattcacaccgacacagaatttcacaacaacaaaaaggccaaagttcagcctgtacatgaggaaacagaagaaaactgtagaaagcaaaaatgttgtataatctggacttgaccaagaatctctcttctatagtaagaaagattcgatctcaattctaagtggaaaaggttagaacgacttacgtacaaaggaggaaagtaaagagagtggtcttgacggtgaaagcgagcgaagggaacacgagacacgagacaagagaagagctataaagttgaattaaatgattactttattgagatttttagacacaagtaacgaatgaaattgcaacaagtattataagggacgcggtgattggaacgagggagctccggcacctgtgcgtaccgacgaactctctgctgcacatgtcggcaaaagtctctacgtggcttttactttatggccaaaacttgactacctcttgaccaacatattatagtacaacaaaaatttacggaaaatattagtataatgaatgataagcaaaacaaaatctattgtttttggttgtaatatttgtaaatgatttttagatagttcgataatttgctagttataattagaaaaatttcgaatagagttataaagagtagacctttttgtatatagtaataaaaataattggctataaactatgttgacttcataacattactacgtcttcttaaaaacaaaaacatgactacatcttgatcaagaaaattaaagcaaccgacagttccatgcacattgactttactagatctcgagaccatttattcctcagttgtatagatttgtttatcttttttgaatttaatgttagaaaaaaaagaagagaaattgctttcattgagagttgaactcaagacctcctgcatactatatatttgtttatcaaatatacattcattgattaaactaatttcatatatcataaaatttgaatcgtacaaagatcaccacaagtcagaagactaataaaacaccactaacctgaacaagcacatgttctttgtattaaaaatgtgagagaataattcatcatgaaaaagtcataatcaaagtcaaagcctaaccctttttaagtcttttcggggccgtcttggagcaggcctaacaggctagcggccttttaagacttactctactacatttagaggtcaagttataatggatcaaaaattgaaattgaagagaaaatgtaccaatctaataaactaatcaaactatgtgtaccaaaacgtaaatatcagaaacatcctatagatggttcgggtcctctggttcgccagtaaaattatgaccgcagactgaaaaaaatggcggcatcatcatctcatctcttcgcactcccttcgcctgcttctccgtttctatgtaacatctctatctctctatctgttcctttccgacattgtttatattatcctctttcttacccgcatcgtttctgttagctgcaccaaaccggaatcgagttcgtgttcttgcgaaatcatgcccggagaatcagagcttcgactccaacgattcggattcttcctcagagactacccacaaagcccaggttaataatacaagatgccttacattcttgttggttctgtgtgttaaagtccgtatcttttttcttattccaagcatttgtatcagctgcaaaaggtttctaattgatcgttttgactactaatagtttaccttgaaatcagctagttgattggttatgttctctagttaagtagctatgctaagaaattttttaaagtcttagtctttagttcttctgctacaaaaattggtacatcaacactagtatgtctttgttactcttcaatgatctagttgtagttctcagtgtatagctatctatgcaactgctttcattagttcttagtcttaatttctgctgtcaacttatgtggcttgtgttcttggctgcagggagatcagaaatcagtgtcacggagacagtggatgacggcatgtgtgtgcgcatctgcagctttaattagcaattcttatacctttgtctctgtacaaagcgcagccgctttagacaagaaaccaggaggttcatgtcgtaactgccagggcagtggtgctgttctttgtgagtgacaagttcttttgttttagtttcttatctggaactctgatatagaaacatatccttaaacgtatattgtatagtatatttgccttgtgtttctttagaatctgtagggtcttatagcttaagattgaaagatataagacctgattgtgacttttaacaacaaacatatggaactcttgataatagttttcgtagacaccttcctatgtgaaaagttcgtaatgattctctgtttccatttgatatgatgcaaaatgcctcatgagcttactactgatacccatttggtttaattggattttgttatgatataggtgatatgtgtggtggtacaggaaaatggaaagctctcaaccgaaaacgtgcgaaagatgtatatgagtttacggaatgtccaaactgttacggtttgtttccttcccgatatctctttagtcttgtttggtttcgtaacacttgaaatttcctgattagttggtggcttctattgcaaacaggtcgaggtaagcttgtttgtccggtctgtttaggtacaggtttaccaaacaacaaaggccttcttagaaggcctggtgctcgtgagctactcgaaaagatgtacaatggtcggcttcttcctgattcatgagaaggtaggtataggtcctttttactacaacttcacatttgagattattgggttcacgaattaaaagcttggtgaggacaagcgtgttcctctctcttatctttccatctcttgaaatggttgcagattgttactgcaaatatgattttaagcacagagccagtagacatgatgatagaagcggatgaaaacttacacattgaggatgcatggaaagctatagaagaatgtatcgaattcaacatgtttttataatgctgctaggtttgtgttgtaaattctataaacataaaactttccttcttccccatacagactagacgaatcagtttcgactaagatactcactcactcacctatgcatttaggcatatagaatcacacactttgattattctctttagacctaactacacacacatctactcaatcacacaactatttcatatttcctggaaccataatattccttacatcaacatcatttcatactaaaaagcaatcagtctagttggactaataccggtaagcataacaaataaagaggatatagtgaaatgtgaaggttaagaagaatatgtaaagatgtaaacatacagctggtttcgaaatcattagtcgaattcaatgagctctaaccaagctgcatgagagacacatgttcatgtgcatgcctctatatttattagtatttaactagtcagttttcatgtttctctttttgatatttttcaactaattttcatgttaaatgtaccaatgttatattggaaattatgcaacagccaacatgcgatacacatgcatttgttaaatcagtttacttattttcgagttcggtacattcgatgttatacaactattggcaccaattaattgtgtttgtaaatcaataagaagtacgttgggtgtgaaaaaataaattaatggaaatataggcctatatatactaacactagatagtcactagacaacagacacaaaagcatataagcaaaaaatacaaaacaaattatggcttcttcatcactcatcagtgtagccctaaccctaatcttgatcttccacctcatgccggaaacaaccgtcgctcgtcgtcttactgatcagaagccgagtgatgaagtagtcaccaccactaccgacgaagctaacaacctaccgtttccaccgggcttgccatttggcggtgttcctccgttaccgtcactttttccgccgtttgtaccttctccgttccctggaaatatcccacgtttaccatttccgtttccgtttccgacatcacctccggcgccatcccttcctggtttccctggctttacgtttcctcccctgccattcctcacaccgccacctctgtgaacgtatacgttagcgccgttataatgttagttatcccgttggaataatctcatggtaatttcgataatcatcatgtgtactcgatgatataatactggtttttaatgaaaattttaataaagatatgttgtgtacttgtgtttgtgtaaatgtaacacaatgttgatctaagaaataaaggaccgatcgatttgaggatgtcaacattgtatttgagaacggctcaagttgcatgtgttgttttaaaagttttatttaattctaattaatattgtttttttatatagttcataaagtttagagagattggaaactaatttatacaaacttgagggaaaagagagttttaaatcgtaggttttctaatctttagaaaattgtgtccttcctagttttttaaaaatttattgcttctctattctattttaatttgagtagacaaaaacaaagtgaaaacttacgcaaaggatttggaaaatggtgttttagaatttgttacatcatgcaactttcaaagtcaaacatcatgcaacttatgagtattttggaaaatggtagcaacaaattacagtttggtcatcagagcctgatgagacaaacaatgtactgaaacaattctaagaaaaatcatcagggtaaagaaaaattgttgagttcctgtctaacaacattgtctctggcattcttgacgagtgttcctcttcaagaattcaattcaaatcaaccccaaaaagtcttgctttgcttaagctctgggaagaatttgacatgaagcaatctttcatttccagcgaatccttctcattcttatggttccaatactccacttggccatggttcgggtcaagagcctcagtggcctgtagatgaagatgatcataagctgtgtaagaaaaatatcatggacccggggtatcaaacaagacctaggttgactcgattacttaaaattacctgaacaataaacggagagcgaaagccaaacatttttaacccatcgatgctttccaacatatggacatcttgtttttggttgctgcgtctcatgatctcttccttaactctaagcaacaccatttcccagcacttctgaggtgaggcataagagaagctctcgtcttgagattcttccaaagtaacctgaaatgataaacaacaatgtaaggcaggttttagtttttccaagcgtagcaccaactaataataagaaccttaaaaaggtttattaccttgaagagtggacccagaagtcctgcatctacaatctcagagacgtaatagcttattctcattggatcttgcacgttatagaacttaacacgactcttaaaccctgtaaaaaaacaaaccgactcttaagctctttcgacacatgaatcaattatattctttaagctaaaaaaagggtttagggagatgcaccttttggaaatatagcatgcttgttacaccaaagctttcccacgaccaagaacccaagatttataggttcaacatgataagcagctaagtccatgatggatgcatcctcacatatctcagaagatttattacactcaccattcagatcaaaacattcttcttgtacctgcttttccttaacgataatcccactagattctcccttctgagtctctgaacaaccttccatgactttggaaagccaagcttttagatcatctgattcaccttccaatgctcttaccaatgagcttaactcatctatggtgtaacgaagaaaaatgaaacggtctttcccttcacatgaacaaatatcgtgtttcgtgcaaccatattcttcgagagatgagcaattcttgcagccagtagcagagagatgcaagtcactaaagcaagagatgcattccctttcacagtttgaatcaaagtctttatccatctttaccaagctgaaaccatttccaagagcctcaattcttttttcttccatccgtaaccgtgcctcgatggccttagttatgataccgtccttcccacagaatctcttccagctgaacctttttgtattatcttccccatgtgctgagagggacttaacagcttcaaaagctgctccaaggagaattttgtcatgagatagagacgttttccgagtctcttggctatatatttccacagcattctgtccatgagccagccaatcaaccggagccacattcaccgcttctgcacagttgaatccgcagttgaaacccgaatgatatgctctagggaatgttagaacatactcccctgcattctgaacagctcgataaaccgggactccctcatttttcaaaatcgttggagaaaactgagtaaccagttcatgaagtagatcaggttgttcatcgaacaaatctggtagatgttttctcattgccttctctagcccagttgcatggcttcccggaactccgtaccatacttttggctcgccaaagtgatgatagttcagtgaatatagatgattgtcctcaacatgctgttacaatcaaaacatcaaacatttagatgagaaataggaaacaaaatgacaaaaatgattagatagtgatatatgtaaacttacccaacaaaacgttgaaaagcacatgcccacatagagccatggcacctgaacccctgagatctcacaatcctcaaaggatagtagagatccctgcagacgggcgaggttgttcaaattccaaccagaagatatgtatttatccatatcatttcttctggttggaatttttacccctttggagaaaccgcttccaagtatgggattctccaaatccgtcccatacaataccttcaatcattaagaagagagtatgtaaatatgaagatgaattaaggtgaaaacgtcaatgtttttacaggaaatcagttaaaggttcatggtgaagagaagacggactatcaaatcgtccaaaacattctcatatccctcccggcgaggttcgatagcatagtggcagtgatggaacaaacgaaggattttaccatactgcctgtgacagagttgatagggactcttcaagcggatcagaatcgtgtatcttcaaggaatgagaacacgtccgaaggtgtgtttcatgctagaaaaagtggagggaatcctggttttaaagcagaagatgaacaaaagtggtgtgggttttgtaagaaacaggggatggcttattggcaaaaaggttcaaggaatcaaaaagaatgttacaactgtgggaaagttggacatttttcaagagagtgtctttcaaagaagtatgaaagggcacatatgggtcttcaggatgaagatgataattcgtatattgttttgtgcatttgaagaatcagcaaaaatcaaggaagaaaatggctggttggtggatagtggtttcataaaccacatgaccaaggaagtgaaaaaaagttcacaaggctagaaagaagtattaacgttccaattcaaaattggaaacgggggaaaaatgaaattcaaccacaagagttgaagaaatgagtaaaaagtttggtgtgagatctaaaactcaattaagagggagggttagtttataattgagtttggtctaaatgtgatttaattatgtaattaagtatgtttgttaagtttatacaatcaagagtcttgtcttaagggtagttatgttaagagtcataagtgaagagattttcaattaaagaggtttcagttttccagatttaaaaaaaaaaaaaaaaaaaaaaaaaaaaaaaaaaaaaaaaaaagaagtttcaggtttcataactctgtctctgtctctttcgtcaagtccctctgtcttttaccaaagttcttcaataatttaacaataacgaccataaagaagaacattttatgtaccttaacttcatttgtttctttctcaatgattctccagtactctccttcgatctcctcaacagatggatctccaacattgtcttttctttcaaagtaggagtctttgaaatcttgagcgtatttctcaaacttctcaagagtaaattctggaccagattcgaaaccaaaattctcttcttcggtcgccttgggggtagaaactgatttagaaacagagccatttcgtttcttgggggcgacggttcttgagtattttcctcgtttccgtttccttcctttaggtgtcttcttcttcacgggtcctctgttctgaagcaggtcaacaaactgaacacgggttgggaaatttttattcttccatatactatcccctttaagccggcaaggaggagaccaattcgacggtggcacgattcgacaaataccaaatgattcagctaagggacgtattttttctatgtaagcaagcgtatcttcaaactcctaaacaccaaaatgttgaagaaaaatgaagaaagaacaaaatcatcaacataacaactgaaaacaagatgatgaacaattagtacctctgatgtagggtggaatactggagcttcaccaatgtctggcctcttttcattagccggatcccatctagcaagaacctgtcatatgtttaaaaatggtttatttgtaaggcttttatggactacatcagactgataccaagcttacttcccaagaaacaggtcggtcttaccttcggatgatacggactactaggaggttctacattagtgcccttgttctgaagaaaccaaaaaaaagaaagaaaaggaaaaatggcatgcttgagaaaaaacatcacgagaaaattaagatttaatctcggttttatttccaatgaatccaaaataacaaaatgttgtctcagaatcaatattagtaaatcaacaagtaaggagtgtcatttaaggccaacatcatggtgcaattaaaacccaatctactgtacaaaaccatgtcctgatgataccaagtttacgccctaagagtcaggtcggtctttacctttcgatgacaacgcctacgaggaggttctacgctagtgtccttgtcctgaagaaaccaaaaaaatggaaaatggtatgactagaaaacatcaagagaacattaagattcaatctcaaaaacagaagattcgagtaaggattgtcatttaaggccaaaatcttgatgcaattacagtctcaatatttgtcacatcaagtatgtaatctagagtaagatatgtagcaataagtaatacaccaaaatgataaccaaaactaggcgattaagcgatgaatcatccttaaaacgaggcgattaatcgacgaatcattcttaaaactactcgaggcgattaatctatgaatcattcttaaaactaggcgattaatatcgatgaatcattcttaaaactacgagaggcgataaatcgatgaatcatccttagtactaggcaaatcgatcaattcgatgaatcattctttcgaactatgcgagaaatggatgaattatccttaaagcaagatatatagaatctaacctctttgttctgagcagcactgaaaggctccattggattggaaccaatcactctccactccacaaaacccaaaggactctaataacaactgagaagacaaaagttgttagtagccctaaccctaataaaacaggggatcaacaaaatacccagacttaagaaatactccacctcacagataaagagataagaaaactgaggatatcataccaatcacaaacacaactcaaaatcaccttatccctaattgtggcataaaaatttgattagggagttaaatgaaaataaagtagcccaactgggaaatttaaatgattagtaatgagaaacaacacagaacaaagccaatcgactaaataaactatcatcaacaattaaaaaaaaaaaatggaatataagtattttacctcaaacgatcggttgagtttcagagatggaaaaaacttgtgcggaaagtgtctagattattaaatttcatgatttatttgacaactactaattctgaaaactatatattaaaaaataaattcgaaacagaaaaaataataagagtatcagacagagacagagaaagacaaagaagaagatggaagcaaactctgtctctgtgagaagacgaggaagttggagaacaaccgccaaactaaaacgcacactgttttgttttttttaacagaaacctatcagcggaagctcctaagcccacggcaccgtacgattccttctaattttagttaattacgcgattaacctagattttatgttattaacagtttgtggcatcatttttttttttttttttgcttctttcgtcatctttaatagattttccgcgcatttccgtaggtttcgcatctcattcaaattttcggttctgttcaattggagtatttcggttcggttcggttcggttccaatttggtttttctttttttctttgtcggcaattattaataaaagttaaataaataaacagtttaaattatcaatatgtttaaaatgtgttgtttgtatataacttatatttagtgaaaattataatcattaaacatggtttagtcggttgaatttctcaaaatttgggtttggttaggttatgtttggtctatttggtatgagattcaaaataggatcaatcttcatggttttgaaaatgtgttttgaaattggatttcatgaaaatactactcaatggaaaaaaatatgaacttggttcaaagagcaaaagggtgaatgatcaaagactgattgtgtttctcctgattaatcttgtctcttaatgttttatcagatacttcgtcacaaaccaaatatcatatagagaacttgaacagaaagcttatattatatcaaaggccaaaagattcgatttaagatgtttcttgattcttcaagaaagaaaaacaaaagagttatattgaggtctgaaatcttacactagagcttattgcaactggacagagaaaatgcaagataaagagaatttatatatataaaaacaaccataaagatagaacttgaaccaatcctatggtgttaagagcttaaaatcagatcaatggtgatgaaggtcgctgaagtagctgttatctttcacataggaaaagatgtttctgagatttcttcttgttggtttttatcaccaaaacattttttggaccaacctatgtgttgtttcttttccaagaacattgtttggttgtgttggtgaatggaaactggattcaggactgcatctagctcaccacaggatgctgctattagtcctggatatatacaagatttgtaatttgttttaaattgctgaatatctttattagatcatagttttgaggttttatttgaaatcatgacaagaactctgacctaagaacagaggagatactttcctgggtctcgatttgtactcgggatgaaattgagcaccgatgaagaaagggtggcttggaagttcaacaatctccatgcgctccccagtttcatcttttgcagcaaaagagagaccagcctgttcaaggcttgcaaccatatcaggattcacctgcaagaaaccagttagtagtatcaagaaatggccaagctctaagaaaccaaaatgtgtattcaaatatccgtacctcatatctatggcgatgcctttcatcgacaaactctttgttcccatatctgtaaatatagtttacataagtagtatagcaatggcagagtgattaagatcaaaagatggtttcttacagtcttgcagatttgctttccttgtcatggaaataggctcttctcgaacctaatcgcattgtgcctcccatatgagttatggagccctcaggcatgaatatgatgcatggatgtttggtttcaggttcaaactctgtgctatttgcatcaggcaagcagagaagtgagcgtgcaaactcgatgacagcgatctgcatcccgagacagataccgaggaaagggatattgttttctcgggcatattttgctgcaagaatcatcccctccactcccctatcaccaaaccctccagggagaagaactccatttgcgtcctgatgaaccaatatgctatgttatgacttatgaatcatcaggcttctcaaagattgccaaaaaagttaaaacaaaccttcagtaacttccaagcagcctcatatgcgcgtgaatcctgcccaaataagacacaattctgtctcatagtattcaagaagaggcaaattaggatgaatgtaattaatcagacttgtttacctcttgcttcttggtcttttcgagatcacacgatggaaccatatcaacttcaagctttttgtgaaaagccacagaagcatggaggagggcctaaacaattagcagggtcattaaaccagaccttgtgatgtgcatgagaaagtgatgtataagtttaccttcaagacagagagataggcatctgatagatctgtatatttccccacgatagcgattctcacctgtaaaacatttacttggatgtcaagaaagagacatcgaggctacaaagtatacaaatctttcgcatttgagacttacgggtacatttaaaccgtcactaatttctaccattgatgcccatttctctaaagaaggttctttagcaataccagaaaggttcaggacttttgaaattgcttcatgagccttctgctcctgtttcaagaaacgaaaacaagtgttacctctgatgatttttgtaaattattaaaaaaatcatcgcggtagttgaaaactcgtaccttgagcaacagaggaatgtgccagatgttgggaacatcacagagagagaagatgttctgaatctgaaaacatcaagtgcggaagctgattaaccaatatttgagggagaaaaaaaagacaagggagaactaagcacaagatgcatcataccggaacatagcaaaaccgagatagctttgcttttacattctcttcaagtgcctataagcaaaggaaaacagagttcttataatgtaacgaggagatagagaccaagatgaacaaattaaaacctttgtgctccgacaagctatgatattaggtgtcaaaccaaagcctcgtagatctttaatactgtgctgtgttggttttgttttctgaaataagagatttcgaaacaaatgaagtttctcaaacacatatatacacttcatttctagaaatatataaacaaacctgttcaccaacaacactgagcacaggcacgagggtgacatggatcagacagaaattctcacggcctacactgtatgataattggctaagtgcgtcagcaaaaggcctggattcattatctcctgcaaacacaaagatttctctgttttatatagagaagaagcaaacaaagaaaatcgaaattctcggtgttaatattacctatagttccacctaactcaatgatgcaaacatcaggaggaccttcttttccatcgacaggaatcattgcaactctctccacccattctcggattgtatcagtgacgtgaggaacaatctaatatcaattaccaaccaaaacttaaaactcaaagtttatgatgacaaaatagaaatattgaaactttcatttacctgaacagtttcccctaagtaatctcctttcctctctttctccatcacatactgtgacaaacaacaacagcaaaggtactttagttatgggcttgttgcagataatatcaaagataaacattctgtagttacccgctgaatcttcccgtaagtgatattgttatctcgagttaatgttgtatctagaaacctctcgtagtttccaagatcaagatccacctttttttgcaaatccatcaaaaacgttttcaagtgtttgaatacaaaaggtagataaaacacaggcaagttggttttgtttttacctcactaccatcgtccaagacaaacacttctccatgttcgtaaggggatatggttccagcatcatagttcaaatacggatctagagatataaaaaaatggctttaggttgagtgccccacaagtaaacatcatatacattttgaactcaacgaaagaaagataccgattttgatacaagtaacgcgaagaccacaagactgaagaaggacaccaacactgcttgcagtgattcctttccctaatccactcacaacacctcctgttacaagtacgtacttcatcttctagtttataccctgaacaaacgtcaccaaaaccagattataagaaaaaggtatatataagagctcttatacaataaatacgaccaatttcacagagacggcagaagaatgtaagtacaagagacatagatgggaaacaaaaaactgagtgtaagagagagagggcttaagagaaagaagaaaactcagaaatgagaaaactgagaagctttgaaacagaggaaccctgtttattaagtaaaatctctgtttgcgtatagtttaatattagcgggaataaaaaccaacatttgggtttatcttaccaaaatatttcagaactgttttgtgggctttgagagaagaacaatggcatcaatatataagagaagagaatcagtgggcatggcccttggctttcaatgtccatagaagaaaacaagcacgacttaattaattaaaactttaaatatatacctttaaatttaatattatgagagtggaaaaactaaatatatttaaaattaatgtaagaatataactactttctatggtgattaagattttcttaagcaatatggttatttgtattaaaccattaaattatctttttatgataattaactatatatactagaaaataacccacgcgtcgttcgagtttatgtttagtctattttgttttttatcacattttgtagtgtttataatagtgttgttgatgtgtcaccagcaactttcaagtttattaagattttcttaagccatatagttatttgcattaaaatatctttttaatgatgtttgtatatctattctaaagtattagaccttttatgaaataaatatctacaacatatataatgatggtggatttgagaagaatggccaaccagacatgtgtttaacacttttgccttttttatattaaatatctagttatcatttttgtcatcttaaatttttaaaacctaaagatagaaccatagaaagttctcggaaagtttgtgctaaagatagaaactacgatagcacaaactattatgtaatgtcccatcgtttcgacactttcaatcgccctttggaaactcttgatgtaagctattgggaactacaaaaaaagttattcgaccatgaaagtagattatgggtgcaaatgattgtgcgtagatgaatgattggaaacaatctgagttgagaaagatgaaagtgttgaacatatggtgacaaatagatgccaattttgtttaacatacttttttcatctaaatgtacaactatttgcaccccatacttgttggtgttattccatgtttgggcaaagattaatctatggtgaaatagacattgagctaaaggcccaaaagtaaaccttgttttcactttatagctaagattactcatagcctattggcattcttgaataaatcgttccttgatcttctcttgcttgtttttgtatcgtcttacaattgcacatatctttcatatactatcaaatttgtaaaaaaaaatcgaaatcttcaaaaacaagtgaataggttgttaaatgtcatgtttgaagtttagcaaatttcccatattatctcattggtttggtgtttggacatatttgtgttcatattgcagtagaatgaagcatgtggtcatactctttagtactaaaaaattatatgtttgtagattcacgtatgttattagttttcaaatccctacatcatattatcattttttttaattatttttttgggtcaaaacatcatattatcatttttaaaaattgattttaaattataagtgccgaggtttaaggtaatgaaatcgaagaaacgttcaacacaccaaagatctctcaaactgaagattttattagaagatttgtcagaatttctccctcaagcagtcttctttatatctcctctatagctcagatttttttcccattcattcttttttacattgtgctcaacatttgaagcaacatgcgcaatggaactggaaagtttctaatttagattggtgttcaccaaactcttgttccttctgtatcaataaacacatcaagagatagagagagattcaagctttcttagctcttttaattgaagctttattgattgcatcagagatctctctccgtctttttgcattgttcttgttgatctctccagttccagtattgttattgttttgagcgtttgttcctccagagcttttgttagctgctttcaatgcttcttgcacaaacaccttcagtctccacaatgtaacgtcagtctgttcacaaacaagagaggaaaccgttaaaacctgaatatctgatgcaaaaccacaaagaaataaggaagattttggtgttgacctgaacatcaatgtcaagctcgacttctggtgctccagccgggaaactcgggttgctctctgaaaccatttttaacgccttagacagatcctcaggtgagagacgacctagagctgcagaaagtcctttcttttcttgagtggacagttttctgtttatttccaaaaccacaccaaaaactcggttacgaacccttcattaagggtaaaaatgatcaacagaagaggttatttatacctgcatctctgaactactgattcccggagtttctccagctgcagatcaatctcatatagctaaagatacgtacaaagcaaactcatcaacccacagctataataaatggcctgaaatgaaatagatcaacagctgataattggttttgcatttgcttacttcgttgcttaaatccctagccatttccgcttgtgcagcctccattgtaagctgcttattggcatgcttctccgcttcttcgtctacttgtttcttttcctgttcataacatcacagttaacacatcactgatattacaaagacgaatacttggaaactgaacatttggtgtacctcctccacaagtttaggcattatcaggagccatttctcctcaaatttctccagaagagattcagccatcacataaacatcttctttttcttcattgtatctcatcgcgttcttgaaaactagtctaacatcggcatatatctccctgacattgctatactccgaactctccattttttttttaattgttcccaagtccattggcttctctataacctgttaagtaatgaacagaagctatgaacatttttcaaaatcgctcatttcagcaaaattccatgtaaacatggaatatttaacccacagtatattagcaacagtttgaatctttaccttgtaataatcatgtagtccaagtcctttaacatcaacaggctccaagaacggccatgcccatttatgttgagcaatctaagaggtataagaagatgaaagttttagatgcagcaaacactgagtaaacaatataaatttggtaaactaaggacgcattaaacaaagtaatctaagatccaggctttcgattttcgtcataatctgagaatagtatcatagagacaaagagggtatatttttcttgcttgcctgacgaaacattgttgcaaattgacgcataaggtcagggctggaaacatgttttccctttgatttttctttcccggccgagttacccttcgagttgtttggttgagaaatagcgatcttcttcccgcccgagttactcttagaagtgttagtttgagcagctccatcttttgtagagtaaaagtgttcgacctccacaactttttgctcaagctgcactccaatataggggtaagagatttgaaaccaagaaagtagcagtgccaagtgaaagcaattgtcacctgattcactctatctgttatctcatctacgcaagtcccaaaattctcaagctcactttctccatttccattgaaaactgcaagctctgtattctcgacatcgcagtttggaacaagcacaggttcttcctaaacaatgacagaaactcatcaaaaagcttcaagacagcacaaaccttaaaagaacaaacatttttgagttaactaaacttcaaaatcgaacacaatcctctgaattgcatctttctacaataattataactgagaattgagtctctataccattctagttactcaaaagagtttaaattgaataaagtttgacactttatgataaccctaatctaaaaaattgggaattgtcaacaaaaacaactaagcttatcgagacggaagcaaaggtaagccaaaatgtcaaaagtaagggtatagaatcaacaaaggaaagtgattgcaactataatcaggaagtaataataagcttatgtaccttgacatgtacagacattagagaagagtagtgactcacgagagctttttcgaaggatcagaagaaagacagaggtcggaggacgaagacggaagagacagcagctaacgctttgctccggtttagggtttagaacgaataggcttttcaaaaaactttaacctttttatcaatttgggcttctctgttcggcccattattcaaccaacattccaattacgcggtttaattttcaacaaccagttaaaatattgggttgcatcttccatttctaaaaatagtaatatagtaaatttttattcttgataatgtaaaattgacttttattatagtcttttagtttggttctgaaaagaagaaaaaaaatcatacttgaaatcatctgaaatatcacacatataatgagtttaatttatttattttggtataaattaacttcttttttgtgtgcaaaagtataaattaactaaaagatcattctaacacttccttaataaacgatacaaggcatgaaatatttcagtaacatcaaaagtttgaaaatattttcctacatcgtcaattgaattaaaataaaaaatgtcttacggtagttgtagttaaattgcctataaatctattaaaaaaaacataacaagaaagttgcagatgtctctccccttggttcgaaaactatgaggcataaatcatcttttctcatcaaattttgaacttgggaacacaaaaacaacatcaaaaataatactattatctagaagagctacaatgggtctataaattcatttaaatactaaaaactctatcccacaattcttttgcattttttggtttcttggcgtggcaaatgccattaatgtatactaagttactaacaataaataacactccattttaaaatacttttaaaacatctttttgattgaccgtcatagaaaattatgaagacatatcatatcgttcaaatgtagtatagattcaacatccaagaaacatgcaatgttcgagcaacgaaatatcttttcttattaattcgcaaatcattttatatatattttgtcaagattctcaattcatttgattatcacacacgtacctaacactgataataagctaatggtcaaaatgtggagacacggatttagtatattcaaatgttatcatgtaccttcttcgtcagaccgcctctgtattaacatcccaacatgttagtcactacttctccacgccgacatagacgtgctttccacttcttcccccatctctatatattctgaaaattctaaccctaaaccctaaaaatcaaaccttttccttcatcatctttagtacatcgtcttaagatttctgactttgttatgtctcctccagcattggttgtgtttgaagatggtttaacccaaaaatggagcaacgacgagtggcagggtttcagcgtttatcccggagaaaaccctaaccctaatattaatttcttggtgcagaaggcgactctgcagaaccagatgactgtctctcgcccatcgctgaacgaagagagcttcagaatggtcttacctctggcaatgtctccgccaagagacaacgctgtgcctcttcctgttcttcctgagccgatgatgaaaccacggaagaagcttagccaccaagaatccatgctttctctacgaaaatctcggtatcccgagaaaaacttctaccaagaagaagaaaatttcaagtgcaatgcgttctgtttatccctccccgggtttggaaaaagacctgtgcgatcaccaaaaagcgaggactctataaagaagaaaatgatcaaagcgtcatcattctcaaattccactgtctcactaagtgcctcgctagagaaattcgaatgtggatcatgggcttcaacgacagctctaacccgcgaaaacggcagattgtatatcgatctaccggtggagatgatcaaatgtggcggtggagatgtgcaagaaccagtgagttctggtttcttctttgacaaggaaacaggaagtctagctttgagaagcgttctaaagaaaagcagttctctgtctggaagacaattaagggatttggctgagacatccccgcaacgccgtgtcagattctcgaccacaacctcggattcgtgcccagcttcgccgcgaacatgtattaccccaagactgttgaaagctagagatgacttcaatacgttcttagcagcacagaacgcgtgaaacacacacaaaataaaaaaaacagagcactaagactttgcaataataaatgatcggtctgtatatatcaatggagtgtgtgtgtttatcttctgtttagatttgagtctcctctacgttaaaaaatctcgatgaaagacactaggagcatttgaaaatacgatcttcttatcttccctttagagttaagatctctttctgctctgctttgttttcctctgttttctgcataattcttcatttttaagaatgggaaaagtacacaaatttttctttcatttaaaaaaaaagattggtacatacaacagaatatagaataatcggtaaatactaaacctcgtacattctacaaatcctgttccaaattgatggaaaggaaagtgaaaggaggcatgtgtagagtatttttacaagacgaaaacttcaacgtcaagaaaatagattgggttagtgattcacctataaaaaccataggtatgaatcttggacgcagatccaaaacgcaaacgcgctccagtcaaacttgaaagcaaacagaggaataaaaaaaacatgttatagataaagtgaagtattgttagcgttttgaacccttggttttatgaatttcaggttcttgaatcgacgaaaacgcgaacaacgtctagaatcttggcatgacaaatcgggcatttcccgccattatattgtagttcgtttgcgcatctcaggcatgtgcacatgtgcccacacctacagaaatcaaacgcaattgtaaatattgtaggggttgcataaaccaaaccaaatcgaaatattcaaagagaggtaggtgatcgatataatgatatctgttcatacctgtataaaagtgtttcaacttgcgtttcgttacaaacgcagcatttgcgtttaaagggattttccaggtgaaccgacttttgaaggctagcattgacgtccaaacacgttttgacagagtctcgtagctcagacatttctagttggagctgtaaaatgtgtgatctcatttcgcttataatctccatctcctgaaacattttaatgaaatataaatgccaatctctcaccaaaactgatggtgacatttcaacaagaaaagaagaggctcacagtggaatgaagattgtgcgttggtgtggaagtaactcctgtgtccagagaactccatgatcctgccggagacggtgcaaatatctgtgatgatgattggctcaagtcatctctgtcttcatctttttcttctcctatgtcatatttctcttcctctttagttgcttcttcaatccggtgagccggatgtatctgaacacgggacattatgagcttatcgatcttctctcgtaatccgctttggaggaaacccgaaaccgttcttctgtataatccatagaactaaattaaggattttttgaaaaagaaaaaaaggtttctctcttctctgataatgtttacctctcaagaagtctgcatatatcgtccttgtcagatttagtgttcatcacttccagataccgagatttcctcagatcttcccaataagtccgaggcctagatatttctgtaaaccagtcatagctcatgtctccgtaataagactgctcatcctcatactcttcttgctcttcccatccgctttggaatgacatttcttgtgtctcaaggaacggtgtctcttgagttccctctgtaccgctttctagtttccccgcttcctcgttccttagtatccgcggttcttgaggagttacgctggtgagaggactagtgttatcagattctctttccaatacttctgctactatggcttttttcagctgaaggtaactcattttggtttcagtttcgttcttgcgtaagattgcttcctctatgttgcgtttttgaggacttaaccgctctgtagaaggagaatgaagaataccactggtttcttttgactgcatgctctctgtttctacggtggattgttgacccttctttagtccggcttcagcggcagcgtttgctgctttttcccggagtttttctctgcattatgatttaaacattaaggagaggagaaaaatgagttcatgaacttgtaggacgtaaaacagaggttcttgagcataccttagatggagaattgtagaactaggttggaagcgattcaaatcgctttttgtggtaccacgatgacgatcttgaatcgctaggccgcgtttgagactccttagccgcaacattgactgtgcaacaaggaatagtgaaagaaattgtgattttaacactgaaactggatcgtttgttaaaatgtttggggcgtttgctagttatacctggaggcgaccacgttgaggaaacctagaaactgcgttgcgtccaagaagtgattccaattcgcggtgacgttcgcgttccagatgcacaagcagatcggagtaagcttgccttcctcgaattcgcggagagcaagtaaccacctgaaaactgcttttctccagcgtcggcgttttaacgatcggcatatcgactgcaccgccattattgctggcggttagcttctgttcgttactcaatctccggataatatcagaaaccgaattgagagtcccagattcaatctccaccgtctgatcaggactcttggattcgttctctgattcagattctccgtcgatggatggagctaaaaggtgtatttcttgaacgctcgcttctgagctgatctctattgattggctatggatagccgagtttccgccgttggatcgatttagcctcgcctcccatatctgcacaagagaagaagctcctccaagattgtcggaaaagttgtttccttttctagtccgtggtttctccggcgatccaggacggcttttattgttctttttccgcttgtttccgatcaaagaatcaactctgttctccgagctctcgtcggagatggccggaggagcagttttcacttgagctttcagattcttcttgaaaacaacatcgtcattgtgccgttggttgcgatctctaagaacagatccaaaactaggtcgtaacgaggccattttccttaagctaattgacctatttgtcaacgatcacaaacacaaagacccatctttgatttggatcttaattcttatgaaatgaaatagaaatcaaaacctttctctcttcaaatgaaaaagaaaaaaaaagagaagttggtttttgattactgaagacactaaaatttctcgttgtttcagctaaaaacagagtaacgacgagtggtgttagactcgaaagaccaggtaaccatgaagaaacagaatttcaagtgcaacagtgttttgttttatctatttttagaagggtttcttatagagagagagaccagtaaaagaaattttctagtcgtagagttgttttgtgtttatcccctaaacttggaaacgtgtcgggaaaaagaaagaataaaaaacagaggaagacatattcggacgaggacaaagtatgttgagggtctcaaggaagcttctctataacgttttccttttttatatatatgggaaatgcagaaattgttcgtttaagacaattaaaaataactttttgaaagattttattgatggaatttattaacggctcaaataaagatcatttaactttattggttagtagttatagctcctaattatacgattaataattaatgaagatgaaggcgtgaccgtggagggtcctaaagcagcggagagtccaaaggagccgttgggtgaattagccgttggtaagtagggacctttggcctttgcacctagctttctaattagctttaaaagatttttctggtgattgaaattattagtctgtttttcttattctttcttgagaaataaaattatattggtttgatactgtttttagttttacgaagaagaaaataccaaagtaaaaaaaccaaaataccaaagtagtatatgatttcctttccatgagttatataatccattactctagcacttactctatttgatgatcctgcatggtcgcacatgttggacaacgtgacacgactgcaaccatgtctttatttaattttctgttgagttcgtttgaccaaaacattgaagtgccgcaaaacatggttgcgatcaacaatcttcttggtttcctcctcactaaatgagtgacatgagaggtgagtcaaaccagaccaattaattaaataataatctaactaattaaaatttagaattattcttacaaaacgatcgatattgcatatgtacaattgtgattgtttgtgtggaatattgttttcccaaactgttgatggaaaatgcaatatcgatgatgttcttaagtcgtttgttggttatggttgacctttcagaaaagtactttgacaaaaaaatatatcatggaatatcagtatttttattctttttctctcgtgtagtattttctttagaaggttatgaagctcatgtcaaaatataatcatacaactggttaaaataacaatcttggatgagttatttagcatttttctggtgtaaattaatcccttgttttagggatttatgtagatactgatgcattcaatttgttcatgagcgagaaactcatccttaaaagtaaatttcaatgaacaaaaagatacatatcagtacagatatatggacatctactacaactactagcgctatatggtcatcactactcattttatagatgagaactactagttgcataaaaaacggtaggtgtttgtccaatatcagatcatgaaggggatagagttgcagaatgcttgtttcattggggtatatataagagaaaaggttttaccataagtcttgataatgttgatagcttgcgcacatatggatttgattgttaatgagtgcttacgaaagatgggtgatcgtgtacttagcattagatgatattagcggaagaaaagttgtatgatgctaggtaaatggtctcaatgaaagaaaaaaatttggtccacctttaagctattatacataacaaatggcaaaacttttgaaaaaatagaattgattaaacttcagtaatttgaaaatagatgaacagatttcaatgtgagtttgatgaagaaatttaagattcttaaaaataatatactacgtatgacattttctcatggttaacttcaatatcttatagttcttcttctaatgcttttaaattaatttgcgtttaagtatcgcaggacacatatttgtcttagttaaatgtcataggtgacatcctgactatgatcaaccgatatgtctcggtcttcttcgtcatatcgtactagatcgaccacttactgcatatggtcatatgttgggttacggcgacacactatagtaaaaatgccaaaaagttctcactagccacggtgatgtacatgttattgcatagtttgaaatattgcaacaaaattttttgttaacaattcaatagattataaattggtcaaagttaatatatagtttttgcagatacacaaaatttattgattttcctggtaaaatattccgaacaaattttagttcaatttttttaattcgtgtccaaactaaccgtgaactataagcactattgtcaatttgtcattcggtaaaagttaagataagatatgaacaatgataagttgtccaatgattttatcctagctactactactcctcagtcctctttctccgtctctcttttgttattaatttttacctaatttaggagagtataatcgaaaacaccaaaaaatcttttgaccagtgacatgaaaaatgtccaaaataggaacatgacatcgttaaatcttgtcatggaagagactctttgtcttttctggctaattttccgtatatatatattttttttctcttcttcctttttcttcagtaccatttcctttttatttggttaattatgtaatatagtacaagatgaaaaacaaattgttcgtcagcttgtgtttgtcttcgacacctccaaatcaattgataagattcgtcgtcgacaccagacagctttcagtttacctaaaaaatccatttttcaacaatttcttaaagtttttgtagtggtgtaaagtataatattttcgataagaatgtaatattgagtgtttaaaaaattgacgtcatatattgtagcgtaacccctttgatttttcagtctccatcaatcctcaaagttcacaccacagacaaagtaaaaaaaaaatcgtaccatctttgctttttcttttattttctttctttacctcttaacactttccacgcattaatacacaaaaacaaaaacacagaatccacaatattgtgtgtctctctctctctctactagctctccaagtttagagaaaaatatatcaaaactcatttcttgatcttacaagagcttctcaattctgaataaccctaagtgccataaaccatttttttttatgttgtcgctttttgttgtgattattatataagcttataatcttttatttggtataacatgtgatgagatctcctcacatcaccatttcacttgttttcttgttctttctttttctaatcatccaaacccatcaaagaaccattgatcaaactcaccagattggctccaatgttcaacatgtcagtgacatggcggtgacttcgcctgaagggaaaagaagagagaggtttagagttcggcggccgatgacgacatggctgaagggaaagatgatcggtgccaatgaacatggagtcccaagtggtccaaatcccatctccaataggtagagaaatatttaactatagagcttgttgtatgaatatgttacctagtatgatagtatatatctttgcttatgagatcgtacgtacaaaaatcaacaattgttatgttgcttgtttgattcaaaaattagaaacttccattttggcaggtaaaactatttttgtgggagttaaatggttcttttcttttcttatacatacttaaaatagatatatagtatattataccttaccctaaaatataaattgagactaattaatcagagtgtccaaagtttgacttcacatgtgtctagacaatccatgacaggatattggttcagtgattcaatcactacaaatggttttttgagaaactatagtttttgtttcttttttatcactccttgaactaatggatgctacggtgtataaaactcggtactaataaaaaaagcgagattattttactgtataataaaatttgacgtgaaatttaaaacaacctacattattttaaatttagtatttttttacgggtcaaattttgaatgaagttttatctttagcaaagaacgatagattgtgcaaaaatagcaatgagaaacaactgtaggaagaatctacatccaaggttcactcagtgagaaaaatatatatttgatgtttatatagttcaaaaaacataggcaacgtaaagtcttcctgtagtgttgcatttaatagtcaggaagcattcaggggatgcaaacaaatttaactggtaggatataattatagtacttgcatggtgacttaaattcagaggtccccaaaaatacaggcacatgcatagcgaacctgtattgatgttgtgtcaacaaattggtagtgatatgatgatgactaattgacgactagtactcaaaagactatcctttttgttaagattatatcttattgcttgctattatatatagtcacttttaaaatttggatttcgacataaaaaaacaaagttttggatctttcgatatatgttattgcaaatgatctttaattctttatctaattgattacgctaccaccgtgtccttagaaaaccaaaacgggaaaagaaaaagataaaagagacaaaatgaaataaaaaggaaaaccaaaaacggcatagttttgcgtgtaaaagagagacagatctggcatccaaagttgcattggaccatcattttcttacatacctcaaatcctttatatccatttttttgaatagtaaccaactaattatatattcattaaagtcatcgatttatatactccataataccatacatttagtagccaattttcagcttttaaggtataaaaaggcccttccctacatacatacatttacctcttttcaagctccatttttttttttttttttttttttaaagcaaaagagatggtaccaaaactttatttcttcttcaaatacactttcaatttctcgcctttagaaaagataatggctttagaagccatcaggcccaatttgttatctctaatgggccaataaaatattcatcagaaacaaacaacaatgtactccgtaaccggaaaagccaaatcgaatccaactgttttaccagaacaaaaacaccggttggcgtccgactcgtcgtcgttgttgtcttgcttatgcatcgtgattgaaatttcttcatcatgtgatttagttccttctgtgaaagctcaggttttgcttgtttgaatctgaaagctcttctagtttattttttctcccattgatagatgcttagttgtggattcttctttttagatgggattttatagagatgattaaattttgttatggtgattgataattgatgagtatcggtcctagaatctgcccatcttcactccatgcttgcatttttgtgtggatgaacagccaaaacagaaactttggactcaaattgttatcttattactgtttcaataaggtcctagaaatagagacataaccttttgtgtgtgaattgttgtttcaactttgggatctaggtcatgagtatgtgcagactcaaatgtatgtttttcttggtatccagaacaatgtgtagttttcatcaatctgaactttcttaacttgtttgaaaatgggcagataagtcgttgtttctcgttctcagtactattttcaagtgaatgatcaaatatgtgtgaaacaaattgaaggtttttctctttatattcctagatagggtatgtatgttagtcgttttgtgctctttgccaagtgggcatttctttctataaaattcactgtctctagattagcatttgtgttgttgacaagtatgcagtgtccttgttctaccctgaatcatttaggtttgcttcagaagatttaaattagttgcttggtttttgctagtgatgctgctgaaagtaatgtttctgttctaaactacttaaagttacctggtcaggtagttataattgtaaacttccaagttttattcggatatgacacctgaagatttcattgttcattacattgatttgtctttagaggctaagttcctgaattgagctgataattttattattattggtatatgagcaggtacattatcttgtaaggtacttcttagcaccttccttatgctcaattcactacaacattttgctatttaatgtcttttggacattttttaggaagtggtttcccacagagtaattcatttccaatgtaaatggatggatcttgaaacttgagaagcttaggtatgctcccctccagtttattgaacgaaagattcagcctttgcagagaagatattgctgcgaagctctgaggtatggctccagaaaacttgttttttgatagatcaagcgtctccaagcgactcagttctgatattttctcgggaatgcttcctgccatggagtttcttgataaattcaggattcggagatacaagaggcctaagatttctcttgggatctctccgcttatgttgttccctgaaagatttatgctattggctatggcttcgtattcacgagctctggtcacaatgaagactagattctggaacacctcattgtttgtacctcgagcaatggctgtgagattgctgatgcattttggaatagggcccgagattttgtttccggagaggtccagaatgcgtagatttggaacgttgcagagatcatctgggatttgaccagtgaaggagttactttgcagacgaagcatgaatagagaagacagctttcctacccatgaaggaagcttcccggtcagcttgtttcctccgagatctatgttcgtaaggccagaacaattccgaagactctctgggattttaccttccaacgaattttggttcagaagcaagacgctgagagaaggtaacataccaagagactctggtatttcgcctgataagttattctcagacacgtcaattccccaaagcatgaactgacggtgccaacattttggaaaactaccagagaaatggttcttcctcagtgacagaatttgcagtccggagacttcacatagagacgatgggatgttgcctgtgaagctgttgctaaagaggtagatcttctccattcttggcatcaagacgtcaatgttttgtggaagagaacccgagaagttgttctcgtaaagacgcagctctgttgcgtttgtagaccagagaggaaaagtgccttcaaagttgttggagctcaaatcaatggtgtttaactttgggaacgcaagcttttgaggtaatctacctttgattctgttgtttgctagaattaggtaagtaactttagaagagattccagagaaccagctatccggtattgtatcttcaataccagtgtttctgagtgtgacaaagttgagcttggtttgtacttggagccacattggaaacagaccgatccgacagttctcgatttggatcaactccagtctgaaaggaggaatccaagtagatggtaacttgaagacaagagatctgtatggttcagttgttagacggatgcttttcaagcttctgagattcacgaaatgtgacttttgcagaacgcctccccatgtattcgccatcaagttcagatccacaagctctgcaagctgccccaagctttccgcaattgtcccgttcatggcattgttagaaagatcaagtttcttcagtgacgccatgtttcctatcgaggaagggaccgaacccgtgaaggaattcgatgaaagatccagagtctgcagattcctcaacgatccaagtgactcgggcaatgtcccagctaacttgttggaactgagatcgagaaagaccaagctgtttcctttgtttctggagaaggcgtctagaaacccatggatttgaccgttgagttcgtttgcagaaaggtcaagaaacttcagttgaggaaggtctccaagaaccgatggaatctcgccttgtagtgccagattattcgacagatcaagtgtctctagaagcttcaagttcttgaaccccgtaggaatcgaaccctggagaaaatcccatctgaggaatagctttctgaggttggtaagaccaaatagccagttaggtatcggcgaattgagagagttttcagacaaatcaagaacttcaaggagcttcagatccgcagacgaagacaaggtgggaggtaagttcttgagctcactattgaacaaatgcaactcctttagcgccgagattctgctgaaatcctgtaaccaggtttcacccgcaccacttagatttacataccccatgttgagatacttcagggaagaagacagacttgaaagccaccggagattgcttgcgcgcaatgataatgtaccagagtcaccaaacgactctgcatacagatcaagagactccagcttcgacaaatttccaagactcgttgggatttcgccggaaaacgatgaggaagaaagattcaggtaccttagactaacaatttggccaataaactcaggaatctctagttcattgaaatcatttgaactcaagtccagatagctcaagaacttgagttgagtcaaagacggatgtatcttccctcgcaaggaacctcttttatactcatcagagcgaacatcttgactcgggtttctgagatcaatcttgacaacgtggctggtccgagcatcgcaaagaacaccgggccagttgcagcagtcaggtccggaccaagaaaagagcctactcgaaagatcagttagtgctgctctgaaggtgagaagagcttgccgctcggtggatatgcatttcggactagctgcagatccgtaattaagatttttgagaagtaaaatgagaatcagaaaagagatgaagaagctaggccttagcttgaggtccatacttgaagctatgtttgtgttgtttcttttctcagacgtttagatatatatatgttcaaacgcggacatattagaccagcattgtatgtatatacatatacaaattgaatatatgtatacaaatatacgtgtatatctttaacaaatacgacacggtttatatcaatgtataaaatacgaaaatggaaacgtgttattttggctggtgcgcattgaagttagtgcaaatcgatatttgagcatcattcactcacatggctcgtgtggggttgtatttgactaccactcgttaattttttcattttttttatttaacaccgaccttcatttttctttctttctataatagcaattacaatattttaaattgggacttttaatgggctaatgaggcccattaaggatttttgaaagcctcccaaattttaattttaaatttgcctctccgttaataattggttagagaacaataatcatcagagaaacattcgaaacagtagttgcagagtcatggtagctccgctgactctgccaactcgtcgtctcttccgtatacattaaggttcagctcagtttttctcgggaaaaagagattcttttgtcgaaaagaatgtctccgagcaataaaggaaccgtcttggctctgattctagcgttgaccatggtggtggtcaacgggttttcatcgagattcttcgtggagaaaagcagcttgacggtccttaactcatgggaaatgggagctaagcacgacgcggccatagcaaactttggtctcccaaagtacggcggtttcatgatcggctctgtggtctacgcaggccaagacgcttacggatgcaactctttcaacaaaaccttcaataccaagtctccttatcccaaaattctcctcattgatcgtggaggtataatccgagagttcatagtgacattttcaacaagaatatgattgaaagtttgaaactactttttttgttaccattgtgattgaagtttagttctgatagatttgaagggtttgtatctttgttaaccgactctacaatgtttttcatttttagtgtgtaactttgctttgaagatatggaacggacaacaatccggcgcagcggctgttcttttagcagataacattgttgagccattgataacaatggatacaccccaagatgaagatcctgactttatagacaaagtcaagatcccatcagctttaatccttcgctctttcggtgatagcctcaagaaagctcttaaaagaggtgaggaggtaatcttgaagatggattggagtgagtctataccaaaccctgatgagagagttgagtatgagctatgggctaatactaatgatgaatgtggtgtacactgcgataaacagatagatttcattaagaactttaagggaatggctcagattcttgaaaaaggcggttatactttgttcagacctcactacatttcttgggtttgtcccaaagagcttctacttagcaagcagtgtaggactcagtgtataaaccaagggaggtattgtgctcttgatactaagcaagaatttgaagatggatataatgggaaagacgtcgtttatgagaatctgaggcagttatgtgttcataaagtagctaaggagaagaacacttcttgggtttggtgggactatgtgacagattttaacatcaggtgttctatgaaggagaagaaatacagcagagaatgtgcagagactattgtggaatctctcggtaaaaaaggtccttttgttttcctagagatgtcacaatctgctagcaactctttctgtaacagtttcagggtttttctttttcctcagggctgtctcttgagaagatcaagaaatgcattggtgatcctgatgctgatgtagagaatgaagttctaaaagccgaggaagcttttcaggttcgcagtttcttcaaattcacagtccatcaagctgttatttttcctttgatgacattttgaagttacagttaggccaagagaatcgtggcattgttacaatctttcctacattaatgatcaacaatgctcaatatcgcggtaagctcgtccttctcaccgataatcacaaagtttgacggttttagaatcttaatctgttccatgctcaggtaaactggagagaaccgcggtgctgaaggctatatgttcaggattcaaggaaagaacagaaccgtcaatatgtttgaattcaggtcaagtaacttcctagataaagatagtcgcattctgtgaagaacactcttaatttctttttgatccattctaaaacagatatagagaccaatgaatgtcttatagaaaatggaggatgttggcaagacaaaagatccaatgtaactgcttgcaaggtatttcgtgataaggagcggtataccaataactttatcagtctatatcatatcttctttattagattatatgaattgttttcaggacacatttaggggaagagtatgtgagtgcccggttgtcgatggtgttcaatataaaggagatggttatacctcctgcaaacgtatgtttttgaatcttctctttttaatatatctcattgcacatttttgttcaatgatcttaacaaagtttgtgaaacagcttatggacctgcgagatgttcaatgaacaatggagactgctggtctgaaaccagaaagggtctaactttctcttcttgttcagttaagtgactgctgctttttcttccactttgctgaagtttgagactttttcttaccttttgtatttgtttgatgtaggactcagagacatcaggatgtcgttgccctctaggtttccttggagatggtctaaaatgtgaaggtgaaattgtttcgacaatttgtcatagtaacatcagagtttccttgacattgtctctgaccaatctttattgcttcctaataactagacattgatgaatgcaaagagaaatcagcttgtaaatgtgatggctgcaaatgcaagaacaattggggaggatatgaatgcaaatgttctaacaatagtatctacatgaaagaagaggacacttgtatcggtatgttgaaaacgatgtaaaactattttcagatattattagaaggaaaatctcaatgtaaacatgtgcagagagaagaagtggatcaagaagcagagggttgttcacaattgtggttctaaccgccatcgcgggtatctctttaggtgcttatatattctacaagtaccatcttcaggtaatgtcactttgctactaattattatgacttaccctttgcatcaaactctaacgatccttttatatatacattaaaactacaactttgcagtcatacatggattcagagatcgtgtccattatgtctcagtacataccactcgatagccaaagcattaaccaagactcttttaagtaaatatataggaactcttgtcatctcaaatgaagattgttgaatcttgttatatgggtcctttttgtaaagaatcaaaattttgaggcgtttatttaaggatttgaaagatttatgcaaaaagtttaaaattacgtaagttaaaaactaaaaaagagattattgctttcattgagagttgaactcaagacctcccgcttactaaacgggtgctctaaccaactgagctatgaaagcttttgcttacctgtcctgtttttaaataaatatcctttcaaacatatgaatacaagtaccatctctctgctcagtgttcgtcctcctctgatccttcaagttcaatttgttttttctgaccctaaacgctaatattcccttgagttttgacctatatttggaccaatgacgtggattagttcattctttagagttcatcgtcaacgtactggtaagtctttgtcttcttatgtttctgaatgctgtgatgctgttgctatcttaatgccacttgcgttgtacattttgatcaatgtaactaatttagtaacagatttgagataactggatgaagtcaatttaggttgcagaggatttcgaaactggttgatttgaactctaaatgacgagaatggagcctgagagaacaattttgcaacatagtttggattcagtgtacttaactctatttcatgttttgataaagagtccttgtgaaaaagacttttcttatatatacaaactttactttttgcagattacagagaatacagaacgaagcagttcatgaagaaagcagaataacactagggtggaaggaagagaccttttcagaggttacatttcttctctgttttccatagttgttatgttcttggcacaatttgctgatgagccatatcgaatgttgcatgaagaccaagcaggaaatagtatagtaacatggctaaagtgcaaacaccaaaccttacaaaagccattgctcccaaagatcccatgagaaagatgtttgttgctattgataagcacgggagccatggcactaacggtacgccccacactttcggtgttcgttgctgaggaacaaagaatacgatccccaaagttcccaagaaccagaaaggaactgttactgtgtaaccgatccatgatcccttgcgctgcattccccaatacgccgaagtacccattgaagaaacaacgacgaataagagacaagtgatgagcttaatgagatgaactcttggagtatcttgtctcacgtagtatctcctcacgagtagtgcgataggcatcattgtgaagatgaagagagtacttatcgataagaggcttgccaaaacatctaaaccagaaaagaaagcaatgagagcacttggaattgctactaggaggttagcgtttatcggtgttcctgttttgggatggacaagggcaaatataggcggaatcatgtgggtccgtgcgatgtgagtaacgtatctcgcttgtcccaatgctcctactaaaagaactgtggtcatccctttgagagcaccaagtgccaccaagtactttccccatttcattccaacgctctgaaacgctactgagtaagctgcatttggatctatatctgtatacttctgcatcatactcaaggataatgccatcaagcagtatatcactgttattatcgacattgaaccgagtaacccgattggtatgtctcttgatggattcttggtttcttcagccattgttgctatgctatcaaatcctccatatgcaaagtacacaactgcagctgctcggaacactccctcaggtccaaaaggcaagaatggagtcaaatttgatgtgtcggcgtggataaaaccagcgattataacaaaaaatatcactaaagtgttgatagcagaagctatccagttgagcaatgaagtctttcttgtgctgatcgatgcaattgtagctgaagcggctataacaacaacagctattgggtccaagagattaaaaccggaactgagatctgttttgatccgtagagcgttcgggctacgattcagaagagttgcaaaatatgaagtccaggctctagcaacagctgcagttccaacaatactctcaagaagtatattccctgcagtgatgaacgccgcaaaatccccaagctcaatccgtagataggcgaaagaaccaccagccacagggatttccacagcgaattccgtgtagcagaagacagagagcatagcagaaagacctgaaacaacataagacaagacaatagctggtcctgcttgctcatgagcttcttgacctgtcaagacaaagattccagctccaatcaccgacccgaatccaaaccatactaaatcccaccatgtcaaacaccgtttcatctcgtgctcactctgtttcttgagctcaaaccgctcgttctcatcatcagacctactaaccaacctgttcttgaacctggaacatgtctgagacagagcagctctgtaactaccaaagctctggaaagattcctcaggaaagaaatctctcttgctccatctccagtatcctctctcttcaccttccattctctctgcttcaaagatttgttaatgaagaagagctaaagagacaccatctaattttgttccattgtttgactagtagaagtttcagacagtttttttgtatttttgcagcttccctgactttcctcaactttgtgtactgtccattcataaacctccccacttgttagatttgctacgtcaccttcataactctcattgtctttattggcgtcttcttaccgtttcgtttagtacttcaaccatgaaaattcatgatgataacatacataattcagtgcttttttactcttagggggctgtaaaatgataaattgtcatattagtccttcagatttttaaaagatgtacatttaatcctcttttctcaattcgtcataaattaacttcagtttatactcagggttttagattttcccgtgagatcgaatttgatcagtgagagaggaggagatatgggtgctcagaagaaaggcggcgccgccgctagggtttcagaggatgcggaggtacagagtcgccaccgattgcaagcaattcttcttgccgacagtttcgccacgaaatttcgtcccgtaaccctagaacgcccaaaggtactgttaccgatagttaatgttccgatgattgattacacattggcatggctcgaatctgctggaatagaggaggttttcgtcttctgttgtgctcattcgatgcaggttatcgaatatctggagaaatccgagtggtattcgcatccaaacttgcttgtgagaacgattgagtcgcacaaatccatcagtgctggagatgctttgcgttacatgtatgaacaacagacagagacgtctcagattcaaggtgatttcgttcttgttagtggagatactgtgagtaatatgccacttgctgatttgattcaagagcatagagagaggaagaagaaagatgagaaagctattatgactatggttattaagcagtctaaatcttctccacttacgcatcagtcaagattaggaacagatcagcttttcattgctgttgatcctttgacaaagcagcttcttcattacgaggaagataagattgatcatccaagtgggtcagtttgcttagagaagtcattgttggatactaatccttctgttttagtatgcaatgatatgcaggattgctacattgacatatgttctcctgaagtgcttagtctctttgaggataactttgattatcaacatctgcgtcgtcattttgtcaaaggtgtgcttgtggatgatattatgggttataaaatcttcactcatgagattcactcgagctatgctggtaggattgataatttccgaagctatgacactgttagcaaggatataattcagaggtggacatatccttatgtaccagatattaatttcagtggaaatcggcctctaaagctcgggagacaagggatatacaaggcttctgatgtagttcaatcacgatctgctgatgttggagcttctactgtcattggatacggtacgaaaattggtcatggggataaaatcatgaactcggttattgggaatggatgctctattggatcaaatgtggtgattgaaggctcatacatatggaacaatgttactattgaagatgggtgtgagataaggaacgctattgtgtgtgatggggtgaaaatcagagcaggagctgttctgcagcctggtgttgttttgtctttcaatgttgtagttggacgggactttgttgtgcctgcatactcaaaggtttccctacttcaacagccaacgacagaagacagtgatgaagagctggaatatgctgatagtagcagcgggactgcggatcatttgtcaggcctaaatctgcaaatggagtccaaagcatctgagcttggtcctgatggagcaggttacatatgggaagtatgtgaaggggctcatgatgaggagtggaagcattctgttgcaccaatccccaaggataaactttctgagattactcaggccatagacgatgatgacacagatgatgaaagtgtcgtcccgacttctggagagttgaaatctgatgctgatagtattaacactgatgtgaatgatcccaatgatgattactattactttgagaaagaggttgaagggaccgtcttaagggctgttgaagagaatatcaaagtggaccttgtaactatggagattaacgggctgcggttgtcattcaacatggaatctgcagattgtgctggagcaacatttttctcgatgataaaactggcacttgatactccacacaattctggtagtgagttgtataaaaacgcagcgagtatcattacaaaatggaaggatcttcttggcttctacgcaaagaaaattgatgaacagatagaagtgatcatgaaatttgaagagatgtgtcaggaatctcacaaagagttgggccctttgttcacacaaattctacatcttctatatgacaaggacgtgttgcaagaagatgcgatactgagatgggaggaagagaaggcaggcgcggatgaagctgacaaagtatatctgaaacaatgtgatacattcatacagtggctcaaagaagcatctgaggaggaagatgaagatgatgaagatgaagaagaagaagaagataactgaattggtatacctgagttcgatggctctcaactagttgttcattatgcagttgatggcctcacattttgattgatcatttacttttaagagctactctgttttttgttctgtcatcatcaataatctttttttcttcatgtcttctgttctgttgcttcatgagatactttctcatccacgagtttgctcacatgtatcgtttgatatataattttacttgagtactaaatctcttaatttttatttgccaattactccctctactttttcttatttcaaaaaatagcatcacaaattcactagatcctccttcctctcgattcaagcttcctctttggacgaatcgtttgctttcgcatccctcgctctaacttgaattgatcgaggtgacgtaagaaccctaattttggatccaagaatccggaacctccccaatggaaagtaatctcgccggagactcaattccgggacccaaatggaggaaagtagcctacggaggaatgcaaatcggatacgacgacaattacacagacgaatcgttcctcgaggaaatggtgatgaacgcaaacgtagtgagacgtgatttgctcaaggtgatgaaagactctgtctcaatctcccaatacctctgcatcgtcgcgcttgtagtcttggtttgggttcacactcttgaatcatctttggacgagaactcgcttttgctacttgatctctctctcttagcatcaggattcttaattctcctcttaaccgaagaaaaaatgttatctttgagtctcctcttgcgttacctcgtcaacatctccttcttcaccacgggactttatatcttagctccgatttaccagactctcacgcgatctatcagctcagattcgatatgggcagtcactgtttcactcctcttgcttcatctcttcttgcatgattactctggttccaccattagagctccaggagcactcaaaactccgaatttgacaagctgcatatctgtcaatgcttcaattgtagcatcagtctttgttgcttcacgtcttccttctaggctccatgtctttgctgtgatgctattctcacttcaagtctttctctttgcgcctcttgttacttactgcatcaagaaattcaactttgggttgcatcttctcttctcctttgctctaatgggtttgacgctttactctatttatgcattgcatagactcttcttccttgtctttctttctcttgtgcttcttgtcaatgttgtgtgtccttattggctcattaggatgcaagagtataagtttgagattaatggtccttgggatgaagccaagctttgtttcgacattacagattgaccatactcttcggatagtttatataactgaaattcattagacttgcttttcttcgacttgtattaatctgatctgattttgcattgtagtgtatgtgtatctatgatcagattttgtagctagaaacaaagattataatcttctatataaacgatgtcgtcacgagaatgtcaataaagttaggacttaggatggccgagtggacacaagttctggtcctcgtaagagggtgtgggttcaaaccccacttctgacattttaatcttttttttttggacttgaatattggtcatgttcgaaaagcaaatgatagcaaacagacaaacagacaaacacaaatgttgttagcaaaaaacacacaccaagaaaattgcctatctactacactcgatcatctagctgggattgttcaactgatattcggcgggaatcctttgacggagccaccgcttctccgccacaggaggtggaccatgcacaatcagagaaggaatgcatccgccgttggtacgagaagacactcctctcgcttccggcacttctgcttctgtaaccacgccgtgagctcctagcctgagaaaatgccacgttgtccaccgtttttttcgtcagttgcctccggacttcttctggtaaccgaagcgtaaaccggtctaaattatctagcggttgaaccacagaatgtccggtcgaatgcgatctcgagattaatatctgggagactcgacattgagacaatctcgttgaccatgaccgagacggtctgttcctattggtccacgtcacaccatcaaacaaatgcgagtttgtagattctacaagatccggttccggattcaagtagcttctctcacccggttgtaagcaaagatccacacgacagagtggacacgtggagtgatcagagagccagacacttacacaatcagcatgaaacacgtggcagcattcaggcatcaaacggagcgtttcatggtcttcgaactcacagatacacactgcacactcgacgccacctatcccgattctccgctccttcacctccgagtagagaaacgtcggaaatgagttgatgatagcctcgtcgagcccacgcaccgccgtaatactcgtacgggattcaacgtcggagtcagtgaaagggttgatggattcttgtgagtaaaattggcgagaggtccagcggaagcaaaccgaagccaagccaacgatgaagattgcgaagagtataatcgtgattactagtagggttaggtcgcttgcttttatctcggttccaggctgcaccatcgtctcgcttgattcgtatgcaacggactgaagcaatactcggatatttctctcaaaacttaccataagatttcatgaacgaaagtttttattttgtggtttagaaaaactaaggatgtaatcattcactctcacaattcttgtaagaggcatggaaattatcaaaaaaaatatcttatggctagacctttttttttttttttatatatataaaaaactaagttggcatgtagaaacataattagcttaccataaccaaatttgaaataaaaaaatcttcagatacagatatatataaggaaaatacctaatgcatatgtttgacggtttgaccagtttgttggtttccacaaatgcttaataaggaagtcactgtaattgcattttgatgggataagcgttattaaaataaaacccaactccatttatccatcaaatgtgtaaaacccatctgctacatttcaaagattcacaatctcacacatacttttttctttctgaaaccttcaaacgatttgttttgacaaaaaatagttgtcatttttgttggtcatgctcaaaagaaaaaaaacgcaaataagaggcatgacaacattaaatcccaattacaaattgtaaaaaagaaaaaaatatatattatttacactcgttcatctggtcggagccgttcgaaagaccgttcaccagcttcaatcgatgtcggaagattcttcggcgcatctccggagaaagtagaccgtacggaaccactccggaaagagaatgaaaaagacagcgaatgaagccgtcgattgttattattactcttacgtccgtacgggaaagcgcttctctcgctcccgacgctaccgcttctataaccgctccgtgaactcctcgcctgaggtagtaacgccacgtgtcccatcgtcctcgatgtcttcataagttgccgtcgtacatcatccggtaacctcaacgtaaaccggtctagattcccagccggttgaattaacgaatgtccggtcgagtgcgatctcgggaacaaaattccggttatttgccagctggataaccccgttgactttgaccgaggtgttatgttactattgctccacgtcacagcatccagcaaatgcgcgtccgaagattccaaaaccattcctctctcaggatccgtactcgacgaaatcgtacctggatccgtacccgagtagctttcagtgctgtcgtcgtcgtcaccttgttggtttaggacaagatccgctctacagagaggacacgtggagtgttctgagagccagacgtcaacacaatcggcgtgaaacacgtggcaacaaggaggcatcaaacgcagcgtttcgtcgtcttcgaattcacagagacaaaccgcacactccacaccacctttcccgatcctcaccgccttcacctccgagtaaagaaacgtcgggaaagtttctatagcctccgcgtcgagcccacgcgccgtcaacctcctgatcctgacgacctgagactcggcgtctgcgtcggtggatcggaaaatggaagaacgtgaaaactgtgcgttgcttcgacgacagaagatggaaccgaagaccatgaaaaagatcactaaaaacaaaaccgtgattacaacaacaactggatcgttaggtttcgtttttgttgttccgggtggtgtggtctgagtctgaccgaatccatacggtactgactggagcaagagcaagaggagaagaaagagaaggttgtgtgggatccaacggctggactttgtgtcgaggatcgccatttgaagatcatcgtatggaaagtggagaagaaaagggttttggtgtgaaaaatataaggtcgatagagagagtcaacgtctggtttgtgaaatccacggaggtgtaagagtcattgcgtaactgtggatcatagcacttgcttattgtttattgataatattttttttagttaaaagggaattttatttgatttgatctgttcacaccttttgactttgaagaagtctagtgtgtctttttgtacttttacaactaggaaataacaccacttctaaagatgaaaactttcactactatacaattagtggtgacaatctcttagaaatgattagtatatagagattttaattaaaaatcctaacaattgtttttgagaattatatggtgatatatcttatctaaaacttcaaaatcttttctaaatgagttaatataagctaatgttttgactcctaacatcttatacattaaagtttctgagataaatctctattcttagtaaactaaactaataactgatccgcctaatcaagtatcataataaattgcaaaattttctaatgcagaatcatcacaagttaaatttttgggtttttatgtttagtcttcttttactttttatattacaggagatacaatagtttacacgaagcctgaaagtgattccaacaataatgaaaattagaaatttcagctgtgttattactcatagttacttgatgatcaataaccaagacatctaatatagaataggcatccaaaattaacattggacaattcgtatatatgatataacgtatataaaacttaatctcgaaccataaaacgagtattatctctaaccatttataaatctaataattttatggtggtaggaatctaataatattcagttatctagacaaagcaagaaaaacgatatcaattgacatcgtgacaactataactatctattatacacatcgtttaaaaaaaataaaacaataccattaaaatccaatcgacgtatgtaaatcatcatcgttgacttgccaaaataaataataggaaaccttataaaatttgatgctaactaactcgggcgggtttcatccaaattaaatagaaacattgacggaacatggagtgtccaatacacacaagatccaatcattacttcgaggagtcacttcaaaactccaaataacaatgacccaaacaaatttcattggacaatgaataattaacacattattatccacaatcaggatcgtataaactaaaaacctttaattcggggctagtttagaagtcatcactttcccgtgggtcattttgtaatttacatttcccaaattatctcttttagtttctccgacgatgcctgaaaaataccaaacattagttacagtcggaatttcgaaaaaccctaattcagctaaagtttgatcgttgatctaaaagctcgagtgatgaagggaaattggtcgatcgtacgaaaggttcttcatcgccagttctccactctccgttcctcgacaccatcgtcgcgattatctacttccatccgaccgcttgttctggccccaaactcgatatcgtcgctaatcgctagaaattcgttgttcactgcctccaacattggtccatccatcgattttaacttctccaacacttcgcttcctcatcggagaagcctctgttcggaagctggaggtaattaatcaattggttctgctgcttcctgcgtatttgcgtaaatgtctgtgattagcatgatcttggctggaaaacgagattgatcagaggaataagcttgagtttatagtgctaggctgctagctttttctatgggaatcaaaattactaagctctaactctaccaaaagccatttcagcgaatttttttttagaaattgggaatttatctgtgcaagtcagttggagaaaactaaagtttgcatatttaaatgagtatctatctataacgtctctgtgttagaaatgaatctaatcctgcaattatgatgttaggtgaaaatggtgttgttctagtgaaatcagaggaagagttcatcaatgcaatgagcaaagctcaaggtaaaccattacacttactttcttacctcacgctaagtggatgtgtttagtatgatttgctgcttatgtcctcttcttgttatctgtactcagatggatctttaccatcggtcttctatttcactgccgcctggtgtggaccatgtatgttaattcttctgaaagtgagttttgttctgtatggtaatttttttttgtgagtggccttattagtttgtgtttcattttactttaggcaggtttatctctcctgtaatcgtggagcttagtaaacaatatcccgatgtaactacgtataaagtcgacattgatgaggtattttcgtcttgcttttgaactctatgcatatatgtctattttcgttgggtttctgtgattagaaccttctacagtgttttgagattgaaacaaaggagacgattatttggtgtgctgtatagaaccttactcgccacactctgtttcaatgttatgtatgcgatagagttagcgagtaaaatagctgaaccagacaatattagtcaagcttctttacggctctttgcgcaatcttctgtgctcatgaatttttgcttaaaacttaatcctttcttgcatatctgtagggcgggatttcgaacactatcagcaagttgaatatcacggctgtggtgagctttcattaccctgtctttccaactataatctacattttacaattagcaggaataactcatgttgaaacggggatttttatatttgtctcatgaacatatatgatgcagccaacactgcatttcttcaaaggaggctcgaagaaaggggaggttgtgggtgcagatgtcacgaagctgaagaatctcatggaacagctctacaagtgaagacctaatccgttctagtaaagaacgtgttgaatagctgctagttaagactgtccaatcaaatcaaggttaaaaaattcttgcttcctttttcaacaataaggctttatgtagttttctccaaataatgatgagatgtttcatatgatttaaccgatgaattgaagttgggtatgcaaaagacattcctctgaattacaatatacgctaatgatatcattatcattagactcacaatttgagatcaatctagaaataatgaatgcgctgaatcagtttcgtctttgttcccccttgttgttcaggattgtaattgcccttttgttttgtttgttttctccatttcctttgggcttagtttccggaaatttgtttgtgtccgtcggtgacaacttcaaaaaatatcgacaagtcataactttttatcaaaattttgactaagttgtcaagcccttagtcgacactcgacgcccctgacattaaaagtattgactccagtgccctgtgccggcctaaaagagggcctattttgggactcttttgctggcaaattgcgccatatgtagtggagtaaatgtgtaaaaaaacagttgaatcaacataaccattatttgatcagaaaagaaaacaaaaatgtggtgtaatgagaggaggatacggtatgtggaaacttgatttacttaatttcaaaggagacctacggagtcaaagagagagttagaccaactaattgtccagagggattgagattggaggaagggtattatggtactttacgaatactattacgttgattaatttggatactttgtcttcttcttcgtctctctcccctcgcgcatcttcggtgctataaaacaaactcacgactagatcatttttggagtgagatttacgtttgatagactactacaatgaaggagccaacgacggagatagagattgaaacttcagctgtcgcaacgatcctgcctcctcctcttcctccgacggcgtcacctcatcaagcgttagtcgagaggctcaaggattatggacaggaagatgttttctctctctgggatgaactctcaccggaagagcgagatctcctcctcagagatatcgaggtgaatcggagaataacacagttccagagtttcgtttatcgtttcccatcttacaaatatgctttgcattatcaaattcagctaaattagctgaagatcctgcaaataatgtggatcgttagttcgatttcgcatttgattagattatttaagttagatgtgttgattttcttccagaatttggatcttccaaggatagatcggatcatcagatgctcacttcattcacaaggtttatctcttgacttctagatatgcatttagaatctctagacttaatacttccgttcattgagttctgtttttcacttcattagggttgccagtggcggcaatagaaccggtgccggagaattgtgtgtcaacggtggaggaaagaactaaggaagacagagaaaaatggtggaaaatgggattaaaagctatctacgaaggcaaattgggtgtggtgcttttatctggtggacaggtacttttaattattgatgcttggggtgttatgttgctttggaaacaaaacattgatctggctctgagtccttgtcttggattacttctatgtagcttactaaagattgttgagaagatgtttaatgattctaggattatggttggaatttggggggtgattgctgaaatgatgttggaataatgcgtggtacctaattcaaataatgcatttatagatgtccgttacttaaataattgctaagtctgaaaagtgaaaagtacttattttgataattgtggtcataaaggcttaatatgagtaatcataactcctttgaaaacctaaaaacccgtcggtgctttcctctagatagtgaccaccttattatgagaaagaatggttatcacgtgacctgaaagatgctttataggatcttgtaatcttctttacccttttcactttgtcttcatttacttcagcatttaataccttgagaatatttttctgtggatatgtatgggagtgtgttatcacctgtaactgtatgatagagttagtcaattgaacaagattcagatgggaataactactttcaaataagatattgattgcctcttgtatccttattgtagtgtttgttagtatactatatcctcaactcatgatattatcttgttacaaaaataattgcagggaacaagacttggaagttcagatccaaaagggtgttatagtgagtagttctcatttcagttctgtctttgctgaacatcttctatacgttcttgcaaatttccttagcaagttcagattctcttgttttagtgaatgcgacattcaataacagatgacgtttactgttgttacctgtatattttgttaccttaccataataattttatcatctcagatatcggactgccatctgggaaatcactttttcagattcaagctgagaggatcttatgtgtccaaaggcttgcttctcaggcaatgagtgagggtatagttctcaactctgtattctatttatctgtacaactctaccatttcttataccttgtttcacataatattttgcctgcagcaagtccaactcgcccagttacaatacagtggtatataatgaccagtccatttactcatgaaccaacacaaaaattcttcaagagtcacaagtattttggccttgaaccagatcaagtaagagggttcatagctgtattgtttcctgcgtgtctattgttttctttcttatgtgtgtagaccaatatacattgcctctctgtaggtcaccttttttcaacaaggaactctgccttgcatttcaaaggatggcaagtttatcatggagacacctttcagcgtatgtgtcttcaaatcaagctgaaataaacctagcccggttcttgagttttatagtcagttactttttttttttaatcttaaaacactggccttatgagtttcattctatgtgactagctatccaaggcgccggatgggaacgggggagtttatacaggtatatatcttctaatggctgcttagttattggaaatatacctcagcatttttagattctgatcagaacattatgcatgtttattcagctttaaaatcttcaaggttattagaagatatggcttcgagggggattaaatatgtggattgctatggtgttgacaatgttctggttagctctctcagtttcaagtctttattcgagaactttctcaattcttctcgaccattagaacaataaactggaatcctggaaggcaggttcgagtagctgaccctacttttctgggatacttcatcgacaaaagtgcagcttcagctgcaaaagtagtgcgcaaggtatattcagatacctttctaattcattggttccatgaactattctatattcagttttcaccttcctgcaattagtttctcccgggccaaatcatagttaagtttttaagcgagtagcttgttatgaaaacaggcatatccacaggaaaaagttggagtatttgtaaggaggggaaaaggtgggcctttgactgtagttgagtacacagagcttgaccagtctatggcttctgcaactaatcaacaaacaggacgtcttcaatattgctggagtaacgtaaactcctccctctttataagttttcgaagttatacttagatcattatttccggtactattgcgattgttccatttttgtgcaacttagattgcttatttcaaatatttttaaggacagtgagtgtttttgtggaaaaggcatgtgtttaaagttcataatgtaagtcgaaaacgatgtttacttttcaggtgtgcttacacatgttcactctggatttccttaaccaagttgcgaatgggctggaaaaagacagcgtgtgagatgctttttactgaaattttatcctgcaatatgcaaacatttgacatattcaataactgatagcgaatctcttgcagttaccatttggcggagaagaagataccgtctataaatggcgacatagtgggactaaaactagaacagttcatattcgattgctttccttatgctccttcgactgcactttttgaggtattatttctttatattgtatgaaacacacacaaaccgatatttgcaggattcagttaactgttagcaaatctcatttcctactgtggggtttcttgtctttttaggtgttgagggaggaagagtttgcaccggtgaagaacgcaaacgggtcgaattacgacacaccggaaagcgcaagactgttggttctacgactgcatacacgttgggtcatagcagctggtggatttctaacacattccgttcctttatatgcgactggtaaagagccccatccaactcttcttttcagttgattcttttacttcactaacactcatagcttaaataggtgtggaagtgtcaccattgtgctcgtacgctggagaaaatctagaagcgatttgtcggggaagaacctttcacgcaccatgtgaaatctccctctaatcttcttctttctttttcttatctattcttgtaattttgtcattgtctttgctttttcttttggcttggttcttcttttgtgttggtgtttggtctctatatatgaactgtaactggcggaggtggtcagtagtctcttttcaatgtgttactcttcattattgcaacaatagtgaagtctccgaaattttggtgttactcttcattatcaacgagacatcttgaagttaaaaagggtctacaaaatttggtttgagtaagctcgaatttggcaggaaatgaattattaattgacccaccacaaatccttttataacaaagaacaaggaatgaatgagtaatcagaactaactggtatatatcatgaaatttcgaatcatacaaaaaatggtaacctataaggctaagatgtatcaattgcattttatatgccaacaaactacaaacagaaaatctcctgcaagctacgtcatatcatatccttatcgtcaagatgcttcgggcagttgaattgcttagtccaacaccaaatgccttgaataaatccgttcaccgatcttatatcgaggagtctgaatacatctccgctatgcagagggaattcaaataaccaagaactcagcttcttccgcatctgaagtcacgttcttgttctttctcattttgttgcgaagatcggataatatcgaatccaaggcttcaaactgaggatgtgacttgtctccaacaacaaaaagatggttctgcttccccaccttaacccaactgcaacccggctgcttcttcaaccctttctccttcatcttcattctcatctctgcagcttcttcccttttcccgttcgccgcatatatattagacatcaatacataagtcccagcatcatccgaccctgtttctaataccttcttcaccacctccttagcaatactcacttcattgtgaacattacaagcggataagatcgctccatagaacgatcttgacagcctagcgtcatcacagttgataaaatttgtaacatctttcaatctaccagcacgaccgcagagatccacaagacacgtatagtgctcttctcgcagaggaagtgactcgtctctcacaagatccttaaagaactccattcctttctctaccagtccggcatggctgcacgcaaatagcaagttcagataggtcaccgcactaggtttgaacccgtgtttccgcatctggttatacatttcaattgcttccttcccatgcccgtgatgtgcataaaccgcaatcatactgttccatgatatcaaatcccgctggcataccagtccattatcgaacatcttcctagcagcaatcagttcaccggatttcgagtacatgttaagaagcgctgaagtcacaatttcgttcttttggtggaccgacttagatatcaactggtgaatctgctgcccttctacaagcccagccaagtcactacaggcgcttaaaatgctcacataagttcctacgttaggcttaacactgccatcccttaacatctttgagaaaacattaagtgcctcttcgttctctttattctcgacatatcctgtaatcatcgtggtccaggaaatgacattcttttcaggcatccggtcaaataaaccacatgctttgttcatttccctattccgtataaatcctgtgatcattgtattccatgaagcaaagtccctctccggcatcacttgaaagagttggtcagcttcgtctatcctattgttttgtgcataacctgtgatcattgcattccaagaaatgatatttctctcaggcatacaatcaaaaagtcgtctcgcttcatctaccttaccgttctttgccaatccatcgaccatagcagtccatgaaacgacatcccttctaggcattctttcgaatagattcatcgcctcatctatcctcccacgctgcaccagcgctttaaccattgagttccaagaaacaatgtttctctcaggcatttcatcaaacagttccagggctttatcaattctcccactttgagcatacccatcaatcatagtattccaagaaactacatttctctcaggcatttcctgaaaaagcatctcagctatagaaagctgcttagatctcaagtacccactaaccatggctgtccaagtcaccacatttttcctagaatcaaccctatcgaacaattccctagcttctctcatatcccctaacttaatatacccagtaatcacatgcgtccatgtgaccacatctctctcaggcaatccgtcgaacagtttgcgtgcttctgcaattttacctactttgcacagctccccaatcagccattcgggttgtggcacacgtggtcttgagctggaagagtaaatcgaacgtacgagattaaatagttgcacggatcggtcattgtctgagctgggaaataccgatgatcttttgtagtaacttctcaggcgcgacaatgcgcgagattgcatcagctaaaagatagcaataagtaatcttatttactgcgtaggtcgataatagggaaagacaagtgttgaagcgaccaaggagctttttctcagagatactcgagttgtcaaaaactgaggcttggctcctgtcgtggtcgtcaatggcgtttgtaaaacattgtatgctaggaagaacaaactctcggaagaacactgattttacaaagtgacccataatatttatactttattacaaagtgaccccctgttataagtgaactttgaaaataggggacttttgcagcaaaacaagctcattttggcttgtatgtcgtgtttggcacaagacaaatcatattttgatatttggtttcctattaccttattcatttcaattgtatggacctttgagtcaagtcaaaaaagaagaagaaaaaagagtcaagcataaggagcttgaccaagaactggttcaagctcagccaattgttgcctcaaaaaattgtagacagactctgtagaatccgaagctattctaaccacaactccctttccctgcaacatatacaactttgattagccatttacagtcttttaatattgtctagttttatgtaaagctatatatggttcacggtttcctgattgtaggaagtggaaagaaaggatgataccaacctcagggccgaaagtgctacaggaagctataaactctggtttcatgaagcgattacgagagcttgactcagacttgtgtctccgagaactataagagagctgtaattgttctgacatcatgtttttcacattttcttggacttgcttttggatttccttcagctttgcccttgatccattttcaaacatatttagcaaagatccaaattctcatagagagcactaccaactctaaaacgtgttctaaatgttttgcaattgcatacccgaagagtatgaccattgctatagcttgatagtcttgcatccgttcggctatgctttggatgctcctcttctctagtagcacctgcaatgaataaaccattaccaaaggaagatctaaccacgctcatgaatgttctatcaatacttcatacacgatttgcaagcgggattttacttggtttaaggtaaaccattctctacaaatctgaaagtgggtatgagattttaactaactgtgtcaaggaataaagggtgatcatcttccaggtagacgttgttgatgctcttataaaactcgaaatcccatttttcgccattagcgtgacgcccgcttgtgatccaatccacaaggaccagattggaatctgaaagcaatctaaagatctgtttctgatagtaccgggcagtggagaagcaagtcactggatctggtatcacaaccaaaagagcttcactcccgattctcgcctactgcacacaacaaaccgaaagatcaatcaggaacatgaatcaaagaaaatggtcctattctattgcaatagcactctgttctactaagaaagctcaaaatgattttagtagaaatgtgaaagaaacattacttccaatatctgttcagaacactttgatcctattgccttgtacacctgtgtgaaatcacaagatccatcaacagaaagtcaaccacgtaggatgaaattagtgtccattgcaaagagagagaaaagccctaaattgattcaaccttagtagaagactgcgttgtaataactgcagtgcatccatcaccaattgtgaattcacatgaaatcgaatcgccctacataatttgaacaagaactagattgattcaagcgcatcgatggcaaattcattaataaagagacagagaaatagggaaatacagagacaatgccgccaccataagtgatactgtaaatccagacaacgtcagttccagcaggagctgcctgaaagttcagtgtcgccggaactttaataactaaagattgaaaattcgaaactgtgaactctacgtagagagagagaggagaccttgctaggaagtaagaacttgagaggatacttcgagaagcagctcgtagctgtagatcttcctcccactttctccaccaccactttccctgtcgccatctctgatctctctccacactgtcgtcgactttctcactccagtttgagtagaaatgttgaatattttatatgcaaatctcatcagtttctggatgtagagaaagatatgattttgggtgaaaaatgtcaaatttataagtaggaacagctctcaggttctaatcatacataaactcgaacgcaatccaaattaatgttacaacagttttatttcccactctttgtgttttgtttggtgggttttcttcttcagaaactctcttggatgtgtttataagagcaaaactggagggatgtgtccttaatggcggaaatgtctaacgttggtgaagagcagagagactccatactttttgcagcaatcaatagcgtcttggtctctaatactgcctccaggttctgctatcactcctattcccatctggcacgcctcttccaccgcatctttccaagctgcaattcacacaacaacaaatttccaattcagaacggctaacatttgttgattgatgagtcatttcagacagaagaatggtttcggagagaaaaatatatataccgaatgggaagaatgcgtcactggccaaggcagctcctttagcttcctccccagctttcttgaaagctattctcagactctctactcggtttggctgtccgcttcccatccccagcatacaattgttctatgagccaacccaagaatcagaataaactactagcaaacaagtacagaaagagaaacaagaaaaggaatcagagaggaaaatccaacctttgctatcacaatggcattgctcttgacatgcttaacgcagagccaggcaaattttgcatccgcaagttcgctttcagtcggagttttgtctgagacagaattgaagctgatgtcttctggagttaaatcgtccgagtcctgagccaaccagccgccaccaacctgtctgagcgatagtttcccttggtcattctttttagcttcgaggatcctcaaagtttttgatttccctttgaggacttcaagacctttagcagtatactttggagcaaccacgatttcataaaacattctagtttccccgtctgttgggctcctgaactctcggatctccctcgcaagaacctagagacagttacagatcactaaacaattgaataatgtatgggacaacagtagtttgacttttgattacctcgtcaacttcaacattgaaagctacaatgccaccaaaggcactaactgggtcagcttttacagctagccggtaagcctcaagaatatcatcacgagaggccacaccacaaggatttgtatgcttcacgactacacatgttgggttttcaaattccgacacacagttccatgcagcgtcagcatcaagatagttgttgtatgacatttcctgctcacagaaataaatagaaaagttaaacataataaggcttgaaagcgaggataaggatataaatggcagtttaaaactatttgctctgtaaattacaccggacagaaaaagtagcatactttcttacctttccatgatgctgaatcgctgttgcgataccaccggcattcacttcagcaaggctcttatcaacataaaatgcagctttttgatgaggattttcaccgtaacgaagagaactcttaagtacaagcggaactgtaaagctgggagggaacttctcttctgagaaagacatgaatatcaatcaatgtaagttgccaattgccataactagtgtaaggaggatcacataaaaacaatcacatacttccttcagtctgcttccatagccattctgaaaccgcagaatcatatgcagcaacatgctgaaaggccttccacgcaagttttctgcggaattgttggtcgctctgtcctcctttgagatactccaaaacagcttgataatctcctgaatcgacaacaatgagaacgtctttgtggttctgttgaaaaaacaatagaaaatatacatttataatcttgaaaataatcttgcaagtgtaaagaaaaagtctcatatgcacagatatatgtattaccttagcagctgctctaatcatagcagggccaccaatgtcaatgttctcaatcccatcctcaaaactgatcccacctggagcagtaactttttcatagaacgggtacaaattgacaaccacaacatcaaatgtacctgtcatagaattaaaaaaaaaaaaggtacagttaaacataaggagacactataaatgacttagtctcaagcttaatgtagaggatcaatcaaaggtcaaaactcaccaatcccatgctcattaagagcttccatatgatgctccacatcccttctagcgaggataccaccatgtatgtttggatgcaaagttttcacacggccatcaagctttaagagaagaaaaaaaaaaaggagagctaagtttaatatactaaactcaacaaaacaatggtataaaccaaaacttaaatataaatatcagcgagatcacaagaccaaaacttttagcaagagcagcgagcataagagaaaagaaaaacatgccatttctggaaaatgagtaagcttctccactttggtcacagagactccagcattctccaaagtagaggcagttcctccagtagaaacaatagtgtatctacacaaatatcaatgaaaaaaggaatcatttacatataagatagaaacaaaaccaaaatttgtatagttctaagtaagagagagttgtgaagaacacataccccaattcttgcagaccgttgccaagagaagccaagtccctcttgtcagatagagatatcaaagcttgcttctcccctgattcaattaaagcccgattatttgaaaatcactaaaacgtaactgaaaatcgatcactgaatttgaaattgcagcaaaaagaaaaattgtaaaccagaggagcctgaggattgcggctgattcctctgagcagtctgagactctgccatggctcgaacagcaacgaaacttggacacagcgacgtacgatagacctgctcattgaaaattccactaatattaaaaagtttagcagaacatgaaacaaagacacaaaggaacacgtccacacacagaggagaactcacaggctgagtaaaacgaaaaggcgcgacggattttttgcgaaacaagccgcagagaatatcgccggagcgagcactcacggaggtggcggtggcggctgagctgagcatagtagtctgattttgaaacagtgtgtagtgttgagctctgttaggttttgtgattttgcggctaattttggaaataaattagaaaaaaaaataaaaaaaaaaggaaaatatgtaatttattattggcgtcaggtggaattatgtatttattattatggccttgacagttagattacacctggaatatttggaaaattggaataaagcttctctttttatttcccccaaaaataaaactaaactattttaactccaaattttaaaaaatttagtagaaaccaaaattctcaagtgtaaactaattagtaagaaataaaactttattggatcagagtggtaatattacaaaagactaactatggagatgacgaaagcttcttatgttttatatgatattttatttgcttttcagaattttaaataatgtaagtagataacaattattttattggtaggcataatagtttttttctcgagaatatagttttgtttttcgaattgtcaaaattagaagagagattttaaggaaggacttggcttcttctcctactcatcgatcgtcaaaccgaggacgcttcacagtctctggtgccgcctttcctggtataaacctttttctctacttctctccttctttgcttactcgtcttccttttaggtgtatgctgtttttgaattttgatcattattatcgaaaatctctggatccgatgtgtttccacctgaatttcgggtaatgatactcagatcttgcattttctagagtttcagtggttttgatggcttgatcggcttttgttttttggttgggtagaggtttttagctcagtttttggttcgaaatgacgcttatttgtttcctttttgaggtttggaattgtttcacggacttgattgaattttggatttagttctatgttttgatctgttgatttacactctctcaaagttacgatgggtttgctaatagtttggtgaagttgatcgattttagtttcagcgattcctgttagtttaaacttgaagagactagaaagtagtcattttagctagtttcatgttggaaagtatgcacagtcagatatttgtactggatgatctgtccctgctagagtaaagagttttattggtttgtataccgaaaatgttccttaaatagtatggttttctgagttttagccgtatgctattttggtttttttgttcttgaatatgtttgactacttgagtaaagttactcttctcctatttcaggcacctcaatgagagtttgagttgttcatgatagaagtcgtcctgttctgcagccaaaacgttagaaatttgcgaaggatgcttatgcaaagattttacttgggtcatgatcatgatatgtcgcctacaagcgtttgtgagggagcttatgaactagatagatagacaccttgagaaagaaaacatggatcaagcaaaaggttatgaacatgttcggtatactgcccctgaccctagagatgagggacttggctccattaatcaaaggttttcccacgactcttcaactaatgttaacacttatgtacgacctccagattatggtgtttcaacccctgctcggccagtgctaaactactcaatacagaccggtgaagaatttgcttttgagtttatgagagatagggttattatgaaaccgcagttcatcccaaatgtgtatggtgagcacagtggtatgcctgtttctgttaacttaagtgctctgggaatggttcatccaatgtcagagagtggccctaacgctacagtgcttaacatagaagaaaaacgtcagagctttgagcacgagaggaaacccccttctagaattgaagataagacctatcatgaactggtccagtcagccccagttatctcttcgaaaaatgatactggtcaaaggcgtcatagtttggtttcttctagagcttctgatagctctttgaaccgtgcgaagttcttgtgtagttttggtggtaaagttataccccgccccagagatcagaaacttaggtatgtaggtggtgaaacgcgtatcatacggattagcaagactatttctttccaagaactcatgcataaaatgaaagaaatatttcctgaagcacgcaccataaaatatcagctgccaggagaggatcttgatgccctagtctctgtatcttctgacgaggatttacaaaacatgatggaagaatgtatcgtgtttggtaatggaggatctgagaagcccaggatgttcttgttttcaagcagtgatatagaggaggctcagtttgttatggaacatgcagagggtgattctgaggttcagtatgttgttgctgtcaatgggatggatctaagttcacggagaagttcccttggattaagtcctcccgggaacaatttggatgaactacttcatgggaattttgataggaagatcgatcgggctgctacagaaccagcagtggcttcgcttactcccttagcaggtaatgaatctttaccagcgagccaaacttctcaacctgtaacaggattttctactggaaatgagccattttcacagccttatctaggacaacaattgcagttccccggacttggtaaccaccaaatttacacgtcaggtcacatggcaagcataggctatatagatgagaagaggtctgctcctttacatgttcaaccacaacctcattatatcccgtattctgtgaatcctgaaacacctcttgaaagcctggtgccccactatccacaaaaacctgagcaaggatttttgcgtgaggagcagatctttcatgtacaagatccagaaacttcatcaaaagaggccaaaatgagaagagatgactcatttcagaaggtaaatgatcatcctatatctactgtcgagagcaatctttcagcaaaggagccaaagatgaggagagaatcctcaaccccaagggtcaatgagtatcctgtttcttctatgcctagtgatttaatagtcccagatgacctcccgaaggaagaagctccaattgtcacacaaacatctagttcaacaccagatccaagttcttcaactctctcagagaaaagtcttaggaaatccgaggaccatgttgagaacaatctgtcagcaaaggagccaaagatgagaaaagaacactccaccacaagggtcaatgaatattccgtttcctctgtatctagtgattctatggtcccagatcaagccctcaaggaagaagctcctatttccatgaagatatccaattcaacaccagatccaaaatccttggtttatccagaaaaaagtcttagaacatcccaggagaaaacgggtgccttcgatacaacaaatgaaggcatgaaaaagaatcaggacaatcaattttgtctgcttggaggattctcagtatctggacatggtacttcaaataatagttcatctaatgtgagcaatttcgaccagcctgtgactcagcaaagagtctttcattctgagcgaactgtacgagatccaacagaaactaaccgtttgtctaaatctgatgattcccttgcttctcaatttgtaatggctcaaacaacatcagatgctttcctgcctatcagcgaatcatctgaaacttctcatgaagcaaatatggagtcccagaatgttcatcctactgcgccagtaataccagctcctgatagcatctggacagccgagggtagtatgtcacagtctgaaaaaaaaaacgtggaaactaacaccccggagcatgtaagtcagacagagacttcagcaaaggctgttccacaaggacacaatgagaagggggatatagttgttgatataaatgataggtttcctcgtgagtttcttgctgatatattaaaaacgaaagagtctctgaacttccctggattagggccattgcatgccgatggagctggtgtgagtttaaatattcagaataatgaccctaaaacttggtcgtattttcgaaatttggcgcaggatgagtttgagaggaaggatctatcccttatggatcaggaccaccctggatttcccacttccatgactaacaccaacggagttcctattgattatagctacccaccattgcagtctgagaaagttgcctcaagtcagatacatccacaaatccactttgatggaaatatcaagccagatgtgtctaccattaccatacctgatttgaacacagtagacacacaagaagattacagtcagtcacaaatcaaaggtgctgaaagcacggatgcaactctggtaagcttattgtattcaacctaaatatggaaaatctaataatttcactactggcaacgtctcaactgatatttttctaatttccataaatttgatatgtagaatgctggagttcctcttattgactttatggctgcggatagtggcatgaggtctctgcaggtatgcatttgtcagcgtatggcttaacaattttacaagctgttgcatttgccctctcttttttaaccagatacatacaacgactgagccaccaccattagtgaactggacagcatcacaacatagggcctgaatagttgttctagtgattttaaaaccctaagtactcttaagcagtacagaccctaagtaccagaaggacttttatattatgtcaaccaagttatgactttccaatgcaaccttttagctgtctttctgtttttggtattcgtctgttcttgtttaaaggacttttgtagaataggtataatgtaccccattggcaggtgaaatcattggaaccttagaaatcttttgtcaatcttgctcctggttttctcactgatggagaaaaaataaagcgactgtatccattttgtcttctgtttcaggtcattaaaaatgacgacttggaagaactgaaggaattaggttctggtacttttggaactgtttatcacggaaaatggaggggtacagatgttgctatcaagcgaataaaaaggagctgttttattggtcgttcatctgaacaagagagattggtgagctttctctctgaaggagttaaggtttctggttgtataagtacattggccactgcgtggttctgccaaattaaattatctttatgctttagggtaactagagtactgctagaagaacactactactatctgaccccacaattgaccttttagttgtccatttttctttagggtagatgcttgttatgagcaagaagttggcattctctgtagaatcttacttgatttctcattcagtgcagaaacatgactctttctttcgagaaagttgcattagtttaattggttttcagtttcaccaaccactgcttgaaaatttcagacctcggagttctggcatgaagcagaaattctttcaaagcttcatcatccaaatgttatggcattttacggcgtagtgaaagatggaccaggaggaactttagctacagtgacagagtacatggtcaatggatcgctcaggcatgttctgctcagcaacaggtaattatttaatacagctcgtcggaatccttgcttcctcaagatagctctagtttataccaattcaattttggcaattacaggcaccttgatcgacgtaagcgacttatcattgcaatggacgcagcttttgggatggaatatttgcactcaaagagcatagtgcatttcgatttgaagtgtgataacttgcttgtcaacttaaaggatcccgcccgtcccatatgcaaggtgactttctaggacagttttagaacataatgatgcaacattttcattttcttttgtttatgtaacaaagagatgatgctttatgcaggttggtgattttggtctgtcaaagataaaaagaaacactttggtcactggcggtgtaaggggaaccctcccttggatggctcccgagctacttagtggaagcagcagcaaagtttctgaaaaggtatgagtccctaacattcttgtgcaagtaaatgacttgcaatgctctcaaattagttgttggtaatggtagatgaaaaacaaatataacccctttttgtacttatttagtttcaatgccctttacatgattttgcaagtaatatcgccatggatacttcatttacacacaggttgatgtgttctctttcggaattgtcttatgggaaattcttaccggtgaggaaccctacgccaatatgcattatggggcaataatcggtaagcctgggctaatgcaccataacatccctatacacattcagttctgacttcacgctttgcagaagtctgaatctcttaccatttgttactcgtgtgacaaaattgtaggaggcatagtgaacaatacattgagaccaaccgtgccaaactactgtgacccggagtggagaatgctgatggagcagtgttgggctcctgacccatttgttcgacctgcgttcccggaaatagccagacgtctccgcaccatgtcctcctctgcggtccacacaaaaccacacgctgtcaaccaccaaatccacaagtaatctatcaatttattattgctggtacgtaaatcgtaaaaaatggtttgtgtataaaatatttccttgctgcttctttcggatttgagtgctacagtttcaaggattggtgttgatttgtacaagaaaccctaaaagcacatattgtatagccattttcattatcattgagtgtaagtaaattgttttttttggtacaaagacttggaccttctttcaataaaataagatcaatctaatgtatatgtatggtttttgttttaatagctgataaaatagtcattccattgtttgtttaataacttggcaaacccaaaattttgatataactatacaacatcatagacattacatacaaacagaatataacaacacatacatatacatatattatacatagaaaatctgaccaacattcaaaaggctctcttgaggaacattgtagataacactatgttctctgcaaatcttcctaagaaatgcatacacatagtcaatcgctatcttcttgtagaacctcgcttccctcctggctcgaaccaccgtgttccccattatgtgtaccactcctgcgtccctgcacccgtttatgaactccagctcgtctactccactcatctggctcgacgctgtcactgtgttgctcacccgtttcactggggttattgactctatcgagtcaaatgtatcaaacgttgccagattctcgttctcattcccattcccgagcgtgtctttaagctgttgctggcttccgcagatgctgtagtcatcggaatccgaacagcctccttccatcatcgattcaaggcgtacgtacaagaagaggctctcaaagaggcgtttttcaaagtcatcatctttcttgtgcaagtctctgtatccgtacctgttaacaatggacgaccaaatatgtaacagttaatacaaagagtgttcaatcgacagtaatcaccgcataacactatttcagatggttaccttgcgacgcaacggaacatgtggaaattttttggaccaatccttttaacgaggaaccgctcttcctcgggtacggtgtaaactgggaggttcttgacgcatacgaacaccacaactgagtgaatggccggtaggtttgtgatgaaatgagaaaaaatatgagggactccactagctagttcagtgtaaacgaggccaacccccggaacccgaacaagcccaaggctaggacccagaccgaggatccaagccattgagactctacagtgcatttcaaactcatatctctttaaagttccgtagtgccatacccacatgatgaggagaaaagctgcagcgatcacgagcggtacccaaccaccttggtcgattttgaaaagcatggccgagaaataagtgcactccacgacaagtgagagcacggtgaatatgagaaccagaacccaatggcaacgccacactaggatcatgatcagcgtcataagcagtgttgtcacgagcatgacgatcacaactgcagtcccataagcgtttcctatctgactctggttcttgaatccagcggtgacagcaatgcaaaggatcattaggatccaatttatgtcaggaacgtaaatctgaccgaggaatttccgggaagtatgcaccactttaactcttggaaagcaaccatgggctagagcttgcttgactaaggagaatgttgccgagatagtagcttggctcgccacaatcgctgcagcggttgcaataatgaacattggccaatacacacttcctgcaaaacacaaatgtgtacttaaatcttaacgtttgtctacacagatttgtatacgaaagacgaacttaaccgaagaaaaaacctggaatggaacggtaaaacgcatcagctacatgatccggatacctcctaatgtacgcagcttgtccactataagccaaaagaaggcaaggaaacacgattaccgtaaaagcgatttgcacagctgagaccggaaaatgcgatagatcagcgaagagtgcttcgattcctaacattttcataggcatggcaagaaaacgaaatatatcaagatcaagaaaataagaactgttgaagagcagaatgaactagatttttgtttccttacctgttatactaagcataatgcctccaagagaggtccaacgatcccgacctcctctcttaaaataccgatatatataaaccggagagaaagctttcaagacactagtatcatgtttccagatattgtacataccaatacttgcgatagagagaaaccagaggaaaacaatgggcgcaaaaagccaaccaacccggtctgttccataatgctgtacgctaaacaagctgactaatatcacaacagcaacaaaaacaacaacacctgtaatagtaaccaccaaacttatgactattattattgacaccacgagatgtttcaggattaagttcaacgcatgtaaaaatgttaaataccattgcttatgtgaggaaggtttactcttagcccaccagcagctgagagaactgcaaaagcaaatgttgacaagtgaacattttcattactcttaggcctaaatcacatacttgaaagggaaaatgaactacataccagaaatagcgggagtaaggataccatcgccgatgaccatacacgtaccaacaagaactaaaataagaagcgccgtttttctagatgtccgcttttctaaccatcttttagtcttagcagcaaaggaatgctcatggaacgtagtgcggctgtaagtagtaagctcttcatcagtacggtgttggttctgaattgttttgactttggcatgtctacagagtaatgaatacaaagcaaacgtcccacctacaaagacaatcaagtcagtaacaccgattataaaaaacagaggaaataaagcttgtgaattgaggaaacactaccttgaccattatcatttgctttacatacaacgaaaacgtatttgaggagagggatgagtgtgagtgaataaataatgagagatagagctccaatgatatcttctggatctttgatcccatgaggaaatgtattgtagaaaacatatagaggagatgtccctaaatcaccataaacaacaccaagactctgaaatgaaagctgcagaagtagaagagccgagaatttctgcaaaaatgttgttattgttatgtcatcgaaactctaacatgatcagagacaagaaatggaaatgaatctgtaataaaaaaaaatgataccttttctctgtacatgtttctaagtcgaccagcttcttcatccatggattgatcaagcttctggtccaaatcccacatgctacctctctcatcactctcttcttcatcaatctcaccacccatcgttgctgcttctactcttgccgccatttaaaactacttttgattctaacacaataaaaaccaaccttcctctcaagaccagatctttttacacaagcaaaacctgaattggtttcgaatctttaaaaaaggtaaaactttcacaaacaagaaagattgttcaagaaaaagaaaagttcctaaagaggaatgtcgtaagagcttacatatactaattacaataactgccaaaaaaatttgagaaaagatatcgaaatactagctaatatatcgtgttaattaacaagcagccaaagataatcaggaacatgtaacaatcaaacaagtatcaaataaaagaatatgccaaaaaaatcaaaacttcaacagtaaacccagcaaaactaaacaaaaatcaataaacaacacttagagaattccaaaaaccaaccccgacattatttctatggaggataaacacaacgaactggaaaaattatgtctttatataagaaaacagattctcactgttccatcggtgggtcctgttcgattcaggaccatcgaataaaagaatataacactgaaataaaacgaggactattgaagttaccagaacaaaatagagtttcccttttacagagttatgttgttctctggggaattgagaaaggagaaaggaagaaaacgcaagagagagctgcgttttgacttctctttctctgcagctgattagagagtaaaaaagatacaggcaaattgagaattctatagagagaaagagagagacaaagtacgcatatgattctgatttctgacagatatgaacgtggagagtttttattggaactatcgaagaaattatttaactagtgttctgactgaaagtacaattctttttacccactcaaaaactactctgcgtttttattggggaaaaaaaaatcaagttcaaaaagggcaaataaactgattagtatgatgatgtaaaaaaaagatgaagaagataaaatttagagctatttcactggatcaatttttcacaataaacggtgggaataagcaccatcaccagagtggggtcagatgtagttttggtagaaacatttggtttttcaagattgcattaaagctacctaaaagaagtagtgatttgggtttggtgaataataataaatgatgaaagaaaacacttcgttttcaagatgtgcatagttacctaaaccaaatttccaagtagaagccgatgaaacaattgttgatgtaaatggttgaaacttgcgtttaaaagttgaaatgacccaattcacagtcttaaaacatatgtttacaatcgggtggttggattttttataaggcttatagtttaagttgttaaaaatttatatattataaacttaggttttaattcaagaaaattgacaagtattagtggtttgtgtgctagtgttctcactatatcattggattcaaatatacattcatatgtatgtagctgaaaaaaaatataaaaaaatagtatataaagtattgtaatgaaatgaatgaatttatccaaaaaaaagtattgtaatgaaatgtaaccgtcaacaaatttcaccaacggaaaatatcaaaagctgattatgtgaaaaagtgatttttaattttattttatcgttctttgaattc

SEQ ID NO: 331 - DNA, 91863 bp, Arabidopsis thaliana
aagcttcgaaatcgcttcattgtataaatactccaaatgtttcaacaaaatatcctctaattgctcctccgtacaataaccccaaccattattatcctcaaaactgccactagggtttgactctggacacgaatcgagaagacccggatgataaacaagatgcttaagactcgattcaacaatcgatttcgatagagccgtcctgtcgagcaaacaacacggatcgaattcgggtttcacggatctggtcttccggtttggtctaacatgcttctccctcacagtacaacccatcagagttaaagcacgtctatgtatatatgagaatctgaaggaaaagaaaaattccacagagattgaaagagtgaagatcattgaatccccacaaatgaaacacaaaaaccaaagcaggatcaggagaaatgggttttaattgatggcaaaatgattaatcaatcttacagattatagatacgagtttagaagtacttactgatcggcagttgtatttctcagctgagaagaatcaaacttcggtagagaagagaggagaagagaagcgaagggtcatgcaagagaaaaaaaacaagctttcttcagtttctggtggtgtgtgtgactgttgaacataatgggcctttaattgggccgagagctaaattatactaaacgacgccgcgtggctcgctgtttactttcgtctgtgatctttgaaacacacgcatcgtcgtcacttagctccggagctctctatctttggtcatcctcctatcggaatcggcagcgcaggtattgttttttaggttttgaactttgtgttatctgttatcaatcctcgtttgatctgaaagttctcatttttgttaaattaaattcacctagaatcgttaatcgtaatttcgtaggttttgtttagtgaaattagtcatgggtttgctgaaaagtttgctctttttgggagttttatcgcttttgtttccgccatgaaactcaattcaatccacatgctcctgattgtttcatcattgaattagtagccaatgtagatgccgtgaatgagttctcatcgattctcaattttgttgctcctactgaatccttttgtcgattgatgtaagatgtgatctctggttttaacttgttatattcagggaagagggcagattatgaataatgatacatcaaaaaagctgggaactttggtttctgatgatggaccagtgaatgtatatgtatgggacatggacgagactcttatcttacttagatctctgttaaatggaacttatgctgagtcttttaatggctccaaagatgttaaaagaggtgtagagattgggaggatgtgggagaaacacatacttaagatctgtgacgattttttcttctacgagcaagtaagtcttctcttaacgataagttcagaacgggaatgatgagatgccctcgtaaactctgtcacctacaaagcattagtcttgtgttctttgcaggttgaggaatgcaatgagccatttcttgattcattgagacagtatgatgatggaaaggatctttctcggtatgagttcaaacaagacgactttagtactcctactgatgacttgaacaagaggaaacttgcgtacaggcatcgagctgttgcggagagatacgaaaaggtactgatatgtttttacatgttttttgttgctgatgttatatgactcaagtacaaatgtcatctctttataattgcagggtttgtgtccattcattgacagcgaatcgatgagtgggttggatgagttgtataatgtgactgatgaatacacagaccggtggctttcttcgggtaaatgtcgaattgtctgcttcttctggttattttctttatcgcgtccactgcttagtatgacattgtattaattgcagcaagggctttcttggagcagtgttcatgtgtggaagagtctagtgatggaacaagtgcaatcgaacaaagctctcaggatatacatattctagtgacttccggggccctcataccgagcctcgtgaaatgcctgcttttccggctagatacattcctaagacatgaaaatggtaagctcggagacatctccttcaatgggatatcttagcttcggattcacatagttgttgctactctgcgagctccgtcatgcatttgcatttctatgttaactacatcatttaactctttttgcctttcttcagtgtacagttcaatagatgtggggaagctccaatgtttcaaatggatcaaggagcgtttcaaccacccaaaattcagattctgtgcgatcggggacggatgggaagagtgtgcagccgcacaagccttgcaatggccattcgttaagatcgatttgcaaccggatagctcccacagattccctggcttaacacctaagactgtaagctactactttgctgctgtatatgggaactctgatgctgattccagcaaagagtaactctcaaaaagctttttctttgtaaaatatgcaagtaaacccaacaaaagccatggcttttcatattcaaacccaacattgttcatagacttgagttaagtcagcatttggtatttataactaagcagttctcttggctcgttcaaatgtgtaatcatctctttcctataacataacatcaatatcagacttttgatgttaggtctctgaaagagttaaaatttcaaatagtcttcactattaatccttatagtttgttggttggtgtctttggctttagaagaagagagaccaaaaacggaaatttggaccaaggtaaacttgtttgagacacaaatttttctgagaaacttgattgtttcgattggttcatgtttttcaggaacttaatctataatacagatctgaatcttttgatgatgaacagttgtaatacatctgcctcagtagagaaagcaaagtaaagccaaacggaaacaacaaacacacaacatattaaaattggtcccaatcatatcaagctacatagatccatccgatagacattctgaacttaaaaccgaactaagtcataacataaaactaaaacttaagacaacactgataaacagtcttttactcagtagacaccttcacattcatcatcactattcactagtgagtctcctcttagggttttgagacaaagagaatcagctcgtgttgtttgatgaatgaaaacttgcaagtgtctccaactgctagaggatattcttgagccaaacctttccatccagcagagaagcttgatttcgtccctgacaccacgtaaaccacattccatgacttcttcatatttgggtgatgtatcttgaaaatcgttctctgcttcggcatatgaatactttgaacagatttcgggaaccactgcaatatcagaataatgttttgattcacaaaacaaagcccatttaagtgtttagtgtcttggtttgtcttatcttaccatgtagatgaggtatgattttttgataaacatggagaattctgcaacagaagatgaagaggcacctgcagattctctctggacactaaagactttatcggtcctcttggaattgtgagattcctcagctttcttcttctcaaagttgagcttccttttgtagttccctcctccattagattcagctgctattgtcgtggcaagagaaggtattccttgttctcttttaggtggccctgtttcaatcatataaaattcaaaagtaaagaatcaacgtatgtatctatcaagttcactgcttcgtaatcagaatagcaaatcttactagaagaagccatgaaggacatggattgtggaggctgtagcatctccttgccatcttgcatgaagatgttcactgtaaaacgcatattccctttgtgagtgaaggtaagaaactcactggctcccaaggcattgtcactcacaaacttctcccatccggatttctccatgaaatagaatcttggatttttgcagatttctacttcccaagaacttccccatcgagcttttatcttcatcttacgagagagctcattgttggagaagcttctcacaaagtcgtaaggaagtgctctctttggttatatgcaaataagaggaacagaaaacataagaagaagaagaacatacccaacagtgaaccttttacacatctcatcaagtaattaagtcacaatgaaactagtcccattacacacaaatgacaaacacagcaacaacagatctcatccaaaaacaaacaaagttgaaaaattaaagcgtagatgctcatattcagacagagaactgagacaagcaacaaaagcatattcaagaaaatttattgaagacccatatagactagtcacgaaaaatttcacctttgaaagacagctaacaagatttaacctttaagaccaagacacatggttacagggaaccaaagtttcaacatttcaaaactaaaactaacaagaaattacataatttaagaacatgaagagttaaagaacagatttttaccatgttctcagaagaaatatcaactctctgtagaaccttgaagaagctctctctcttccgttcttctttgcacatatcattgtcactgtttctagccatctttctcgctttttccttcaacttcctagtatctctccacacactctctactctctcactcactctcgctggttatgagagtttgagagatactgaaatttcaaaatttggggtttaattgcaaaagaaagtactaatttttgttgttttgttttcctgataatatttacaaaaaaagatgtgtatttaagtgtagtgtcagcaaaagcagagagagtcgtctgcttacatcatctatttcaccaaaaaggtttagaccttcaaatttgtttttcttgtgtctggctcttctcgctctgttttgatttttgtaatttatatactttcttttagatcaaatcttttgtctactaatatatccttcctatataaatttgatggacacataattttagttaggatctctatcaatccaaaatcactagtataaagctgaatcttattttgtttttgtttccaacgattcaatcttttttctataaaggtttaattaaatcatatgtttgtatgtatgtacataaaattgtgaattcaaatatgattaacaaaatgaaattcgactttaattaacttaaatactaatctatctttttgtttttgttttctgtcgaataaattattatctttcacacacaatgtttgaacataatgtttctttattattcgtatctaataaatggtataaatcgtttttctcgatatttctttataatctcattttggaatattttattcgttctaagttttataatttacatcatatgtagtagtgactgtagtatcttgaaatatttattttttatttgtaagttcacaccaacttttttgaaagaaaaaaaacccgtatacaccattcgcatatgtataattcacaacgagaattgtagaatagccacacccaactagctccatcgataaagacgcgactaattaaaacatagcctcactcagaatcgcagatgcagaatataacccatgcatataatatacatttatattcataactcggcaagtcatttgcttcattatactagctaattattgacaccaacttaggcaatctatgaaacaatccctaattgtagatttttgggcaatttagcgaaggagggtcgaaggaatctctctcacgttccatgcatctttttatgtgaccagttgttttggttaaaaagtaacgagttatggaactacgtacaccgcaaatccaaaaatgtgtttagccaaataacatcaacatttttttttcaaacgtataatatttcagcttttttttttgttaaaacagctaccttaaatattatgtaacactaccgacaaaaaaaaatattatgtaatacttgagaatctgacaagataaagaaagaaaagataatgcaaaatcaagaaactattgtcgtgttcgtgtagatttgcttttgcatgagcgcaacccacgtagatattcgtagcttgtgacacgtatctacgtattacacgtggtgataacccagtagtcgttaaattagatcggagagcatataaaccattaagccaaataagtttatagtttgataagaaaagtaagaagaagaagaaagaagatgcagtcggcgaaggaaaagatcagtgacatggccagtacggccaaggagaaactcaacatcggtggcgcaaaggcacaaggtcatgcggagaagacgatggcaaggaccaaaaaagagaagaagttggcccaagagcgagagaagtctaaggaggcgcaggccaaagctgacctccatcaatccaaggctgagcatgctgcggacgctcaggttcacggccaccatcttcccggtcactccacctaccctacccgagccaccggagctaattacccgccgggacagatctaaaactagctctatagctatattaagattagccgccttgtttaacaatatgatatgtacgttttttctaatataagatcagcagtcatgaaattttcttggttagtttcttttgatagtttatgcataaacaataatgtaatcttgcagaaataaacgtacttaaataattagtccatgtaaggtaatgaggcgagcgtgattatgcgagggaaaaaattggttgtgatactaattgattcagactacagtacgtcgaatgtcgatatataatactagttttagaaattagtgaaagcgatggattagatataatctccacacaaaaagttcaactaatattatttattagtcaaatagaaaatatgaaatacatatttaaaagatatccaaatttggttgcagtatagatacaacatatacaccttaatattttaaagtgatcaaatacatatctcgccaatatataacagtactaaaagaagaagaaaaataactagttagatagaattataagttttgaattttacaatggttttgtcaaatcagaaaatcaatattcataactcataagccatgcatactttatgttttaaaaaacctattcataaggcacaacgaacttctataacgacatcattttcggtaacatacttttagttaatgcaaagcttgcgtaaatgtctaggactagaagttagttggaaaatatctttctcttcatacaatggtatatagctggaaaattttcatactaacatacatgtgaaatcgtcctctgtctaaaaacaagtggacggagaaagacagtttagccggtgggtcagccatcgaactctagacaagtaacttcctattataacaaccaaccatagtttgccacgtattaaatcttggcgtgaaaaatctgtcatccgtgcatatacacacggtctttacatataaaccgcgttttaatctgaaaccatgcatttgtgttcgtattctttgttgtttataagctctgtgtttttatctttggtgaatgatctcgctcttaagtcttaacaactctgatccttctctcaaatgggttgtctgatttctcctgtaatgaaactccgtcgtctctcctcagccgactcgcggcgatttgcataccggaatctcgccgagaatatggaagatccagtcataagggtggtggtagggaaggagaagaaggagttcatggtcgaaccgtatgtactcgaagagtacccgttcagagtcttgataggttcagctaaggatcgtgccaagaaccggttaaaccggaccggtagagtggtgtggcttgatcatgtcgactcgatcttatttgagcacttgctgtggcttcttcggaacgatgcctctacgttttcggatttggatgttctcgagatcattgaattctatgctcaagattgttagggaaagaaatggattaacagtgtgcttttacagttttacttttcagtgaagatatgatccattcaaaaaactgtttttactgcgagcaattgtcggctagatttaattgggctatcacgaaaaggcgcattagtttttatctaaagtagtagatatgctacatacgtgggccttatgagctggccctttattggctttttgaaattaaataagctacaccagcaaaaatagtgtggtctctctagaattctaagttttgtttcaactactgaaagaaaaagaaagggtcaaaactacaattttgtttactcctcaaagtaatgaagtttgaacaaacttaaaacactttggtaactagcagactggtaagtggtactgtggcaaatctagctaatttagttaataagatataggtagtatataaccaataagcattacaatatttaagtaaaccaaaaacattggcagtcaaacattcggatgtgatagtttgtttaatgttttactaataatcattatgtgtatatcaaactataattagcaagtaatcttttgcacctttatggactttatataaagaaactttgattagcttcttatagaacatgatcatgttcttaataatattaatatttttttgtagaagttagttagatacacaatccaatgaagatagaagaatgatccgtggtacttggtcaaaatcatggttgtctcttctttacccacagttatttttttatcaacacttttatagtacttagaaaacttaaatatattattgacaaaatcatatatataatagcagagttttctttcctctaaaagtgtccacgtcactacatctttttaatgtggagcccacatgtttttactctgccttcacatttttttctatgagtgaaatagatttagtgatgtttatgaggccacgatttggtcaaaaagctcatgagccaaagaaccaaatagacttagtgatgtgtatcgggccaagatttagtcaaaaaacctatgaaccgaaaggacctaagaaaacccagttaaaattgcaaactcttgatttcattttctcctattcgatcgacgcaattcagaagacgacgaaagagaaaaagagtgtttcagtcactgccccatggacctttccgtatttttcttcctcagaagctcaaacatcaagtatttatgccatttatcaagtgacagtaattggttaaacctcaaagaaattaataaccacgttgaggagtggtgagaagtggaaagatccaaaaaaattaaagccacaaacaccaataaattaaaatcttaaacgaaataattggtacgttacgaagtggaaaagatccacctcactaatctatataaacaaatgcaaacaaacaaaattatcacagatttgaaacttactaatatttccaaaaaaaaaaaatggatcccaacaaagttgaaattagtcgtcttgaggcacttcctcaagatctactcagagaaatagttgccaaaataggggtaaaatccgctgaagattatcacaattgcatcctttcatgcaaagaactaggtgcatcagcaaacgatgaacgcgtgctcaaaacccttaatcttgctctgttggtgaagaaaccgttatcatgccgcaaacaccttcttattatgaagaaatgtcttgccaacaacaacccggatgctcactacataaaaggtataatatggtactttaaccttgatcattgtgacgttgatctccaccatattggcatagcagctaacggaggccagaaagaagcaatctacatgtatgccatgctattattatgtagaggaagaactgaagagggaaaaacctatatgagccaacttgaatgggctaagacaccaccatggctgaaacgtgttggaaacaaatcaaaacttcactaaatgggattagagtggcgagaaaaagatgctacatgatatcactttgcaacatgaaaccccccgacgtgtgccatccaagagatttggacaacacatgtgagaaatgttttttctacaaacaaatgtttaagtttatttttatggtataacttaaacaaaacatctagagagttggaaactgtttttaaaaaattccctataatgtttgaggcagtgaactatcacaaagactcaaaacaaagttattactcttatttcttttgctttaatgtgtgtctttccttgctgttgtaaggaaatttatattttcaataaaatccaatttttaattaattatctaagcatatcgtactttcaatgttaatattgttataatccaactctttttagctaattcgcgaagagacgttgaaaagtgaaatcttcccaaaaccaaagagtagtttctaagattttaacagagacacaaagagaaaaaacaaatgggcggattcatattgggccaaaattaacaatggcaacaatgtgtaaaataacttcgtcgttagtctctgttcttcgcgatcctatgcagcaaccgcttagtgcgaaagagagagagatttccattgtatttttaatttaaaataaaatatataaaaacaagaccaatgtaacaaataaattgcttagatatatataactctaaaaaatattcttacaagatagtaagtttggtctattgtcctataaattctatcatataactggtaacaacatgaaaaaaatatgtaaaactatacatagattacaaaaatgtagaaatcaaaagataagattagcaaataacaaagatattccccttttaatcaaagatcagtaaaaaaaaatcgaagttataattacatattaacaaaaccaaaaagaaaccaccccgcgcaacgcgcgagtctcctccctagtaataataataacagtatattatgactaaactatgtcaccttttacaaaatcagccgtttgtatacatctccaatgctatctatgtatggtttttgattacttatttttgtataacattttggattgcattgtcactgttatttaccacaataggcaagttcattcatggttgaaatttataaatccattatcaggtagttttaactgatgaaccagtcctaatattctatactccaagctcttttttctagaggggcacaatttcctccaacctatatgcaaatattatactactatgcgacagaaataaagtaatgattgttaatcagtactaattgttttgtgatgaacattaatttcggctactttactttagattattgcgtgtgtgacagcttagcatcaaatgggttgggcaattaagggcatgattggaaattaattggtcaaattaatttaatttcttaattagcactccacttgcactttcctttgttttttaccgctattactttaatcttcttcttttttgtcgtttactacatttccagtcatttaatgatttatttctataacatgttggtgacctcaaaatttgaataagagaacatttattcatccatgtgttttgaaaaaaaaaactaacaagcactattacagaagaaattgtggaagttttaatttgctagaagctttatatgtgggcaaatttgatgacaataaccaaattaaacaattcttatgagctagtcaattaacccaatagaagaaaccatgcagtaagagggtcaatacatgaacaatatcgttttttttcttaaatcataatttcataaaattcggagaaaaacaaaaaagtggaaaaaacaattaaagtttcttaaattgctaaaacggagccctaccggcgccggcgtgattcccctgccaactttcaactccaatctgaggcatactcatcggcaaattaaagaaaggcaaccctccgccaccgccagtggcttccgagtacatattccctccacctccgccgccgccactttgcaagtgctcctcatgctcgtccaaaggcaacctttcgtaagccacgtttgtaaaagacgctgccatgaccattaccggccccgccgccattaactcaccaactacgttacctccgacgacctgtccttgagctccagcgaggaatatcgtcaagctagtcgcccctggaggagcaggtggcggaagaaaagatccggagagggaaagaatctcaaaagtaccccgcagagtcacaacagctccggccgccgtaggctgacggatgctgacgttagtgacggttcccgtcccggataaaacgcaaatcccgcgctgtctccgacgagcgtaagtggagatacattcgaaaacgtcgcagccacttccaacttcaagaatgtgagccctaagagtgtttgcgctctcgcgcgtgacaatcaccggcggcttcggtttgttcttcgatccagctggacggccacgtggccgacgcatgacgaggtcaccgctccctcctcctccaccgccgcctagtccagagttatcattagaagctattaaatctaaaccttgatggtgattatgattatgatggtgatgatggtggtttcctccagcgccaccgtcatcttcgtggtggttgtcggtggtgaactgtccgccgccgccaccatcgacgttgtggacgtagcgagaagttgtgcctagatcgagaccagccatgccaacaccaaacacaaaaagaaaaaaaaaattgataaaaatgaaaagtatattataaactggattagagattctaatgatttaggtttagatttaatgtaagagatagcagacaagcggataaattataaaaagtggagaagaaaatatatagaaacctgagaaatgaaattatgtatgaagtagagaaagaggaagaagaagaccaagtctgctctctagactaatggccccaagagactattattattataaggttttattctgtgtgtgtttatttaatgtcaaattcgagatgaagttactcataagttttataatattgtcgaatgtcgagtatgtataaagacgttattgcggttctagatttcgttgaatgtatatattatcaaagaagctaccattgttttatgtcttctcacggaataaagcaattaatggagacaatatcgagatcccaagaatgtggaaataattgttcttgtttatctttcatttgatttttgtaaaccaataatcttattttttgtacaatgtcttagataattttacttggattcaggacattctatataaccaacacggactaaaatgggatttttttatttatatatatatatatggtttgtacaaatatactaaaaacatatgcagataactagactttataagatttagacaaagaaagtattaactagatctgtttgaattttccgtgtcctttgtagaataagaaaatttgcgtggaaataaccgaggagacctaaaacaccaattttgatatttgctgaaagtactccaatggttaagtcaaaagatcctgagattgtagtcctaataaatcttcaggaaaaataaggctggtataccgagtgttaaattttcttcaaaaacttagtaatccaaaggctaggacttttgaaatgaaacaactggtgattcttttatcttttcaagatctccttccacaaaacgaagagagtattgataggttttactttaccagggtcagagaattgtgttactcgaccagatagttggtggagtcctagttcttggtagatgaaatatgcatgatgttaacgttgtaacacatatcaataaatagatcaaatgcactatacgagttatgtcaaaatagattccgaagattaatcgatcctaaaaaataccttcgataccaacaattcatgagacatggttttgaacatgctccacattcaatgagtcatttgtatgtcttcgtcagcagcgtggatctatcatctatgtcctagtcaatttttttttttttttaagtatagcatccttcatcagcaaatctaagaaatcactatactcttgaaaccaactacttttatttatgtaactctaatttgattgcgcagcataatcgagttttccctaacttgtgaattcagagtattttgctagcggcacttatcattcaaattttatgtccttatactcgtaggaaatattattaatctactaataggttatatattatttggctatttgcaacatcaaatacaatgtggatgaaaatgaaattggctcaattgtaaacttagaagaccaaaatcgtaaactatagttggttaaccaagttgaccaattaactatggtttttcttttttctttgtcaacgattaactatggttaacaaacttaacaacttgaagtagtctattatttttactaattaattacaataattaaagaggagagaaacattaaacaaacgggaagaaaacgcggagatccatgcggacaaagtgacggatgcgcagtggcgcgttggtccacgctctgatgagctttgctttccttcatcaatttatttttataaaaagtatttattcagacttcttagttagaacttaaacaaatacatgaatgaaatagagactgaaagaaagaagtttggtttatttcaatataataaaaatattttgttttattttagctttttgttacaacgagaaatgccccttaaattttccaaacaaattatgatatcatatattgtatggtttatcaagttgttcctagattgaattgcacaaattgtcgttttacatgttttacggatacaatctcggtggaaatcttatccgcaagcttttaccaaaaacttgaaattgtcacatagctgatcaactatgtataattgtgttcacatgaagaagattacacaaataaaacacaaggaactaattgcgttatttcttctttagcaaaatttgattatagttcacccatcacatcatgagcacctaagacttcgagctccagttgcaactatcattagatgaacaaaaggtgtaaatactctaaatttaacaaatgagataaaacagtattgtttcaaaattttgaactatataacttcctaaataataggagcgtttaataaataaactatgagaggcacaaagcaatacgacgataattaatgaattatatggaaagggatagactcaacaacggcggacaacctgtgacggcttcttgtgctatcgattgatcatcggcggagccattttaataattaatcaagaagccgtccattaactattaatcatattttaaaatgaacaactagttttataatcatattataattccaccaatcgctaatcctaattgcgttggacttttaagtttaatatttaacttataacattatagttttcttttgatgattgaacagtctgtaagtgttttgttttggtcttacgacagacagtataattatagtatacatgccgatcagaataaataattagtgtattacttaactattgtccgtatacagatggccaccaccgaactttaagcgaaggtgcaagtgtgtcatctgaccaaatgttttttttttctcttcttgttgttgttttggattgaaatatagataaaatttgagataaccacactacatagtggtttaagtgtgtcatgtaaaaattgatcgataatctcgacaagtataagaatatcacggattgatatccacatgcaaaaaaataagagttttctaagaaataacccgttgataatatttgtaaggacagcagaaaatttagattactttattcgaaagtaacttcagagtcaaagactgaaactcgaaatatggtagattgaaataacttcttgatctatgataaaccaatcacatttgaattagtttgacacgatcgaaagtatatgtaaagtaatatctttacatgctgtttccgttaattattcgcgtgtagcaggcttgcagcaggtttgagacaaataaatactttaataatcttaccactaaccagaatatataagcgttaatttcaatagggattagtttgatgatgatgataagagaaattttaaataagaccgtgaatgtggatattcattattagattagtaaactccacggacacaagcatcttaatcaaaccaacatttttggaatcttctcctcaacccagctgaagattttgtaaatataaaactgatgtgtttcttaaagatcaaacagacaactataacaagatattctcgttgttgttggtctttgatgtaactatactaattatgactatattgtactacgttacacacacagcctttaataatatgcttatatacattaacatgtaatattgacaaaaacatacagtataattgttttacgataaagattgacagtcatcctcaattaataagaccatgatagatggctcaatttgcactatgctggagtttgtgaaaatctgcaattacactttgggaatcgaaaccaataaaccctaatgtaaaagaacttggtttgtcttgtttattacgtaattaatctatttgtcaataacaagaccaaagtgtaagaaaattttactttcattatttcttcactaagaaaataacctgtggatgtaaaaaaacacatagcaaatgaatatatgaaaattcattgatgatattgcaaaaacaactaatttttaatagttaagtactatatttcacaaaaaaattgtaataaatttagaaggaaagataaacgtatattttgtttgaccaaaaagacagataaacatatattgtgtttgttttttgttcgttacgtgcaaagttggtctttataaataatttaagttaaatgatactatataatctggacgtgagagaataaattatatattagaccaaatacaataaggtttgctcctccacatgattctaccgactactagccttcatttgtcgttttccgcaaaataattaagattagtttttagtattctctgttaagattagttttgagttattaagaagacataatcagttgactcagaaaaaaaaaaaaaaaaaacaatttatctaattttctccttcttccttccttccattatttgcttattacttaattagagtcttggaccaatctttggaagtcggataccaaataattgattaatttcgtctgtatcatatttgaatgccgtacatgtaacctttcgaaatttttaagatagagatgaacatgaacaaaacttattttatactcgaacggataatatatttcaccgttcgcaatatttcgactcacacccaacgtattttagaaattagaggtttttggcaagagcaatcgaactctcatcaccttactattattttagtttcccttggcaactactcttgtttgggtcgccacactctccaacataaaatattagaaacttgtaaatgtccatatcaatccgcattccgaaaataaaatttaacaacacatatatacaagcactacaatgttttcaatttttttttttttgacagaaacactagatgatgtctctcacgccatatggttgtagattgcaaatgatgtctaatctagattttagttcgatttgagttcagatttttcggtttctgaatggtttaaattaacatggatgatttgatatggtttggtttcagtttgtattcaaatattttaaagttgaaatttagtttggacacaagcaaatgaaaatgaaggcccatatcaaggaaatgcagggcacaaagcacaaggcccaatggaaattattgtaattgcagtgctactgcactactggacattgtcacgcgtatctcgtcaataaagcatgtaccatcgccaaataatgctcaaatttttgtatatgttgttggatcaatataaccacagaaaggttgcaaaaaggagaaagaaaaaagttacttcttagttcttagggaatattatatatgtacgtatatgtaattaattatctactgtatcatgtagctctctaattaattggaagaggtcctagctaatttccctaatcactatacgaccccataccaaaaaaatacacacaaatccaccccccaaccaattaaaccatctatatttgatttaaatcaacttatccgtggcctccgatctaatgtgttcgattctccggcgtaaccttctccggtgatcgtgaattttccacagcccatgccctaatatgaccgccgagtatataccatgcgtcatcatcggtgctaatatattatccgtctgaaaatttgaataaattttgaattaatcaagcggtttggtttttcagcaaattattgcataccaaaccgaacaaaaacaaaaaccgaaccgagaatttacctgaacccattcaataccgagatagagggctaagagtccttcaaggagtggagagtaaatcttcttcatctgtctcttctcataccaagctgcacaaagcaaatgacaaagaggatttcatgagtaacagaacaaaccggtttatatttccttgttctctaagctattctattagtttatctttcatattctttctcaaaacaaatatgatcagaccaagaagagaacaagtacctgacaaaagcttcttaaaatcatctcgccgtgaccttaaaaccggggcaactatgtatgtcgggtctgaaaacgaaaacaagaatcagaaagaatgtaatcaactaagacactaggcaattaacagatcaagtacatgatcaaatcctaaccttttggagacgcagcaagaaagtagagagagcctgtgagagtcgcggtgattacagctgcaaagacttcagcaaatgggacaaatggaggaaacactccggtctagaggtaacaacaacaaacaatatcaagtctatgagaagatatgggagaatctaaacatagaataaatgtgaagggtagagattaaatttaccagagatgccatgcctctagaatctgtcatcaactgtgttcctttcaagaatatatcagacagagcaccctgtgagaatcagacattacaagagatcaatcagtgataactcaatcaaagattctatactttgcgaagttaaatgaaaccaaacctgtacagcaacacggtaaaagagctcttctcctattgaactggccgcgacaatgagtataaactggagaaaataactaaaacctcaaaaccaagattcaataccgataggtttcaaaaacaaagaagaaactaaaatgagcacctgccatggggacattccgaagaaaaagcttcttagttcttcatcttccacatctctaatggcccgagcatgcggtgatagcttcacaacttcatcctaaaacacagaaaaaatataattcttttaaaaccaattctaaagaaaccagaggaatcaaaagatgattaagagattatattggttacgtcgagtatgaagagaagagccatgattggtggtgttgcatagccaagtccagcaagtagtgcatcaagagaaggatcaaatccaccagatgaatcaattccagtcactgaacatataaatcttcctgctacagccattgctccatatattcctaatgattcaatcacacattttaacttttcatccacacaaaaattactaatgacaccacaaaggtaaaatttcaagtttcacatatcagaggagtgaaacagaagacatttaatgtaaatctactcaccgattccataagtaagtctaacgacggcgccgattttgtcccagatcggaaaatcaacggtggtggagttagcaaaaccacgatcaagtgtagtaacctccatggcagtaccagcaaatctgcctgctcctcctcctcctccgccaccgacggtgtctgttgtcttctcaatcccttcactgctccgttcagcggaagctataacgcttcgtgacctttctccaccattgaatctcaattttaaactccgtcttctctccggaaactcatagatactagttgaggaggaagaagaagaagagcataagcctgtccgtgaaaacgacgcggagctagcatacgagagtaacggaagctccattgaaggttattcgaagtaaccggaaactacaacacttattggtgatctctggccggtgaattctcagtgtgcttcgtcttcttcatttgctctgctaagtgcttgtgctttttgtttggttttgggttctttgaatttatacgagatctaaaactggagagataaggtttattctggtccgttggatttttatcgtacggttaggaggatatctggtttagatgaagcatatctctgcgaccaatatttatttgacacgtggagataacattggcgggatcagaaaatctgttcccaacggggtaactgccatctcataaactttttatttattatattatcttaagatattattaatataaagtttaattttaataattgtgaaatccagggaaaaagaatgacaatggttttcatttatgttgtattcaatttcttttgaatagattacccttttttgattcaatttctttttaatgttttgattttatttttgaatatatgtatactcgaaaaacagtaaaattaacactttaagcaatgatatttcgttaatattttaatctaaatcattatcttaaacaataattggcataagaagtaaatagaaaatgtgacaaagatatttaaattaaaaaataatatttttagattttcataaactttggtggttattttgactattttaaagttattttaggaatctctttattgaaagatacgtatgaaagtattttgaataactttgaaacttttttggtatgttatgtttacatatgggaaactaaaagccatgtatccatatttccctatatatacacttgaacgttgaccaaaaaatatatacatatgttaattttggtaaaacattaaaaacacaattaatatgaatagtttagatagtctttgactcgaattcgtttatttatactgaaaagtatcattgatataaactaggtaaactaaaaataacttagcaatggcattacgtctagctttaagtctatgtgtttatctgctgtttacacaaggtgcacagggaaacactgatgtgagacccttgcttatgcttgtttgttctatcctctaaagatttccattcttatatttagaatttttctctaatttgtgtgttcaaccaattttataggattttgattgtgtggaaatatacaaacaaccagctttccaacatccattgttgaaagatcacaagatccaggtaacgtagcatatatcgttgggcaaaatatttgagtttcgaaatctaatccgacctagaaattatctagattttttcatattagaattagatctcgcatattctatttattttataaaagtagagttcaaagtttatgtatgataagtaacttttgttatagtcaaggatgggtattcctaagaaacttttggatgaatatgttaatgttagtttataaatttataaaatgtgaataaaatagttgtggttaatcaaatatgaaaataggacttcgggagacatcaaaactgacgaatcttattcttcctttgttacttgtggtataatgtaggaaacattcagcctagatggaaaaattgaaagaagcaacaaatataatacaaaagagcattgtccaaaaggaaccgttgcaattttgagacaaagaaatgtatccaagggcgttcatttgaataccgccgagtattctggtcaacatgtatgtcttctcctaatcttggtttttgaaaggagttacaaaatttcatctagttgttaagacattctaataatctattcgttttacgtaaaattaaaggagaacatcaaaacatccgattgttattcatgcaaaatatatattatagatgaaaattaaactaacatattgatgaaatttgcagtttgcaacaattgagaccattttagatggaagtatatatcggggagcagaagctgatataagtattcatgatttgaaactgcaaaataaccaatacagtaaaagtcaaatatggttagagaatggacctccaggtcaactcaatagtatacaagctggtttggcagtaagtcagttctatcaaacttgctaaagattttgcgttccataatctgttttttttttaacatacataatcttttttatatttatttctgtttaggtacatccaagattgtacggtgatagtgtcacacgatttacaatatattggactgtgagtaatttttagctactcttattcttttaagaacattattaatcagcttagagtaaaaaaataaaataagagatcaaaacgtctttcattattttacatgtgtaacaaatattattatatgtagggagatggttatcagaaaactgggtgctataatacacaatgccctggctttgtggttgtaagtcgaaattcaagaattggaagcggattttggggaacatctgtctatggtaaaacaagtcttacgtttaaattgcaagtttttcaggtaaatttctgtttatcctttttaagaaaaagatttatataattagtttagactttagatgaacttatcatattacaccatacttgttggagtatttagttttcattttttcttttgttttatatgtattaggatggcttcagcggaaattgggcacttaaaatgtttgatgaagtcattggttattggcctaaagagttattttcacatttgaataatggagcttctctagtaagatatggaggaaatacttttgaatctcccgatggaatcagtcctccaatgggcaatgggttttttccagttgcggactttaaaaagacggcacattttaataacgtcgttgttataaactcggactataaaagagtttacattgaaggtaggaaaatacgactttatgtcgattcctataattgttttagggcgacatattggggttataccaaatctacaggagaagccttttcatttggaggaccaggtggaaattgtggtttttgatgatttgataatatatatatatatatatatatatatatcaaccaaattgtatcaaatttcaaataagaataaaatcatctaatctattcatattttcttactgaaaagtatgtaaataataaaacatgatcatcactaaaaccaaaactttacaagagaaggtggaaacatcatcaacgttttggtctgagactctgagtgataccaatggtatcataccataccaaacgaattatcatctctcattcaaatgggcctcatatttagacatgataaggcccattaataacaaattacaagcccaatttgttttactctctttcgttttcttcaatcgtatccataaaccctagtctcgtcgtcttcgtcgatcatcgccgggaaaccacaccagtctcaatggcgaaaactctatcccgatccaccgcctcatgcgtcgctaagcgtttcttttccacctccaatgccgtcgcctctccttctccgcttccttctcatctcatctctcgtcgattctcaccgacgatcttccacgccgtcggatacatcccagctttgacccgcttcacaacgatccggacccggatggataggtctggcggctcatattcgccgcttaaatccggatcaaacttcagcgatcgaccacccactgaaatggcacctctatttcctggttgcgattacgagcattggcttatcgtcatggagaagcccggaggtgaaaatgctcagaaacagcaaatgatcgattgctatgttcaaaccctagctaaaattgttggcaggtgagtgtctttgtcatgttcgttagtgttattcctcagctacttcactataacaaactgaatctgattgttgtttggtttaatagtgaggaagaggctagaaagaagatctataatgtttcgtgtgagaggtattttgggtttggctgtgagattgatgaggagacatcaaacaaactcgaaggtatctttttgtaacacttgttgtgtatgatactgtagcatagcacccgatgatgtgaatgtaattgatggaattgggtcttttgtgagtttcaggacttcctggtgttctgttcgtgcttccggactcttatgttgatccagagttcaaagattacggaggtaagtagtatcatcaactttgttctgcattttcttaatgtcctttgtcataatcataatcatcaagaacttgtctgatcaaagtctggtttgcatcactcttaagtaaacactgaaacttaactgcattttcaagcaaacaatattctgtgatgatgcatttgttcgtatgtatgaaagattgaacttgctaagggcttctctggtttatgtacataaaattttgttgattctatcagtttagcttataaactcattgctgaatgtttgttatgcaaatgtagctgaactgtttgtgaatggagaagtagttcctcgtccaccagagagacagaggaggatggtggagttaacgaatcaaagagggtcggataaaccaaagtaccatgaccgaatcagaaatgtccgacggagggagaacatgcgttgactcttattattctcagactttacgctagagcaatcatttcgatttgatctccgatgcttttttttgttggtttgttcttttaatttgctagactcttaatgaataatgtatatgatggtgttttggtgatatcgaatgtatcaattgtttctgcaactaattttcatctctccattaatctcaataattgtcaaaagattcaactcctgaccccaaccttcaagtaaaatagtattcgactcagcccgtgcctatgacataagaaaataaactttggcctacgacctttagcgaaaaaacaaagacactagcgctccagtgttgtccagatattatgttgatccagagtacaatgattatggaggtaagtggatcaacacggttctgcattttcataagtctgtgtattcattgatcatttctttgatgccatgtgtcataatccttggagaaaatttcggatcgaagtcttttttttggtaccatcttttgtagttctgtgagttgatctttttaggtgatatcaatatacaaattgtttctgcatctattgttaaatattatccaaaaaattcttcacttatcaatctttcttgtgaagaaacgaattaataatatgttattgatcattatttttgttcttagtaaaagtagagagacatttgctttaaaaacacccaaaaaatcatataaattgaactgagttcgtctgtagtatgtgtacaatgtaagcaaagataaaactaagtttgtgataaacaaaaacaaaggtaatcatcatcatcccaagattcccaacttttgacctattaaaatcccacagagaaaaaacccctataaatctttctttcttctaaaagctcctttagtgttttacgcatctattctgctgcgtctattccactgtaggctctgaagttttaagcttctttcaaaggtacagactaacctaaggaaacctgaataaacataatccgatttacttaatttaatgaatctgatggagagaaaaagagcacctagtaatcattccatcttggacttggcatggggaagaacccggatggagataacgggaacatgagccctggagaaggaggaggctgaggaggaccttgacttggacctgcaccgggtccaagacttccttgttgagcaatttgtgaaaatgagaagtttggggtaagtggttgaggatactgaactcctggtgacagcaatgggtaaggcgatctcggagagaacatattcgggtaaccggtaggagatggttgaagaaattgggatgtaggtgactgcagtggtccaaaaccgttatatcgaggagaaggaaatccaccatacatctgactgaacatgggagagggctgagtaggcgtcacaggtacaggagcattgaaccgaggagaaggaagattatgaggcactgggctaggaactaacccgggtggtggtagatactggttaggttgaagagggccctgcatgttcattcgaggttgcggtccaggcatcatatgttgctgaggttgaggttgaggttgaggttgagactgagactgagattgagctggcatatatgaccgctgctcatgacctgggatatatggccgctgctcattacctggcatatatggctgctgctcattacctggcacatatggccgttgctcatgacctgggatataaggccgctgctcatgacctggctgcatttggttagcattgggtcctgaatctccaagtgaactttgaagataacgcatatactctgagacgggagactcagctgtattagaccaaaactggtccctgtgacccatcattggttgttgtgtggtttgtgggaaaggtggctggtgtggaggctgtctagcaaactgaggatgagactgtggcggagccatggaagggagaggaaccgcaggccggtttaactgcgttaagggggatggtctgatccgctgcaaccgtgtattctgaggccttagcgagttgttctgaggaggccgaggaaggctttcacgtgatggagaacccgttagctgctgaacaatacttctaaagtcgttcttgcttatgttataaacctgaggctgtgtttgaagccttggagcggcaccgttgctagtactggcagcgaaagtcgattgatgaagaggactctttctgatatttttcccaatcctattcacacccaaatgatcattttgtctaggcctatccatctccacaaaaatccaatacctatagtaaaaacctcactaccaatctaaaaaaccaaccaacagacccaacaccaaatatgacccaagaattatcctaaatcaaccaaaacccaatgagaaactactgtctagtaattacctaatcaaacaaaatattcaccaaagagaaactaaaactaatcattacccaactaatgagtccagaaacgaatcaaaattcagctgaaagtgcctagcttaagtaagtagatcctcagttcttaagctactttatcctcccctgaacccaaaaacccacgatactaagctcagaaactcgatcaaaacactaaagcagaattacaattcttacactatcaattctctgtatatattaccagaccagccagagaagaaaaaaaaagcgattaagatggagcaaaagttcaggtctttcacctgagaatttggatcctagctaacccagaagagcccagagccagatctttaaatttccccaagtaatacgatccaaagaagagaattgaagtgaaccctaattgtgtcaacgaagaagaaaggagacgaaacaagattccacatttttttgtttgcgtctttttcttatttatatttaattcgtgtttttgccagactggagtgatgtatgctgacgtgttcctatcatcacactccttacatacatttgcccagctgtttttaaagtttgtaataagaaaatttcaatagaaaatggaaaaattagtatatattataggaaaaaatacataagaaagatagaaatcttgtttttacatgctaatagagcatttgtaggaaactcctgaattagaaaagtatctatagatacacctttttataaagaaaaaaatcctctcataataagtactataatgaggaaaccatatcctttttttcttcttcaaagtaatatttttttttttagaattacaataaacttacttattatataaaaaaatactagatatttttctcacctattttcgaaaaccatatgttagattcacttctttttcactttcaatttgatttgaaaaatttgaatatccgtaacttgacgaaacaaaacaaactgaaaaaattagcatctgttaaaaaaaagagaaaatcataaatttaaaaatttgatagatgaatatccgcttaactctcgtgtatatatatatatatatatagattattacatatataaaatttatgaaattatattcatcaaattaattttaaaataaaagttaaataaattaaaattgtttttgattttttatgtttaaaagtaaaatataaattcttacggaatagatctgatatctcgataaaatatggatattcgaatattgaatatccgattagttgcaaaacatattcatatattaaagtgatggtcttgacaaagcagatcacgaataccaccaaaattcatgaattctactatgtatctacccattacttacacacaaaatttgataaacggtgtttacagtttgaaaaaaacatttgattcgctataacctaagagaaaagaagaaatttagagagaaataaactctttgttgttgattaaataaaaagaaatcgaaatactatcaatcaatctataaactttgttagctgacaaaaaaaaatcgatgataatttttagatctctcgttctcatctttttttgttcgtttgtctctaagcgcatatcatgctttcctatttatagaagaaccacgccttttagtcttttaccctaatcaccgttggattaagagttagatattcaatttcttttaaggtaagattacatgcaaaatttgaggataactgtatgaacaacaaagattgacgacgattttatccaataaaatctgcgttaatcttatccattatcatttaaataatcatttcatttcttttcttcaatttattgggtttattgaatttataatggatttggtctaatcaatattaataataaaattatactacataaatacatatttcaacaaacaaaaaagagaaaaagaaaacaattatatatctttctttaggtgatgaaaaaacttttttatagtacctaccattataattatagttgcacagttttataaattatgttttgttttatctgcacaaaaaaaaataaaaacagatgttagaaataaaaaatgaatggggtgagagaggctcgaactctcgacctcaggatcactcagtagctatgagacctacgcgctagccaactgcgccaccaccccaattgctaattgatttatatttaacgtttatatctttatcgtactgttgacaagaagtcatgtttagggagttgaatcagagtgctaaggcacgtgcatatgagtcttgtgaagattggtccttgtaccagaattataatggattgcatatcctataaatagaggtcgtaattcgtaaataaatcatacgctgcgtgatcattgttgtgtaacgaggactagatgtttactctataattggggataaaaattagggtttgtgtactctgttcttatcacttgcgtgtatgtatctattgccggttttaggtttttcaattttatatgttaagggttctattggttcttacttaaatgcattacacttaatggtattgaaactgatgaaaaagctaaacgtttattatagaaaatctgtgtttgttattttctgcgttgaatgttaatgctaaaacgtatatatactattgtgcatggatgagaacaaaaaggttcatgaggcagcattagtctcatgatttgtgtatgaaacaacaagaaatgcaatgcacgtatagggagaagaaacggctgggagatgaagcagagtttaagggttatgattcttattaacataagtgtcacacacggagagattggaaagcagaagctagattctagaaagatgaaaaattgaacccttttcaagaaattttcatgaactctatagggattcacatgatcttataaggataaacatctaagggcaaactctcatggactcgagttagaaacttcaggtcagttcttatatatataatcttcattaggaaaatgaattcatatatatgaactttcacagattttcattttgtcatgtcggatccagaaaatccgtaaacttatcgatgtcttaaaattttctggttggatccttatgacttgaaaacaacagaacatgttcacaacaacaacaagaacattgggagaaacctagcaaaaggatctgtcttattcctttattgtctcttcaattcttagctgatctttgtgtttctttagatcctcaaaactccaatcccttctgatcccactgcttctgaccagcttgggctcgtccagttccccatagaccatgatgtccgcactgtaaagcctgcgatgacccttattgacccgtctcactacgggcaacgatgatctgttccttaccatcttttcaaacgctgacgttgcgaagttttctttaaagcttgaatctttacggcttcccatgtctctgtccgagtctgttctttgcaagatgtggcaagcgaggcagttcaggctcatagtttctggttcttacggaaaccgttatcgaaattgagatattttttaaagggggttatcttctgagtttgatttgcttaaattgataagaaaaggggaattaaacctctacttcaggctgtggtatcacaaagagagctcaaatctcaaatgacaaccttttggggatgttccttttagggttctctggttgtttgtttgacaagaaatcagaatttgagtacaaaatgaaaacgtatattaatgggttttgattgttttcttgttgaggaattaggggataaaaaactaaggtctcctttttttggccaataaagaaagagagatgacaacaaataggacctctttgggtcgcactttacttattattagtgtttgtgataaaaaaaagagttcttataatagatgtttttgttaggttattctattttaaaggacaactcatcattttgagggctaatgttagactataatcctagtttaccaaaacaaaagaagatacatgaaatgggtgtatgttttctaattattgcagactagtagtagcttctaaaattttgatattcttaagagattcaactatttttcgacaaaaaaaaaaaagagattcaactatttaaaacaaaaacagcacattaaaatttatcatgatgctcaagtaattttggacttgaggctccttcacctcttcaaacatggctccacaacacatatgttagcttgtttctctctatggaaggtatcaactatgcgagtgaaaatttgaactaatgatgcgatgaattcatatcgagttcatagatacatttagagtatgtcagtatgtggaaagccgtaacgtacaaagaacttgaccacattgtgccttgactagagaatttccctcttttttcgttttggctattcatttctaaatggggaataatttaaatgaccctgtttacaaagcatggatatcaacggtgcatatacaagatgattaaatagaggttatgtactgtttgttgagctttgggatgatcgatattcacttagtatagcagattgctcacaattttctgtgttcaaatagtttggaatggttcacaggatgtatatgagtaaagtccgatgcatctaactatctaagacaataaacgtcgaaatgcacacaacatatttttatttgacaatttttacaaagtaacaaaaaataatctcaattatacaaaatattggtaactttcaattaaacaaaacagagtttccctagtaaaagaataggataactgcttttgtaaatggaaattagagtaagaaaaaataaaataaaaaagttttgatggactttagagaaaattatgaacatttcaaacccataagctggaagcaacagagccaagcttcttctttgtctcctctgccatgttcttcaatgatgatatgtcttgttgtgcctaacacatttataagacgtcttaatgatgacaaaactaattgttgttatttgtagtagaaaaataagcatgatcagtattgaaatgagacctggagagataggcggttgagaagatcacccgcagtgagatcaagagggaaatctccatcaccgtctccaaacagatcagcactagagattgctgatgaaccctgtttttgaaaatgtaacttaaggcaacaggaaacacaagtattaagtagttaaggttaactaagaggaaacttacagaaaacttcttcaatgaacttttggcctcaagatcagcagagttgttgtcatttccaaagtactgagcagaggatattgatttggcgtttgtgaatttcttccgtgcttcgtctgtttcttgaatctggtaaatactagagacgatgagtacaaaaagaatctactcaaatcttacaacagtttagatatttagtacaaaagagtgaaactcacttgcagttttgaggaacttgtgattggtttcttctgaaacctgcctccgttcatctccaactcttcctcaaagaagcctgatgattttggtggagctacatgactaacgacttgagggctcatgtaatcttccctgttttgaacattgtccgcataatcaaaacgagaggaaaacgatgacctggctgatttagctgaaactggtgatgtcgcttgtataataacagattcctctggcttttgatcataaagagtcccactcgactgcaagaggaaaaaatgtgagctctcattacaaattctataaagaggaaagaacattactgaccttagtagttagcttccgggcgccaagtccgccagttttgcctgtcttcttagcaccaagaggtttcttaacgctgcgagaaattcttggtgagacgggaacaacatcaggcttttcttgctgctttagagtattactctctttaagagcttcactggttttgatgctggagagtccattaggcacttgtgttgaatcaggaggagatggaggcaaatccaattcttcctcagccttgcttttagcaacttctttagcaagtatctgtttatacaaatcagcagctcttgaggtatacttagcctcggttttacctccatcgctccatccgtactgtttgaaaaagacttgtgccctgttgtttcctccatatatcatcattttcaattgctctgagctccatgaatctaaattggttgacctaaaaacaaaaaatgaagatcaacacaatttcttggctaaaaagcagattctctaaaccctagattattaggaaatgtctctataatagaatcagaagatgaaaatgaatgaatgaatcaaatgacctgacgaagctaatgtggacgccaagactccgatgaacagctgagcaatcgatgcagagaaagatcccgtaagtaacggaagcccatgttgggttcttcgcattgcaatcaaaacaaatctgcaaaaaatattcaaagataaatcctaaatctgtcagatctgatcgacgaacttcgagatcttaatcgaatctatagattctgtagaacatcgttaacattaccttattatctgatttggctttgagtttcttaaaaacagagatcttgtcattcagattctcagacgccattgtagggatgtgaaacaatattctccagaaatgaaaattccggagatgtgaaattttcgaatcgagaggagaagaaaaaaaagaaagagaataaaaattcgaaaacaacgcaagaaatcgaggggtttataaatgaggttgcttaagatccagccgtaaggtgaggttggtatatgaactgactattataacctttttactcttctctcgcgcgttttattttgtaacggtaacgagaggtggttagtttattacccaacgacccagttttacatttaccccaactacgagaggtaattttctttcctccgtaattaacccttttgtatctggttattggttttgacgtcatttacgttccatattaagatggattatttcatgtaatcaagtaattattgtactgaatttatttaacttctgtttcttcttttttactataatcaaatcatatgaagaaaactaattagcatattctgtgcgtaccatcggtagaaagaaaactaattagcatatgtctaataatctcctatatgaagagcttatatagataaaagcaaattcgattgtatttatcttttgttaacgaaaaatatataatttatttcttaatgtataagaaccagtttaaattatacctctattgatttgggtttgtttgtcaatgtattgactaaagtcaaaattaggaacaccaaacacatgagttagtttgggagtggccaacaatgtaaaatatccgttaaagttgatgtacaagagaccaagaaaataagattggtatcgttgagattaatgtactcttgtcaaaatgtagccatagctcttctatattcttagttttgtatgatatggattaaaatattatattgggtcgatttaagaagaatcaaaaggttgagggaattattttgaagaaagtggagaagtgaagggtaatgaatttggtgatgatgacaatggagagaaggtgcaaccgtgtgcgtaggtttgtcgccactctttgtcggctctgttctctatctgcttaacaagccctcacatttccctatttccacgttcttctttaggatatggagacggcttcactcacgtgtttggtagggcttccacgcacatgtatccatgttacttcttcccattttcttaaaaatatattttaaaagccatgaaacttttttacttctcgataattgagattttgtactttgtagtttaaaacatcactatgagtatgttgtgttctatttttttcttctgaagactgaagatttgttacatttggaatataaaaattttcttgtgaagactgaagagttttacattgattgaaatataaagttcttgaaggaataaacggttaggtttctaataactaacaatgattattttcaacattcaactgaatttagatgagtttaaaattccctgatcaaaataacaaaaggaggttgatggtactacaaataagttgcacctattttcgtaatcttaagtttgtcgtaagtactatgtcgataacagaaaattatcggcatgaaccaaaattgtaaagagcaacatgaacatcaacgaatttatcaggttcatccgatttttatgtataagtgtaacatcaacattttcattatgaaaagaaaacattaatcaacttttacgtaaaacaaaaggaaaaaaaaaaacagaacacacgactagaataaaactaaaagttaacctctgtacaatggagatctttgttgaaaaatcatcttggagactcttgattgtctgaaaaccttaatcggacttggaaagtaccaaccatttcccttactagtcaccggcgtcggtgagaatagaacttctccggcaacggaattcgacttcttcataaccttagcagcctttattttcgtctcttcttctctgtttcctctgaacaatctccatagccaacgtccacgacccggtttaagatccttctcagtttctaatatcggttccggtttagcagaccagaaataaggacccgtaatcgatgtcgacctccgaaacgccggttcgcattcaatcaagttggcaacacggccaaccgacccaatacgggcgaacgaaacgtcaccttctccacgggaagacacggaggcgcgtggagtacacgaacagggaagatcgtgagcacaatcgggacagagagaggagaggcgttcgtggaggcaataaggacaaacaccggcaacgcagacaaaacgaccttcgtgtcttgagcatttctgccaaacgctgcctcctccttcgtccaaacgcaaattcgtttgagttttctcgcgttgcattttcttgtctctgaatctcagttgcttgttgtgaaggagagagagatggagagataaaggttttaatattggagtaatcaaataaagattaatccactaataagccccactctgcttaagtcttaaccataaccgtagttagtcaaactaactaaagcttaactcatcagctccgaattatatgccttgattatcgatccctcgcatatcctttgtagatttacgactcactattacgtggttaatttagtaattgtagttaaaactttcaaatttttatctaaactcactgatatatattaaaatttcccacactacacatttttttttgttacatcaattaaaaattttcttattagaaactctaaaaacatcattgttgttacatgaaactatgatacagattagtgcaatttgtagattcggcagcttgtaaaatcgtattgtttttttggtcattgtttgtaaagactttttggtctgtttaccgtaatttttttcgctgataatgagagtgaagtcatatactaatatatatcggatatgatacaactcagttacaactttgaaccagtgaaacaagtttttattaccagaacatgaaacagagaagacgttttaaaaatacacgtacatatgatagaacacaaaagagtcatccttatacaaacacatgagctaaaaaagatggttttgatcctgggtttttaacgaaagggaatttgattcctgtgactgctcaaatgtgcagcagccaagagccatgtgaatcgaaactggttactttctcaagtgaggcggtttcatctacaacaacatgactaaggggaggatcaagatgtgtatgggacaaaaaagtgtgcaacgtaccagtattttgaatggtgtgaaaatgagatatttttttttcagtaatggttccagagcagacgtctgttcatggctggtggagctaggcccacacccggtatgtcgcgaatgtctttgttgtttgggttcacaatctatacaaaagaaataaaaagaagaagttacatgtatgataatgtgaacaagataacagcgttggaaggaaagatattgcagatgaatctagaagtgagatcaaattaacaatcacataggagacaactttatatattgcataactgaataatggagaaagacaaaattgtgggtatttgtgctttttataggttcttcgatcaacaaggtatccagcaaagtaaaaaacataacctcatattattcaagaaaaaataatgatgaacaccgaaatctatttaactcaaacaagtatccaagtgtgtgtgcacatttgaataagaaaggagatgagatgtaccttgacgatgatgattgctatgacaccaatgacgataaggaaaagaaatgccataatacatttgtcagtggcaacctgataaaagaaggacagagagtaagtgaaagggacaagaaggagctgcagataacaagtaatgatgatataaagaagaaataaggagatttatgagactaacctgcctaccaatttccttgaccagcttggaggctttcttgagtgagaaatgaatagaatcgagctcattgacaactctactcatttgctcggtctgaacaaggaaaatgtaaactatcttaataattctcagaattcacacacaaatacacaatcttggaaaaaaatgagattcaggtagaagcaggactgtttggaaagaaacaagtgtgggctaactacacacctgagccttgagagctgctgaagtatctgttcccacatttatagtttcttgtacaatctgttgtcacagacacaaaaaaagcagtgagattttgctttagtgaagatggaaaaatggacacaagttatcacatggcattcacggctccatgaacattagactgaaatttcaagagacaataagacattcatataatctgaaaacggacctttttccctctctcaatagcttgatctgtgtcatccatcattgagtttcctttatccattaactcttgattggacatgtctgagagttattaagtttccagtaaatactctagttaggttgtatgtaatcatataacaacaaagtgcaataaatatctatctcattgttagttggtcgcaaaatacgagatttaaagacttacttgaagctaataagacattttcttccatgtgttcttctccaggtccatcgaaaagatctactcgcttgttattgcttgctaggtttgatgagtatctgtataaccatcctcattatcatcaatcaccataaatatgagcatcagttaagcaattagcaaaagtgtgacctacttcttcttaagagcaacatatgagttgagttccttaaccatagattgtcgtctatcgttcaacatccggttagtgctggcatcattaccgctttccaagcttttgatttccctatcgaaatctttaataaggctgcaaagaagaagaacaaggcatcatcatcatcatcattggataatcaaacaccagattcaatgaatgtatacctcttacagtcacgcattttgtcagtgagttcttccagctgcctactctgcctattagcatctttgatcttctccagcttctggaatccatttctgtagaaaacaaaaacatcaaaacattattatatagacacaaataccaaatcacaaatggagagaaaacgctagagagagattcattctcacgataaagcacggaagatgtcattgatttgtccttcgatctcagccagctcttcgctaaccgctgatattggatccatctttacacagattcccagaaaaattcagtgccgatatacaaaagacaacaatgtctcttcttcagatccacgcgagcagtttttgaaaaatgtcgaccacgaatcgactcgccgagattagatccgatggatctgaaatcgaatcacctccaacgaaaagaattgaaagcctggtgtcaaaatcgccgagcaaatcgtaataacagaacccgtgttttttttcttcagatctaagaacaatgtggatgttcaaaatcgataacgaagagatagatatcaaaatcacgagcacgagctctctctcccctacacccagattttatttgttttgtttttccctaatttctctcggacattttttgtttttgttcttggggaattctaaaagctaattttttgccattgatttggctcgaagggacgaaaatgagagattttgaaaaactgcgttaccgaaaaccagtgggacccgccacgacatcgtttgtcagtgttggaactcatataacctgggacgtacgattggtcacctctccagatctgacgatccacactctttacattagcttaattttgataattgactttaaatgaaattaaaataaagagcacatcataataattaattcgaaaacgaaacaaaactttcagtccttcattaaattagaatcgtttatttattatacaaaccggtaaatgcaaaaatcgaaatccaaactaaatttgaaaataagaaaaattaggacaaagaaaaaaaaaaagtgtacttaagaaaaaccgaattcaactaattaagggaagtgtataatgtcatctagcttggcccaaataaaaacggcctaaatccttgcttttagttcattcaaataaatgcttcatagcatgagatgttgtctgctgtgtgaatcataagatccctcttttgatttcagattttcagcccattttacattgtttctgaatctgttgaaatgttgtctgttaagggaccagatatggtgccagtcttaggaagcaaatcaagaagatggaagtgagtcagcacagcaaatacttctgctagttctgtggcaagtatgctgttaaacggaaggctgttggaatttggggatgtaaggactgtgggaaagttaaggctggaggtgcctacacgatgaatactgctagtgctgtaactgttaggagtaccatcagaaggctcagagaacaaactgagagctagacttcttctactcatacacaacttttcaagaccagattcatcttttgttataagactgatataccagattcttctaattgtttaatcaagatagggatttttggctacatgtatgtcagttgcattctatgaagcagacccaatttttttcttgttgatatacaaagatcatctctagtttattatctacagtttcaaactagctttgctcataaaggaacaagaaaacctgttaaggaagatctcttctaacctatgctcaacaattggtttcaagatcgccatcattcctgtgaaaggtctgggattggacagccttcacggctgctactctagctgcattcgctgctctatttgcagccatcaccgctctcttgatcctctcttccactttcacaacttcatgtgctttctcagctgctttccttgcttgctgaaggagaaagagagaacaagcttagtttaatacatatatggtgtttgcagtactaaagataaactactagttaacttttacctcaacagcatcaacaactttggaatggcttatggtaaaagatgatccaggacggatagtctgctcggtaggacaactgagtacaccgtcttcccaatgaccggcttgtgtatcaccattcctgaaagtatacataccaagcccttgccttcttccctcgtgccaagctccttcatacttatgcccgttcgcaaagtgatacactccaaaaccatgcatcttgtctgcaaaatactccccagcatacgcatcaccatttctgcaacagcagcataactccaagttaaatgtagttttaaagccatggtaccgctaaagcatactggaccaccagtgcttcatgcaattgcttaagatcaatgctaactgagagtaacacaaaagcctaaactttgatgttcactagactagcttataaggtgaggataaccacaagaagcaggaaacaaaacccagttatccatctgatgtcagaaatcgaaattgaaaacctttcagaggtcctccagattcacacacccaagtgaacaagggcaacaataaagagaaagacaactacacgacccttcaaaaacaatggaactcaagatagcaaacacacttagacgagcaacatatacagggatctaatgcaccaccattacaggtcaaagcacaaccatattccagaaactcaaatgactatgcagagtaaaaaagaacaatgctgacctgaaatggtaactaccaaggccatgtttgacaccccacttgaactctccgtcatatctacttccatcctcagaggtatatacaccacaaccatggcactgcccattagaccattcaccagcatacacatctcctgtataaaacgtataaactccaattccatgtcttagacctaacctatattgacctcgatacctactccctttagaccatgtttctactccataaccatcatatttcccatcaatccactctccttcgtatttgcctttcatagaatagtaataaactccacttcctgaacactttcctctatgaaactctccttcatacatatcattagtgccatacttctgaacccaagatcctgaatttgtcttattattctccgcaactggcttcgacccaatggaccaaacaactcggtcagtgctcggctgagaggaagagaatctggcagggataaatgtcagcaagcgtgcgacaaaaagacgaattgatgttaagtgaggaagagcgaatctgagagagatcgagaggatgaaggataaagcgataatcacaaagactagacgaaggaagatacgaagattgataacaaggaagaagatgtataaaggagggacagcgagaagaagcaagaaacgaagatggaaacaaatcaaacgggctctaagggtatagcgtagaagcttcctcaagaaccgagcaatcacaggacgataggaagaaagagaagacaaaagatttgatgggaaaaatgaagaaatcgatcctgatcgtgcccgtgcgcttcttcgtcggaaatggtcaacaccggttgggatatcaaccgtgtgatgatgattctgaccttggggatgattatacttagtgaagccagagcctttattatcaatggcggttcgatttttattctgggtctgatgatgatgatgaatcggattggggatttggtttggatcggaatcgtctttcccgattaatcgtcgttctgttacagatgatttcttcagatgcatttacataaagagtatggaacttggaaagaggatttggggagaaatggtaggggatttagggttgttgaaaattagggttttttccaaatcaaagcctctggtttttgttcctaaaacagtttccaagttttcgcgaagaagaagaagaaggaagaagaagagaagagctcaattttgaacttttgaaactaaggtaagagatccacgtgagaacacaataaacacctcttagtttcagttatttactaaaatgccatccatttgccacttgttgacccagtccttgatgacaatttttacttaatgattaaacaaattattaagagagcttattctctaagattccaaaattgtgtgtatctctaattgcaaaaacttcaggtgattttaaagtaatggtgttttattatatggtgtatttatttttctctatttaatttatttggtggtttggttgttaattaccaaccaataattgtttgtatgtttattttagtgagttataattacaattgcgagctaacctccaaaacataaaatccagtgaacccggttagaattttgtaaagcctttcatcaaaaaacaaaacacacatcaatatttttaagaagtggtttgagattggacaagactactttcagataaagacaagtttaaggtcataaaagcaatatccaatcactaattttcttaatctatttacaaaaacccataattaatttaacaatagtaaaaaaaaaaaaaaaaaaactcttgtaatctaacctaaaactagtaaaaagacatttgtacatgaaattaaacagctagtcaaaaatcctgagatatggctgatataaacgatagatggtcatggaaaattagagactaccataaggccaaagcagtctaatcaccaagaatatctcaatggagggataagttatagcttttttaacatttgttatccaaaaatttcatggccacccatactatatatacacatcatgatcctatctatgtacacaattgttatctctatcctaattcaagagtaatctttatggatcttcaaaacctttatgtactttaaaagctaaaaaacaatgtgaaataaatagttttggaatcaacaataaagaataatgaaaagtgacatagtggatcccatagctataaattaagtaatagtaacagtaatatcttccttttcccaatttcaaatcaaaccaaatcagcgactgagatttggacaaacaaacaaagaagctagctacttctttggtgcttagtaatcactaagacaacatcagtatgatcaagtttgaattcggttcagacagatagtgaactcatgtaatttacttggcttctggggtttcaggtgtcatcataagtaacaaatcttgtagatgcaagaaaaacacacacacacaaaagaacccatagttgcaataacgcaacaaagtgtatgaaaataactatgaaatacttggattatggtgaggttcagtgaataacataataatgaaacaatgcagctaaaacatgacaacactaattgacaccaattatgtcatacaatgtgttgaaaatttggctaaagctgtcttctaatttgcttattcagacagaactgaacatcaagggggaaaatgaagaagaatacaagtgctaacaacagcttattagtagagcctaccactacactcagcggaaccacaatagcaaaatttcttcttgatattaccattagagtcgtatacctgatcgatcttataattgtagtcgtacgagagttcctgaagtggaggtatattgtccagtgcaaagaacataatgtgaggtattcttatttcctcatggtcgtacaatacgtcctgtgcgtacagattcggcgagcagctatggtttataaacctccctatgttccctttctgtgctgcgtttatggtgaacggatcatcctcgtccccgagatcaaaaagatactcatctttcccggtaaggctttcagcttgtttatcctctagaagctctcctgcgtactcacagatgaagctcccgataggaatagattccagcgatctcactccccaacctcttgactccgttttgaagatctccagcttgatcttgatcccgtgctgtgagactctcatgttgcaagaaggtgggcatttgcagtgtgggccacactcatagaccaggggcttaatttcaacaatggctccatcgtaataaggtatctttccaccgtttttcacaatgcaggcacagttttttgacttggagcagccgtttgtgcaaccgcagctctttggaggaattggccggcaccaatccggatatatcattttagccgtgtagataaacggtggcggtttctcatcgtctaaattgttcacagcgcatatgggtaatgtctctttcccttctgtgatatcaacattgcaaagaccatcccggaactcagattttttcgatttcgcaacctctttccagggaagctcgggttgtccaggaatacgccgtagtttgaacttgaagacgagtttaccgtgagacccggtttcttcccagtactcttccaccagatacaatccatcgtaaacataattctttgcaacaactgatgattgtaatgtcgtatttttgatgcctcttatgacccgcacagggttctttttgtttatactgtttttcaacgcaaggtttcccgttacaagctgctggtctttgggtggttcattatttttctttttccccacatttccgccttgacccgtgtagatcaagacatcagagttatcaagcacgtcattataacctcccgaggatacaatactcgtggcaactagttccccaccgtcatctttcatatagtcgataccactttgacttggtctatgtataccaagaaggttcagctccattctatattgaaattcatcgccaacctcaacaccaggcacagttccaataatctgagtaccactataaagatttttccctttactcttgagaattttcgaagcctcgcaaaccactttgaaattgccaccatctcttttcctaggccttgcttcttcctcttgcataatttttttacaagtttcatggaaaagacgcattgtttccttaactttataccgagcactatccccactgcttgagcaactaggaagcccaccatttgataaccgaaatttactagctaatctctttttatccagggcaaccctctcactattcttcctcatagatccttcaccataatctccattcctcttctcggaaggcttcactggtgaaggcattacaacccctttgtctgtaattatccaaacctctgatttctcaagttccaaaacctctggtgatggacccaaatggtctccagaatctgacttctccagaaccaagttttcctcttccaccgatatagaacgtttagcggtctttccattctttgaaaacttgctccccatatttggagataagtctctcccaacagagatcgttcttccgtgaagctcctttgttccagtgatgcttttcctgcaaacagaccccatcatatcttcctctggcaggcttatgcttggaggatggacctccaccatattttgctcacttgtgttctctggcatattcctatctttcataggttcttgcatgttaactccaagagattcagctccttcggttaacccaaccgacatgtcattacaatcaaccgacttaaagctatctctttctgcaacaatttctccaggaatcaactcaacatcagcttgagaagagagaacacaaacatcagaaacattcctggtctcgtaagtctcaactgtgaactccttctgcattcttctcgatctgagctgcctggtaatcgatccaaaatcaggtgaaaactcactttccgcagcaaccttaaaccgcttggacttcctccgccccataggatcggtgtaactaccatttattgctagttcatccttagaacaaggaataccaccgccatcaccaccgcgcaaggaactaagtattgatgactctgaatgtaccatgatgcccaacgcctactcaatgtaatacaagaatatgaactaaaaacaccatcctagtaagttacaacaaagcatattaattaaaaaacaccatcctagattcctagtagttacaagaacgcgtattgattagaaaagattgcaatcaattaaattgaatatctttggcaatgcatgttatgatgatctaagttcatcatcacaattaaccaacaaaagaagacatgcagatcttcaaaacccatgatacagttttgagtaacatgtgaacgaatcagtacgcattaatccatgaatcataagaaatccttatccacattttccagaaacagactccaaatctcgaaattatcaacttttaaaattgttaatcaatcgagagatggaagcgattgataagatcaatttcgagtctacaagtaacaaaaaataaaagaatgaagaatagagaagaagggtacaaagatttaccagaaatgaaggaaggagtagtgataatggcggagatgacgagtcgattggccggagcgggagatatgtgagtcgcctactcaaattgggttaatttggcattgtcctgcaaaacaaaactaaacaatcaattttaattaaattctgttttctcttttcaaggattcaatttttaataactcagtcaaataagtcactcacataattcttatgaacagagtcctagcatgcatctttggctctggctctataacttcttcaattcctattttatacaagttcatcaagattaatttatattgatgatgatttagggttttagtggatctcttttttttttttttttgttgatcaaagcttttttagtggatctatgaatgtttttttttggaaatataatctttgaaaatattataaatctagagatttggtagttttattaagtaatattttttggaaaagtaatatttgaaaatattctaaaaatcttctattcttttcttttagaagtttctaaataatgatctccagaataatataggaaaacaaaagtttaagtatatgtgattcaatgttgcatgatctagggttttaatgaatactatttttattaaaaaacaacttttgaaaatatcataaatctttagatttttctccggattaatttatgtttggttttctcgacattatttctaacattatttattttctatctttttaatcgttttgtttgttttacgttatcacccgttcggcttctatatcaaaaaagttcgatatactattttctattataatcgtttaaccttaaatgaagaacatattacgctaaaaataaatcataaaatctgaataaatcatagtgagttgatgcatttttcattctattttttcgtacttatattatattaatttagtaatttctcatttaactaacaaataaaatccttatttttgtccttttccataatttctgtaatcaaaatctaaaaagagataaaataataagataaaagcaaaaagaacttataaagtagtagaagaaaaacaatttaaaaagagatttgtattggttgacattataatgtgataaattaattcatgcgtcgacaaaacaaagaaaaaggaagataattctcgctctactgtattcacaaccaccatcaacagtaactccagattattatgcagctcctattgctcttctctctctggtcttcttcttcttcttcctcctccagttttctctgcaatcctcactttctctctctccccatctctctaaatgcagctacttctctttcatcactgctgattctccgtcttagctcccatttctccatgaagttctcgcagctactccgacgaattgtgctgtcggtgagtttttcgcgccttcgagaatcttcgctggattatctcaaagttgatttctttaggcttcttacatgatgttagattctgggttcgtttatgttttcttccttcttttgaggcgttgcgtatcatcttgttttccgattgtaatttgaaaatttcaaggtaattctataggttacttgacttgtagggttcataaacgaagtttgggatgatttttctcttataaagaatcaaagatgccatttttaagtttatatcatcagttcaagtgttgtaatttaggaagctgaagtctcttctatctcttgttttgcgttgtgacagaggtgaaaaaggtacggtggtgttatctttaataagtagcattgtaaaaggagatgaatttgggagcttggggtcagagattcatccaagcagcagcttcttctgaatcggaggattctgctttggatttggagagaaatcatcactgcaatcacttgagtcttccatcatcttcaagtccatctcctcttcagccattcacactcaacatccaacatgctgagagcaatgccccttacttctcctggcctacgctcagcaggcttaacgacactgttgaagaccgagctaactactttggtaatctccagaaaggggttttaccagaaactgttggcaggttgccatcaggacaacaagccactactttgcttgagctcatgaccatcagagcgtttcatagtaaaatcctgcgccgcttcagccttggtactgcggttgggtttcggatcagccgtggtgttctaacgaatgttccagcgatacttgtctttgttgctaggaaagtccataggcaatggctaaatccaatgcagtgccttccttctgcccttgaggtggagttatcttgtgttctattcccttctacacatagcctttcagaaattttatcggagcatatatgataagcgatgtgttcatttcataatagggtcctggaggggtatggtgcgatgtagatgttgtggaattccaatactacggtgctcctgctgcaacaccaaaggaacaagtttataatgaacttgtagatggtttgagaggaagtgatccctgcattggctctggttctcaggtacatcgttgttttttccttccatcttctgcaacctataagcgtaaagtctcagttttgtttcatgttgtgtaggttgcaagccaagaaacatatggaaccttgggagctatagtgaaaagcagaacaggtaaccaccaggttggtttccttaccaatcggcatgtcgcagttgatttggattatccaagccagaaaatgtttcatcctttacctccaagccttggaccgggtgtctacctcggtgcagttgagagagcaacatcgtttatcacagatgatcagtggtatggcatatttgctggcacaaatccaggtactccagttataatttcatagcaaatctctgcatctttctgttcaggaactggcatatttggacactcttgtttcatactgagtactgactatacagggcatctttcatatctatcccaatgcagaaacgtttgtgagagcggatggtgcctttattccttttgcagaagatttcaacacgagcaatgtaactacgttgataaagggcattggtgagataggagatgtgcacgttatagacttgcaatccccaattgatagccttattgggaaacaagttgtcaaagttggaagaagctctggatataccaccggaaccataatggcttatgcattggaatacaacgacgagaaagggatctgtttcctcacggattttctggtcattggtgaaaaccagcaaacttttgaccttgaaggtgacagtggaagcctaatactcttaacgggtccaaatggtcagaagccacgaccagttgggatcatttggggaggaacagccaaccgaggaagacttaaactaatagccggtcaagaacccgagaactggacaagcggagttgatcttggtcgccttttggatctcttggagcttgatctcatcacatccaaccatgaacttgaaggttttagaactcttttcctagcacttgtatgacaatggttcccaagttctcatgacttgttcttttgacttttgtacacttgcagcagcagcagcagcacgagaagaaagaaacacttcggttacagcccttgattcaaccgttagccagtcatccccgcctgacccggttccatcaggagacaaacaagatgagagctttgagccatttattccgcctgagttccatatagaagaagcaatcaaaccaacacttgaagttgaggaacatatcttcattgctcctatatcggttaacgagtctacttccgccattaaagggcaagagatacccaaattggataatctcatggctttaaagaacagttccgaagaagaggttaacatatcgttgcatctaggtgagcccaaactaaagaagccaaagtttttttagctgaaccaggaaattgatctcttataccagtttccgggtttagattggtttgatggcgatttgattaaacccccgaaattttatgtcgtagttgtgcatagtattattattctttgcggacaatagacgtatcgggaccaagttctgtagcaaaattgtataagcttaagtttgatgaaatttaaaggtaatcactaaaacccaaatgggacaataaaccggtgaagatttagagtttttaattttgactcatgaatctggagaaagagccctcgttaaaaggagtgaatcaatccataggggaaaaagttttgtctttttaaaaactaaagaaccaaaccttaatagaagcagctcaatgtgtgacaactttccactggcactaagataaagtgactagcgatgagtgcaattattgaaatagtagatggtaaatattacatacaagagtaaaaatatctttatgtcaatgcttaattcagtgtttctggttaacaagagaaacttctctaactttcgtaattgggtcttataaaattttatgcaattatgattttacccttttactacttttcattagctttcacgaatctattttgacaagagaaatcattagaggtaaacatgctttttggtcaagggccttaacagttccaccaatcaagctcaaaagttgtacttaaccgacatcttctgtgaaaacatataattacatgtacaaatcaaaactaccttatgaaataaatagaaatattgcagttcatttctaatttaacctcttcaacttttaaaactatttacatttctttatgtcatttctagtcattttgatgcaaattgtaccatttatggattatcttcacaaatttttaagttggtgaaaactttttggtgggtagttaaaacttgaaatagaaatttactttaccaaaataaactaatgaaaagtaatcactccactccctataataagatttccaacgttcccactaagcaaatcataaacccaccgagacgatgtctctcatcatcgtcttcttcttcttctcactcttgctcacatccaatggacagttcttcgacgagagcaagaactatgaaggctcctccgatctcgttgaccttcaataccacttgggtccggtcatatcctcgccggtgacgagtctctacatcatttggtacggccgatggaacccaactcaccaatctataatccgagactttctctactctgtctctgcaccggcaccggctcagtacccgtcagtatccaactggtggaagacagtgaggctatacagagaccagacaggttccaacatcaccgacactcttgtcttatccggagagttccacgactcaacgtactctcatggatctcatctcactcgcttctctgttcagtctgtgatcagaactgccttgacttccaagttaccactaaacgctgtaaacggcttgtacttagtcttgacctcggatgatgtagagatgcaagagttctgcagagcgatttgcgggtttcattacttcactttcccaagcgttgtgggtgcaaccgtaccgtatgcttgggtgggcaacagtgagagacagtgtccagaaatgtgtgcgtacccatttgcacagcctaagccatttccggggagcgggtttgtagccagagagaagatgaaaccgccaaatggagaggtaggaatcgatgggatgatcagtgtgatagctcatgagctggcagaagtgtcgagtaacccgatgttaaacggatggtatggaggagaggacgcgacagcaccgacagagatagcggatttatgtttgggagtgtatgggtcaggaggaggaggaggctatatgggaagtgtgtataaggataggtggaggaatgtgtataatgtgaagggcgttaaaggaagaaagtatctaattcaatgggtttgggatcttaataggaacagatgctttggaccaaacgctatgaattagagactatcatgtttgttacctcttttcaccaaagccttgagcttgaagcttggggaaacctgtatatggtttatcttttccttgcctagtcgattctatgcatttgattgtttaagactacaaaatctaggtattactagctgtcaagattcacttgacaaagtttctgaaccaaacacatgctttgacattagcataaaactccacaactacctcaaaacggctgtactgccaaagtatgtaggcattgttctatgacagtactatatatagtacagtcaacatgattaagaagacacttactccaccaaaatgacacaacagctagagaacaccctcaccttctattgtagaagcatccttgaagaggccttgttctgttcgtaagtgtttccaactccagttgagtgtttatcgttcatcacgtccaaggaagtcatggaaggggacttcagaagcatactctaaggccaagaaattttcagcaggatcattattgtttcctttattcttttccgagtcatcttcattacgtccaaagaagtcacggacgtggacttcagtagctgactgtgaggccaataaattttcaacaggattatcatccttttgcgagtcacattcattacgtccaaggaagtcatggacggggacttcagtagctgactgtgaggccaagacagtttcaataggattatcattcctacctctatccatttgcgagtcgccttcattacgtccaaggaagtcatggacatggactttagtaggtgactgtgaggccaagacttttacagtcagatcattgtttcctctatctttttctgaggccaagacaattttaataggaccagctttgttttctctatccttttctgagtcatcttcaacgagttttggtctcagcagcttccttttcttgttcggagaagctgaatgttcggggttgtctttacacccttgagttggattaccaaggctcctttgagctctgctacggcgcttaaaatcaatgaatggtagcttttgaacactatgttccatacttccttcacaatccaacagatcatctggagtagtctcagtaaaagtaagcatcaaatcattgtcaagtacctctgctgtatgaatcttttcctttttcttcttcggtattgcaacatcttcagaattactcatatttgctcttttttgctccatccaatctttgtgacagtcatttaaaaaggccatgacctcatctactgattcagtgtcaggagacgtatccctttcagcatcaagttgttttaaacgcccacccaacctattaaagacacttggtctggttctgtttctttcaagtttagcaggactaacacgatgagtcaccctattgttagagtcaaaagcatcaccgccaaattctttatgcggttgataagcttgaacttcgttattggctctgttctctggatacaaatcagctccatccccagatgttgaaggattggtaaaagaagggtgaatactgggaccccgaaccaccatatcagttgtataagaaacatgatctccaaattcttccgggtgttgatatgtttgaagttcattgttgagtccgtccttagtagacaaaccccttgatgatgaaggataaacaaatgaagggaagatgttacggtctgagtacatcggcctttcaaactccctcatgttctcagtgccccctgcagaagttaagggaccaagaaactgagagtgacgcaaatgaccattccaatgttcaataggcattggaatatagaaaccacccgagcccagactactagtgttcatgcttgtaccattatgctcatcagggaatggttggaatctctcggagggcaaggcgtcactgacataatcaccaaaaggtataatatcttctccaaatccataatttgagttcgctgtaaaggaagctgagccagttagatcaacattaggtgcaccaagaccatgcctagagcttgtcattgttgcatctcccatgatgctgggatgatcagggtcatagtatcctgtgtttgtttcatatggtaagtctggaggtactgagctttgagcaggaaccactggatctgactcaaaattaaggcgttccttgttgttagaccacaaacttgcctgtgcgataccatctttttcatggtactcactttctaaccatccatttgcagcgtgtctcaagttcttcgggacttttcgatcattaactagagaattatacgaattcttagttgaagcatctgtgccaaagttattattcatggtaaccttacatcgtaatctatccttcaacccatgcagtttgggatcaacaagtctggagtactcattccctttagttggatcatactctagtccactatcagattcctccccaaaaccataattctctgttaacctacgacctcgatgatctcctgaaggtgtaactctgaagggaaactcacggtcaacatcttcatccatttctcctgcacaacgattcctaaagccacgatcaccaactgtattttcagatttccttaacggtttcggagctgcagtttctctcagtcgtgatctctctaccttcttcatgctaaacaacttcaatagcctttgaacctatacataaacattttcaaactgaaagtgtcacaccacataagtaatattaagaccaaacaataacaattaaaattcaggaatgttgtttaagcacacacctgagccttggagagtccaaaattaaactttgttggtgtgaagtaattttcatggatagcattaccaaactcactttcacaaagtggcctacaacgccacttctcagtaaacttgacctaagaaaatgggatcaaacaaatgttagacacaaacttagtaaaaacaaaaactagaagaaagtgaatcccaagtacctgagcaggaaactgtttcccagaagagcggaaagcattaggctcaatgtttattgcaccatcagagcaagcctgaaacacaccatgtagctctctcttctcgaattcaaacaaaaacaacatcattccagctttaacatgtttaacaaatcctcctagcccaattggcaaaccgaaaagctttcggctaaggcattccttcctggttgagttattggacatgaaaatagcaccatactccggctctcctccagaagaagcaccattaaattcctccatcatcctccgatttttaggcattgctgttacagaaaactaaaataacaactttccttcatttgttgaactaagacagagcaaactgaataatgtaaacagtaaaaccccaaattccaatttaaaaaaagttttagaacaagtaagcaaataaagcaacaaataccgaagaaaagaaagaagttagtgacgctattgaacatccacagataaatcaaaacggcgacgtaactaatctctcaagcatattcacagataattaaacagtagccatgaacattaaatggagaatttttaagaaaagcaatgcagaagaaccaatcaaacctgggaaaaaaaatcacggcttggagtttcctggtttttaaattcgacttctatcacaaacatacatgaaaagaaaaaaaaaccataaacgagaaaaaatagtaagcaaggaagatagatatctattgaaatcaatgaaggagaagagaaagcacgaacgatcgggagttttatttatactttttttggagtattaccggaaaacgaaacggcgaaggagggggacgaagatcggaggaggatatagatattaaacgcaaagatcgagggggagagtgggtttattgcagttttcgtatgggttctctcttaaatattccggattttgcaatgcgaattactcgaatcttttattcttgttggtaggtccccaaacaaaatctttttttttctccccgtcaaattacactaataaccctaaatgattgattaggttgtaagtcagacttacaaccttaattttttttaaagttttgattacgtacttgtagtttttttttaaaacttatagtttaatttttatttatttttatttttaaggttgtaggagagtaaattctcaaagtcatattcttttgactgtagaaattttaattcattaaataaatacaaaaagttaaaattatcaacataaatatataacaaaaaaaatatttattatattttacttttatatcatcataatatatttatttaaattagtaatacaagatattttatttactataattttttttattataactattatattttattaatccatttttttataaattatttaaaataaaaaacttacagcaataaaagttacaactaccgccaacacagttacaacaaaatctctacagcaaaaactctacagttatagcccaatcaatcacccactaagttttcaacggaaaaacagtgaaatgttgactcattttcatcatataaatcaaggaaaaaaaactctttttacaaacctccaatctaccaaattgcatcaaaaacatctaactagtagtaatctttagtgtggaacactagtttgaacaatagttttgtcaatatgttttgatgttttcttatttattgatcatagcccatatgttctaaatcgatttgcagtatagagttcacagtcgaagaaaaacaaacttacaaatgaatgttttttaatcagaattggataagaatagttagagatcattcaaagacgatgcaatcaaaatagaggaactcaacaatatgcataatcgatagcacattagacaatttgcatcttttattcataatcgatattatatggcaaaaattcgtacattatcttatttgctttcgctggaatcaacttggatttatatcgagaaaacgaaaacaatgaaatatatcccttaattctccgattcgatgtcgacttcgctcgtataatcgatttagggtttgtgataataagataatttctttttagaaaattaagaggttttcattgttttttagataaaagacgtacgtgtaagatatctaatcatcatgtaaatcaagtaaagtgtaatctatgtggttaacttgtaaccatgattaatttttaaatgaagattttacataattaatatttaaagtctgtttcgtataggtggtaaaataaataaataaatatatatagtatatggttaaaattttgataatgaaaatgagtaagaagattatcttgagggtcaatgtagaaacaccaaaaggttgtgtattttagaaggggaaaaatgtcaaaaaaatcgtgaactttcaaatttgggacgtaaaaaacatgaactttcaaaaagacatttaaatcctaaagtttaggttgacttttgataaaatgattaagttttgttgacctggccaattagggcttgtcgttaagtttccgtcaacaaaacaatcacggtgttaacttttcgttagaatctccgtgaaatcaaaacgacgttgttttggacattagaatataagaagaaaaatttgctaacaaggagaatcgaacagctgaatttttggacttataagagacactcaaccattgagctacattaatattcttgtattatggtaaacagagcatgtatatatatatatataatataaaaaaataacagaaaccattagaatatataatattaaatatgtgagtttaagtttatacaatccttttcatttaaatatatataccattaatacaattatcactttttcttataatgtaactaaaataatttttatttatttattttccatctaactattaatattacatcaatttcaagttagaataattatgttttatatttatcttatatatattataatataaatacaaattaatttatccaagtttcagtttgttttatataatttagaaatcaataatttttaaaatatagaagaaactaacatagcaaactaaataattgaaatttccaaatatttatttagggtaaacatatttaatatttgtatatatttggttgttgattttatttagttttgttatttttaataaattgcagatatttaattaattgtatattattatgttttatgtatatatatatactatgtctgtaagatattaaaatgttaatgcagctcaatggttgaatatcttctattagttcagaaggtcagcatttcgtttcacttgaaatgctgtttttctttcttattttctaattttcaaaacgacctgtcgttttgatataagagagattctaacggaaagttaactccgtgattgtttggttgacggaaacttaacgacatgccctaaatggtcaagtcaacaaaacttgatcattttatcaaaagtcaaactaaactttaggatttaattgtcttcttgaaagtacatgcttttttcatcccaaattggaaagttcgcgaatttttttgacattttttccattttaaaagtagatagtaaattgttttttatgaaaattctccaaagtctaatggaagaattttgactgcaaacaaaattaaccaatatttcataataaatttcttagtttttttttttttgcttgaaagttgaaacagacttacaaatcttcacaagtattgctaaaaatggtactaccacactaccatcacacaattagacactttgggtttttcattgacatgttcttatacaaagtcacttgagaagtcgtaaaacgaaacacatggttattgcataacaaacataacaatctagtggagataaatacattttgaatgatgtcaaaactatttagaaaactggattgtatcaattaaccctctaattaattggtttacaaatcacaataattggttttgaaactacaaagaaaaatgtacctttttttttattttattttccaaataaacaaaaaaggcaagaggacaaaggaagcctgaggccttgagcctctacttaaacggatactctgcttgtgttatctatccatcctctccatttacataaaatttatctcctcaacaaggacaagactgtgaatatctccggtcatgtaagaaccatatgttcttttagcggttttagaaaatgagtagttgagactacccatctgcagaatttcttcaactctgttagttagcggatgttcgttcataaagtctattgctttggacattaaccgttgcctatttttgtatataactgattatctgtgtcaacttagctcaggtgttattatggttttctgctgaaacattttgagaattgcttgctttggtacttactaccttagtgttttgagtaacattttcatgaaattgggtttttgatttacaggttggtagctggaaacgctttgaattgcttattcattgattccagtggcttccagagatatttgggttttggagtcacaaatctcaatggtgccactgttaaaagctataagcaagaggggtttgtcatagatgaacgtgggaaattaaaaagatttaacaggaagaaactctccaggaaacgatgtaagactcaaaaactaagaaactttcttatgaatctctgtaagatttggagttacgaatgttttttttttctttcatataggtggctctttgagagggcgaggatggaaatatggatccgggtttgtcgatgggatatttcctgttctgagtcccattgctcagaagattctgagctttattcagaaagaaactgatcctgacaaagtagctgatgtccttggagctcttccttctacacatgcctcatgggacgatctaatcaatgtttctgtgcaacttcgtttgaacaagaaatgggattctattatcttggttagccttcttagaaaagtttcatttttgtcaatcattgttacagtttctttaagtttttaactgtctgaagctacaatcttgtcttaggtgtgtgagtggattttaaggaagagctcctttcagcctgatgtaatctgcttcaatttgcttatagatgcttatggacagaagttccagtacaaggaggcggaatcactctatgtacagcttcttgaatcccgctatgtgcctacggaagacacatacgctcttcttataaaggcatactgtatggcagggctcatagagagagctgaagttgttttagtcgagatgcaaaatcatcatgtttctccaagtatgtctttgcatctcctaagctttttatatgcattggtaccaaacactggctcatagttttcagtcattcttgtaattaacattttcttgttttgagaaactataggtgtaactgtatacaatgcctatattgaggggttaatgaagagaaaaggaaacaccgaagaagcgattgatgttttccagaggatgaagcgtgatcgatgcaaaccaaccactgaaacttacaacttgatgataaatttatacggaaaggtttatagtctaactttgtttgctatgaatacattggggtttcggaaatttcatattcatgtcattgattttcttgcaggcaagtaaatcatatatgtcctggaaattgtattgtgaaatgagaagtcaccaatgtaaaccgaacatctgcacatacacagcgcttgtgaatgcatttgctagagaaggtctttgcgagaaagctgaagaaatatttgaacagcttcaagaagatgggcttgaacctgatgtatatgtctataacgctctcatggagtcatataggtgattaccctaactctcccatagaagaatgattgcaggcaatcgatgaagctgaaatgtaacgccctcaaaatccggagacagtcgtgcaggttatccatatggtgctgctgagattttctctctaatgcaacatatgggatgtgaaccagacagagcttcctacaatatcatggttgatgcatatggcagagcaggtcttcactcaggtaaccaaaaagcttatctcgccagggatgtccattggctacatacattacattctctgtttttgatatatgtgagaaccagatgcagaagctgtgtttgaagaaatgaagagactaggcatagcaccgacgatgaaatcccacatgctgcttctatcagcttactctaaagccagagacgtaacaaaatgtgaagccattgtgaaagaaatgagcgaaaacggagtagaaccggatacatttgtcctaaacagcatgctcaacttatatggccggttagggcagttcacgaaaatggaaaagattctagccgagatggagaacggtccttgcaccgcggatataagcacatacaacattttgatcaatatctatggtaaagccgggttcttggagagaattgaagaactttttgtggagctcaaggagaagaatttcagaccagacgttgtgacatggacctcgaggattggtgcttactcaaggaagaaactgtatgtgaaatgtctggaggtttttgaagagatgattgattcaggttgtgcaccagatggaggaacagccaaggttcttctttcggcttgttctagtgaagagcaagtggaacaagttacttcagtgcttagaacaatgcacaagggcgtgactgtgagttctcttgtcccaaagctgatggctaaatctttaactgtaaactgataaagatagcatttttagatctgccttattaataaaggttggatttttatgatcagaatccttgtatctattgaacagtgttataatatatggttttatgtcattacccacgatgttgctttagtggggtagttgatgcgaaattggtctacgagcaaatgatttcagaaagtgacattttttataagcaaaaaaaaaagcaaatccaccaaaccctttgtcgtaagaatataataataagccgttcggtgagtgcactctttctctctcactgttgttgttgtgtatctgtgcgagatctctccaacgaaaaaatggcttgtagactcttttgggcttctagggttgcttctcatctaaggatctccgttgctcaacgagggttttcttccggtgaatctcaatctcctttctctttgtttgatctcctctgttgattactctgcgtttttgatctgagattgttctatttgaacttattggtttttggtttgttctcgacttctgatcggattaaagcgtttgctttttgctggattgattgtctctggatatcgctattagctaatatttctccttttcgtatcaaatcccagaaattgcatatgatttctcgagtctctctgttaataatgataatcttcttacaagtgttcagaaacttggaggtagtgagtgatatgttcatgttatacgcattattctctaaagttttattcttgaagtagttttggggaagattttgaaaatctgttgttttgggcctgaaacatgttgtttacagagaaggaagatcttcaagaagttttaggaatgttgattattttgccatttaaccttactgattatattctcttttgttgttgttgttggcatgtgtattatagtggttttgaaggatttgaaatatgctgattcacatgaatgggtgaagattgacgggaataaagcaacctttggtataacggatcacgcgcaggaccatttaggagatgtggtctatgtggagttacctgatgtaggacattcggtgtcacaagggaagagttttggagcagttgaaagtgtgaaagcaactagcgatatcaattctccagtctcgggtaaggtggttgaagtcaatgaggagctgaccgagtcccctggattggtgagtactcatctcagactcagaatcatattaccattgactccatgtgttgaaccaaaaagaacttcattggcatgatcaaatccgaaatcttagttttgcgggtgtcattttcatgtgatctaacaaattcattcctcgggtaacattctttgcataaatacttgattattcaacagctgttaaaatgtaagtgtcttcaagattcgtaggtctagatcaaattatttacataagtgagtgttggaaagttttaggcttttagctgatgtgaaactcttgatctttgagaaccaatatagatttgatttatcaatagcttgcttaaatatcgttaacttggagattcttgattttgtggtctcgagctgagagattcttttgttggaattcacaggtgaactctagcccgtatgaacaaggatggatcataaaagttgagctgagtgatgcaggcgaggcagagaagctgatggattcagacaagtactctaagttctgcgaagaagaagacgccaagcactgagctttttctattttttccagcatccttctccaagcttccaccgcaacacagattgttgttttctcaatcgaggatcaaaacgagatttctccatctttgtcccttggactgaaaattcccatctctcgttctccttttttcttttcatgtttttcttttaatgaaatgaaattgtttgaataatggtagagaataatgagctttggcgttgaaattgattggatctttcatggagttatgcctttttcttcttaactgcaaaaagtttcggacagtacatcttcgtggaccgaaaaccataacccttagcgggttgaactagtgcttagtgcttagcaagctccaactcctttggagggaccaaatcaaatgctactggaccaccatccatctatttataaacaattgtacaccggattggtaatgttcatactatataagataacatgttgacaagaaaaatgcttctcttcagatggaccttacctccgtaggtctaggcacggcagcaactacacttgtagactcttgaattaatttggagttcagtaaaataactgcccagtcctgagatgaagaaattggaatccaagataatagccgagtacaaagaagaagctaatggaagattcatgcgaataaagaatataggttcggtcatattgtagcaaccgtgtgaaaaccgtttttttgttattttctggttcatagggacctcaaaagataatgtgaaaggaaacaaaatctgtgatgcaatgatatgtgcacagagggaaaagattttggaatcattgttgcttattgtgaaggccaagcttgtttagccacagttgtccaacaaagttacaagatgtgccttgtaatacaatattcctgcgttgtcaaccctactttattatatgaagttgtttttgtgtgtcatggtttccactaatttacttattaatttgattgtttgattgttttctattagtaaaaaagtaatatcaacattatgattaaattctcaaatcaaataattatgttgaaaagatgaaatgcttggatagcactgagctttggacacgcaacaaaaagtgagggaggggcaaattcatcatcagaaacgtcagaaacattatttattagtcgaatcatactaaagtttaacacagtaattctaaaataattgacaattattacacctaaaagctactccatatgtagagataatgataattatatactacaagttagtatttgtcgacgtcaatattgttctcttggttaattgtttttaaatattaaaaattaccggttaagggacttgttctcattttgtcaaagcttcgaaaacttacatttcaaccacccaactagaacgtttgttctttttctaacagaaattttccttttaaatactaaaaatagtacttactacataatataccaaatacttttttctattttagctatcctcattattgaaatagatgtcgtagatttgaatttaccttctgttaatgtacatatgataaaagaacattggtttgttatgctaaaatctcaatagttggagctaatcctatagttttgctaaaaaaaacttgtaatccaaataactacaatcaaaccaaaacaacacatgatttgaaatatcattttttctagtgaaaaaatgttgtcttgcactgctcaaattcaagtagacaattccgattcaatataactaaaaatctcatattttattaaaattttataaacaatttattttttgaaagggataaacactttcagctgttcaattgttcataattttcttctacttacattgtttcgtttcctatggaaatgtttagatttacaggtaaaaagtaaaaaatgtgcttgagcaagaaaagagtaaaaaaaaataaaaaaatctgcattttagttgaaaacgaaagaaattctactgactaattttgtcttaaatgagagagacccgaatttagcaactctttatttctcggctcacacactccgattaagcccgacgctctctctcctctttgtcgtcgtcatcatcgtctccggagtaggttgcagaaattcagatctgaactctcagacgaagctccgatcttactgagacatttttgctcgatttgactttcgcctttaaagcttctcaggtaactttcaatcttcacgagactcttgcttgacttggttttagctccttgtttggttgctgggaaattgacgaggggatatctattctcactcgtcactcgttgttgagtattactgggtttttggaagatgaatgcaagagtagagagctaagtaaattatgttggacgagattgtgtaacgtgattttgaaatacattttcctttattgtagagattattgtactgaattaatggcgaattctcgtcaatattatccatctcaagatgaatcaatgtccccgacttctgtgagatcaagggaatgggaaggtccttccagatggactgagtacttgggacctgaaatggctgcatcagtgtcttctactaggagctctaagcaaattgatggacatgttggtggttccacaaaggctttgaacatacaatgggtagttcaaatgattgaggttgctgacggtctcatggctaaaatgtatagactgaatcaaatcttggagtatcctgatcctgttggccatgtattctctgaagcattttggaaagcgggtgtcttccctaaccatccacggatatgcactttgctctctaaaaagttccctgagcatttcagcaaattgcaacttgaacgtgtaagtcatgagttctttttttattagacttactgtttgatttgttgatctgatggtaaatgaaaaaagatttattctgcaatacttatgcagattgataagttttcactggatagcttgcatgatggtgctgaacttcacttacagagcttagagccatggatacaggtaataagaaactatctatgtaatatgttgttgggtttacgttctgttgttgtgaaacttgttgttcgagaatggtgaagcatctcggaagtcctacatgctatatagtcaatctttctattagttttctttgtgtacctagtcaatcttcaatcttcagtctgctatatagtcaatattcaatcttctattccatctcaccattagtcagctttatatatctgggcatgcatatatgatttacctaatacatggttttaacttttaaaatgtaaacgagtagttatttgctagccttctttccttagttcgtgtgtagcatttcagtaaggggtgccttcatagtcctctcgtcatgcatttttcttttcttgaatcagctgctgctcgacttgatggcatttcgagaacaggcactgcggcttatattggacctaagcagcactgtaattaccttgctggtgagtcaaagtctctcatctgcggaaagtatttacttgctctgggttgaaactttgagctttcttttgaactcgtaccttaggtggaggtcatgaaatgttttggtacattaagttattatttacttgtcaaaaatgtctgtgaggatgaagataaaattgttgagtattcatgattagctcataacttagttcagctttttgcagcctcatcagaactcacttattctgcatgcattcatggatctcttttgtgcatttgtccgagtcaatctcttcgcagagaaggtatgctgagcttgttccttttcttagttctttgtttatttggattgattacacatgtcatgtgagacattacattattatcaatatgtaagagtgtttattttatcaaagtagattcctaggaaaatgttgttgcaagtctacaaccttctgcatgcgctatcaagaaatgatcgagactgtgacttttatcaccggtatggatgtttttttccttgtagtatcatttttaatttgtatataatcaatagactctgatatcatatattaacactcctcgtcttgcatccagcttggtgcaattcatagactcttatgatcccccattgaaaggcttacaagaagatttgaattttgtcagcccaaggattggagaggttaatattttattcaaatcacgggtatcctacgagctaatattgcaactgatacagcagtactaacaacgttactattttcctaggtcctggaggctgtaggacccagtatttttctatctgcagatacgaggaagttgagaaatgagggatttttaagcccatatcatcctagattcccagatatacttacaaattctgctcatcccatggtacgaacggctagattattatcaacataaaagcttaggattctcagaattagtaggatgctattgtctttcccttacaactctacttcgatgtatagtgctaatattagataatacactcttggttcctacagagagcgcaagatcttgcaaatgttacttcgtaccgagagtgggtgcttcttggatatctcgtttgccccgacgagcttcttcgtgttactagcattgatatcgccctggtatgaatctgtttttcattttgttctcgattgtgatcttgataaagaagtttttcctccaaggattctatcttgaaaactatcttatctggtcaataataggttctataaatttgtttcacaaatcagaaattttctgcctctctctgcctttgtttgtaaaatgttaagtgctttcattttcagtgtttgtttaacttaagattagtaatggagttaggtttttgatgctcaaaacaaatcaagattgcgtgtaattcgtgctgtctctaatactgtcctgttgtatttcaggtcgtgctaaaggaaaacttagtcgtgacgttattccgggatgaggtgagtttatatcaaatggtctgcgaaaaagagtttggtattggaattagttttgcatcagctgactctattaatctaactatgcagtacattctgttgcacgaagactaccagttgtatgttttaccccgagtgttagaatcaaagaagatggctaagtctggacggactaaacaaaaggaagctgatctagaatatagtgtagcaaaacaagttgagaaaatgatcaggtaactccaatttttaatagttcagtactttgtaatcctcatctgatactggagaatttttgtgactttagctctgaatttatagatttacttttgtttggtcgctgctttcagtgaggtgcatgagcaagcattgcaattatgtgataccatacaccgagaaaggagaatattgctgaagcaggaaatagggcggatggttttatttttcactgatcaaccaagtttgctggctccaaacattcaggtatcggtttagtctgtttcatattagggtttgaagctattggtttgtttgagaagaaaaaacaaattgcttctatagaatttaatctaccaaaagtgtcaaatgaaaagttttacaagatttctgtgtcaactacgtatcattgatgctctgcatagatctatccattatactcataagagttcttcccttccctaaactttcccaataattgatttatttacttttcttcccttagatggtattctctgcgttggctttggcccaatctgaggttctctggtattttcaacatgctggtattgcatcctcaagatccaaagctgctcgagtgataccagtagacatagtaagttgattgcttgaactttgaaagcctctcaacactgtaacttttgactttcagtgaactcaaaatttggttattatttactgatttatcattccttatttcctaggatccaaatgatcctaccattggcttcctgctcgatggaatggaccgtctctgctgtttagtgcgcaagtacatctcaggtttgttacttttagatatcacatccttgaacattggtttttaagtatatgagcttgaaactctggtgttggacccgttgcagctcattgatcagtaccgatgttcaaaatttggtaaccttaatggtgtttgttatttgaaatgcagctgctcgaggttatgcactatcatacctttcttcatctgctggaaggattcgttacttgatgggtactcctggaattgtggctctggaccttgatcctaccttgaaaggcctttttcagcgtattgtgcaacatctcgaaagtatacccaaggcgcagggagaaaatgtttctgcaatcacatgtgacctatctgtaagatggactatatccacttattttcaagtcagatgatgcaattgcatttttctttcacagataatcaatatacactatatagttaattcactcatgtttccatatgtttcccatttggcctgtcttcaaatcctagttgtagtctggtcccaacacaattaatatgtttaatcttccaatctattttctaatgctcagtgcctcttgttgtacaggatttccggaaagattggttgtccattttgatgattgtcacttcttctcgatcatcgataaacatcaggcatttggaaaaagccactgtctctactgggaaggagggcttgctatcggaaggaaatgctgcatataactggtccaggtactgttcccggccttatataccattacttggttaacttctagctagagaaacaacgaaactaatatcctgcagaatttcattaatgcagatgtgttgatgagttagagtctcaattgtcaaagcatggaagtctgaagaaattatatttctaccatcaacacctcacaactgtatacttcctgttgttgttcactgtctactattttcccatgtcatcttatgcataatctaacatttgagttttgtaaaaggttttcagaaatacaatgtttggaccagaaggacgtcctcagcattgttgtgcatggctcagtgtggctagtagtttcccggaatgtgcttcactaataattcctgaggaggtaaatctataatccaaatctcagtgctttttgcactctttctgtattaacatctgtggatcatgagattcttgtagtgttaagaccacccaacgagcaccatagtactctcaatatgacaataaacaataaaagtggttgtaaaattgaatctgactcctttttatcagttttgcatatgtgctatagcagacaaagttattgattccataagctacttttggattacaaatctttagtatgcatcttttttatttaaacaaagcaacataatgtttttttttttggtgaaccacgaattctcattgtctatcccgtcatgtctcacctctctatatcagtgacaccttctattaaacggaaatgtcatgttcttgtcttcctccacaggttaccaaatttgggcgagatgctgtgctttacgtcgagtctcttattgaatcaataatggggggactggagggcctaattaatattcttgattcagaaggcgggtttggcgctctagaatctcaggtcggatatctttacccaaaatcaatattataacaaaagcaatcttctacttgagactgtcctcaaactgatgtgttgacctttctcagcttcttccagaacaagctgcagcgtatctgaataatgcatcaagaatttctgctccttcagtgaaatcccccagggttgtaggcgggtttactttgcctggccatgagagctatcctgagaataataagtctataaagatgtgagcgcccaagtctggctttaagttttgttcttgtattcatgtaatcagtgctccttagatactgtttatctaaaatatctcctcgtgatggcaggttggaagctgcaattcaaaggttgactaatttgtgttcaattctgaacgacatggagcctatttgtgttataaaccacgtatttgttctaagagaggtgagtctactagatttcaaattcggtagaaaaacatatatatggctgaattcttttagaatatatgctcgaatcctatctggaaaattttcatgttttctcagtgtcctgtgaataaaacaatatcttatggaaagacctcatgaatttctctcatcgtctggtcctgttaagcttttaaactttttgattttatcctgccgattggatacttgcagtacatgagagaatgcatccttgggaacttcaagagaagatttcttactgctctacaaaccgataacgatctccagcggccttctgttttggaatctcttatcaggcggcatatgggcatagttcacttggcagagcagcacgttagcatggacctaacccaaggcatcagagaaattttactcacagaagccttttcagggcctgtgtcatctttgcatacattcgaaaaacctgctgaacaacagcaaaccactggatctgcagttgaagttgtatgcaactggtacatggacaatatcatcaaggatgtgtctggcgcaggaatcctcttcgctccgaggcacaaatacttcaaaagcactagaccagttggagggtattttgcagagtcagtcaccgacctcaaggaattacaggcgtttgttcgtatcttcggcggctatggagttgaccggctggataggatgatgaaagtacatacagctgccctggtaaactgcatagaaacttctctgagatcaaaccgggaattgattgaagcagctgctgcaagtatgcattctggtgacagagtggagagagacgcatctgttaggcagatagttgatttggataccgtaataggattttgtattgaagctggtcaagcgttggcttttgatgacctcctcgctgaagcctctggtgctgttcttgaagacaatgcatccttgatacactcgatgatctctggcatcgttgagcacatacctgaagaaatacctgaaaagaaagaaatcagaaggatcaaaggcgtggcaaatggtgttggcgtagcaggtgatcacgactctgaatgggttagattaatcctagaagaggtaggaggtgcaaatgacaactcatggagtttgttaccttacttttttgcctctttcatgacctcaaacgcctggaacactactggcttcaacatcgagactggcggattcagcaacaatattcattgcttggctcggtgtattagtgctgtcatcgctggaagtgagtacgtaaggttacaacgtgaataccagcagcagcatcagtccctctcgaatggtcatcactctagtgaaaatctcgactcagagtttccaccccgtgtaactgctgaagcaagcattaaatcctcaatgttactctttgtaaaattcgctgcatcgatcgtgctagattcatggagcgaagccaacaggtaagagaaacctggaattattttactctctctctcgcatttttatccgcatcatcatcatatcatcctttttgttcttcagatcgcatctcgtggctaagcttatcttcctggaccaactctgtgagatctcaccatacctccctagaagctccctcgaatcacatgtcccgtacaccatcctcaggtcaatctacacccaatactactccaacacaccttccacaccgctctcaacagcatccccgtaccactccccatccgtatcgctcatccacgcttctccctccatgaaaaactccaccactccccagcgtggtagtggtagcggcagtagctctacagctgcccctgattcaggctacttcaaaggctcatcatcttcactatacggtcaggaacactacaccgaatccgaaactggaaactcaagaaacaatgagaacaacaacaacaacaaacaaaggggaagttctcgtcgttccggaccattggattacagctcgagccataaaggagggtcaggatcaaacagcacaggtcctagtcctcttcctaggtttgctgtctcaagatctggtcccatctcatataaacagcataactaagtaacaacactcccacattctacaaaagagacaaatttgtttctttttccccaaaagaaaaagacaattatgtagagagattagatttgtacaaatccctcgcaacagtcttcttgttatgtattggattgtaattcagaaaacctattatgcatgtctttatcttgggtaatcgactaatttcataattcattaacataaatcaatcatttataatcttaagattgaacaaattcttaagataattaattactttataaatttattaaaaagaaaaaaagaatatctgttgggggcacgaaatgtaacgaacccaaaattagaaccaacagtcatcttcgtcattagtgagctaagttgttcaatctctcacctgaaaaccctaaccttcttcttcaatctccaatggcgcgtaaatcttccctcctcaaacgagcagcaatcgccgtcgtctccgtcatcgccatctatgtaattctcaacgcctccgttagtcgctctctcccttcctcatccgatctccctcgccagctaatccgtgaagatgatgatgatgaaggacgtgctccgattcagcctagggttagggtttacatgtacaatctccccaagagattcacttacggtttaatcgagcagcactcaatcgctcgcggcggaatcaagaagcccgtcggtgacgtcaccacgcttaagtatccgggtcatcaacatatgcacgagtggtatcttttctcggatcttaatcaacccgaagttgatcgatccgggtctccgattgtccgtgtctcggatcctgccgacgctgatctcttctacgtccctgtgttctcttcactcagcttaattgtaaatgcgggtcgacccgttgaagctggatccggttacagcgatgagaagatgcaggaagggttggtggagtggcttgaaggtcaagagtggtggaggaggaatgctgggagagatcacgtgatacccgcaggcgatccgaatgcgttgtatcggatcttggatcgggtcaaaaacgcagttctgctggtttcggatttcgggcggttgaggcctgatcaaggatcgttcgtcaaggatgttgtaataccttactcccatagagtcaatctcttcaatggagaaattggagttgaggatcgcaacacattactcttcttcatgggaaatcgatatcgcaaagatgtaagttgcttaaaatgttccaattctgtagctttctattattaatggcaaatgtacagaaatgtgtatataatccattgtggtaatgctattattattagtattggcaaatatacatacagttttggttttgtatgtgttcagggtggaaaagttcgtgatttgctgttccaagtacttgaaaaggaagatgatgtaacaataaaacatggaactcagtccagagagaatcgacgagctgctacgaaaggaatgcatacttcgaagttttgtttaaatcctgcgggtgacactccatccgcctgcagactctttgactccattgtcagtttgtgtgtgcccctgattgttagcgatagtatcgagttacctttcgaagatgttatagattatagaaagttttccatttttgttgaggccaatgcagctctgcagcctggatttctggttcagatgctgaggaaaataaaaaccaagaagatcctcgagtatcagagagaaatgaaatcggtaccttctccttcttatcataacttgatcctctttatcataacttgggacgattctcgtacctgaatgatgccatgtatacaggtaagacggtattttgactatgacaacccaaatggagcagtgaaggaaatctggcgtcaagtctcccacaagttaccactcatcaaactaatgagtaaccgtgacaggcgcctcgtcctaagaaatttgaccgaaccaaactgctcatgtctatgcacaaaccaaaccggtcttatcacttccatttaaacaatctctttgtcttttgggagagaccttttggactgtggaggagcttgagaaggagagagttcaccgagacttacacaagcagatattcccccctcccgtggcataactacttctccggtaagcaaactgagagcacatgcatggtgacagattcataaggaagatatatttgaaatccttcttcttctgtagattccattagttttattgttctcgatagtgttacaatttatacggacccaactgccattcttttctactctgttactgtacatgtcataaaagcgaagcacaacacaaagcttgaattaattttgccaatatttagaaaatatcatattatttgtaaacttctgaaattggtcactggtcaatcatcctcattctgtatattcgacaaagttaaaaaaatttgatttgcaaacagtttatcctctgtaactttgaacatgtgaactgaatgtaacagtcacgtagaaacttacaaaattgtctatacaagtttggtatattggattagcatgtgaactgcgcctataagtggacggtgtttgttgtgttactgaaactcgtcaacatctgcagcttgcagctgagaggagaacaacttgtttatcaattacgagtgatgtaatgttgttataggatgagtatagtacgacgtgtattgatgccaaaacaagtcactaccagtaattttagattctatttttttttaagaaaaaacaagtggaagtagaagtgaaaatgtttaatttttcaaaagtggactttcttttggactaaggtgatggcactggaggcacgagttactttgcaaaagcataaaaccaatgtcaatgaaaaaataacaaaaccaaaaaaagtccacgagtcggtctagttgcggatatatttgactcagtggattttcgtcgctcagaactctatagattccttccaaagatccgataacgtgtctaccatatcatcacgaacaacatgctagatccaactgctgccacagcgacgagtgtatatgcagcatacttcacggcctcatattttgttgtttcgaactcagctttcaactcattaaaaccctgaaatacacaaaacatatatatatatatatatatatatatatatatatatattattagttcttctgatttccgatttaaggagtaacctcaaatcacgagtgtaattaaaatgaatggttagaggaagagaaaagctataccatctcaactttgtttacgtggatatcatgatcacacctgttttaagtgaataggtcttagtttaattaatgggacaaaacaaaaattaaaaacgagtcaagttaatacctcttctctgcttgcattgtagcaatatccgctcgcaccttattaatatcggctcgcatttttcgaacctcttctgcaacactagttgattgatattcctacacaaaaatacaaagaagcacactaattaggttggaaagaacaaatcttctaacattttttataagtgagaaaactgagtacattgatccgtcatgttcctgtagtagtagtactaataattaacgaaagtttggaaaagaagagttgcctcggatttggcgatgtcggctttcaccttctccaccaccgactccaagccactggtgatggcgccggttaatgcctccgcttgtgttgagggtacgttgatcgcctctagagccttaaccattcctaatttgtcgacatggttcccggaagaaagtgaacgataactcagacctcttccggttcttacgatactaatcgtgcgcttaagcattgccatgatgactctagcgcctggaaagagtgaacaatcgaaatcaatttatttgttaacggatgtttgaagaaactaacaaacgattggggaaacgctttattatgtgttctttgtctcaagaaacgatacaatatataaaacttaactttatgtttaacctaattagaatggaaacagataaacaataagtaaatattcttaaatcttctaatccttatcacaattgaaattctagaatttaaatagaatttggagtagcttgatcctcccttagctcgtgagaccgaaatattctaccttattacgaaggtatttttggcacaaattatttttttttgtcatcttatctattacaaaataaaagaagtaaaaaaagtaaaaaaaaacaaaaaaaaaaaacaatcgtaagtccaaaatgaaactcaaaactgagcccaaaagaattgccaaaagggaaaattgtaaaacacacaattcacgtatcagtaactcagcaagcaggcccggtcctgtaaagaaagggctttaggcaccaacaaacttaagttgtgttcctttggtgtagtgttttttagtatcttgtaatgggttgaagtaaactcacgcgtttcttgtttaacagtgtaaacggttttctcgtattctttctaatccaatatgtatattttatctaaatttcgatattatataagcggagctaatccgaaccgaatgactaccaatcgacacaagggagctaccatggtgcaagctaatacgtatgatgctaggaatgagcttaaaggtgtaaaggaggaccttaatacaatgagactggataaggagcagtcaatgatagaataaatcaagagtaagggtctaaggttccatagttctatctcagggcacaagttcgtcgtagttatcgggagcaaccaacaatttaatctccaatgagatagcattaggccttcaacttcccatgagagctacaaaccacgtttcgattttattgggacagaggcggtgcatagaaagcataggggtcagtctatgggttcaagaagtagaaatcactgaggatttccttttattggatttgaccgagactgaggctgatgtgattctaggctatagttggctctccaaacttggagaaacatggcaggatcatactttcgctttctcccacaaccaagattggatcagttttagcaataaggaggaagagctgaagcaaaatactaacaaaatgaagatgtggagtgagtatgtgaaaaaaggaattgaagatgagcagataagcgattgtggaatggttgttgatgactaccttgaggacaagtttggtttttcaggggaaggtaatggtagggtatgcaaggttggtttgtattggtagaacagatgaggctaaaggtattatagaggttaatattcacctagagaaactacgagcgagcaccaatgaaggaatcacttcaagctcattgatgaggttcaagatcatacgtccataataaagagcctttgacgtgatcgatatatgaaggaaacgttgttcactcttggttgtacttgtaagtcaccttcttacgatcatctctgaaattttgcattccttgagaaagaatcaataggatacgaactgggccttggtgggctttatttgtctaagcctgttagtagtgtcttctatttttatttttattttattttatttttcttttgatcatcagtagtgtcttctatttaagtagctttcggctctgcaaacttgatcaaaagagaaatcacaactaaagaatttctatctctctctctctctcacagttcttctcctatcttctgatcgtcttcctccttttctctgcagcattttcccggaaaatttatcagtaagaacgtccgtacttgtaaatctttcttttttatcaagcaattcaaggttaacgttacttgttatctttcgaagatcttcgagtttctagtagttccacaattttctcaatcgatttgatccttttttcctctctagttctgttagcattttcccgcttcatttctcaaaaacgacgtccgtaattgtgaaactttcttgtatagcaagcaattcaagattacggtgtctttttatctttcgacgatcttcgagttctactagttctaaatttctcaaaccatttgtttctttgtttttctctctttgcagttactttttcccggaaaatctccgagaaaacaaagtccgttgatttgaatcatcctcctttctcgttggtaacgattcttgttctttcttgtagcctaatattcgtactcaatttggtgtttctctgcaggtttgttctgtttagcctaatatttgtttctttttcctctgtagttttgttaatatttccccagaagataacaaagtcagttcttttagatcatcctgcttctcgttggtacttcttcttcttcttctttctcgtagcctgatatttaagtttatttcttctacttcaatgcgcttactcgatttggtgtttctttcagtttgttatttttcccggaaatatctcagattagagatttcgtacgtttgatcttctcgtgatttcgtgggtaaacgcttctttctttctttctttctttttgaccatctttgggttttataaaagttaattatagtttctgacgactgaatctatttggtttctctgcagtttgtttcctggaaagttgctgagatggataaagcaaagttcgaatttgctaaacgtgtctgctctttcatgatttcctttgtcattgccggtgctggtgtaactactggactacagatgttgaaagaaaatcagatcgaagttgagggcaggaccgaggaagttaaagaagctaaagcaaggaaccagaggctgcgtaaggtcaagatcaacgaacaatggatcaaattgcaggagaagctttttaagaaatgatgttagccattacatttcaaaagtaacctgttgatacatcttaggcaattagccattacttttagtcatttgtaagaaaaattgagaacagaaagaggtgagaaccaccgcctatgggtccttgccattgaagctttcaaaatctataatatacatttgatcatagagtgaattcatccatgtgtattccttccatgtttcctttctagagtccaggacattcactcctttggttgcctcgtatctatcaggaaaaacccagcattggtgctttctacaagtcctggagactgcataaaattcatcaaaccacccttggtctttgattcaagcctcgttccatttgagacagccagctctgcatactctccatccaccttttttacatcttctgcaaaacgtttgccgccagtgttttggcaaaggacatgatatccgtagacagtgtatgcgcagccaactccaagacttgtatagctggcttattgtctggtagatcagaagtaatgttctttgcaaagcaagtgccgtccgagtagaggagaggcttttactgaggttgctaactctagaaaggaaacttctgtgtaactactgttgcgatgtgcttgtgttgcctccggaactacactcagtcgaacttcagcaacaaaaacaacagctggtaacatagccagtaagagatcatgatgttcctgaaaagaatgaagtaaaccagtatggttcgtgttggagctggatttcatcatatgccagtaaatcaagcttactttgttatagtaagtggcacataattgattgacgaacatagttacaaaatataagcaacgagaattacctgcaaccacaattatgctctattatgtctgctttagtgttatgaatgtttacctgcaacctaatacggatttctttcactcttgatgaaaacaaactcgagctaacaatggcagcaacatcatggaaattcccttgggtcataaacaaaaagaacttccatcaacatgaagagtatgtccatggtttccttagaacaccaagaacagcttcacaatttgctctaaatatgatgtgacttcaatacctgtcaaccataatgcggcttccattgtctgggttagccaagatagtagtactatctcaggaactttgttgtgaacctttttctaacacaccaaagtccctggtgcaggagctgtttcggctcctccttcataagatccaatagtactatacgcttaaaattccatatcttgatgcttcaatcgccagaccaggcattggaatgttacaggatgataaccaagacaaactaggagaaacttcctttaaagatactgatgacttcttttgttgagaagccaaagacacagcaatactatccaataaacgccacacatccctcagaccagcagccaaggaaggactttgaaatgtcaagagtgctgattttatatgttctacgtactcctcatggaaccaaacctaatgatagtctgcttagagaaatctacacattgtattgctactctcctattgcaccacttgctgctgcaatgctcttggttcggaatggtctgcagtaattgtatgatagtttccatcttgcccagcgttttcagatccttgaaatcatccttctgaagaagcataaccacagactccacggattcagcctcatcttcagtcagagtgaaaccttccaggttggagctcttaaccaagaatgcttgaaaaggagaatgagtagagggtggactcattagatttgcgaaagcatatgaaacccacccttttcccattgcaggacaaagtcgagtggacttttgtaatcttacagatgcttggttttaagctctcgtataacagagccttgctgcttacagatgaaggaatctcagttctgttcaaatctgctgacatcttaagggcggcagtttccaaatccagagaaatagcatgcccttgagccaagttgcaagctctaaccatgcttttctatttaaaaaggccacaccagcatccaaacttactggctctaacacagtacctctcgctgtacaaatgaccaaagatccacaacagcaacttgaactttgtattctgcatacatcagcaaggctccccaacaattttgaaataagaaagtaccgcaacttaacctcggcacaactggatacataatttcaagaaactttcttgatagcgggcaaatccaaaaacaagtcctgcaaagcactttagcctgattaccaccttcatcgaaacaccaaggcctgtattgcatttattttatttccaccggcagtcaaagaacctgaaaaagcttttgcctgcatgctttgtacgaaacgcctgcaactctcaatcatcagaacccatagagctgagacagtcctcttcctctaataaatgggaaaaatatacacagccgctttctcatattgtccttctgaatgataaaaattagacctgggatccatggaaaaggcggcgattcaccgttgtgctcctgaaagccgcttcctctgcgaccaaaggagctaaactcattgatacccattctgagacaaagccaatgccataagtcgaaaattctttgagatgtctgaagctatccgagttcaactgcaggctaaacactatagcatcctcacaatgctgctccaaacaggcattaatatatagatatatgactcaaaagtattcagcttatcaacacaaaagatactaacttctacggcctcttaagatacaagacagcaagttcggttttttctttgagaatgattcataaagtgtaacttgggcacacatgatgagcggcgagaagctagctagccatgaaaatatgtctgtcagattcagcgtgttcttgtactaatatcaacaatatcaagaaaatgaagaaaataacacccagagcctgattcaacaaaggatagaagttctcttatcttgaagaagtgacttggcaaagcactcattaacatcaactccatgacaccaccttcacctgcaattactgtgctagttgctaacatcccgaattaacggaaaggcccaatcagttgaagctatcaaccagcaagcatcacatggttttatcaggaatagagcacacaacagaacaaagagctctccataagcatcataagatataaagcttcagactttcactcggacaaagaaaacagtaaaatgggtatatctaatcaaaccctcaagaggttcagtggtcgaatgcagcttcagagacggtggcagattacaatgttatcagcgattttgcatctcttttgttttcttctcttcaaaacaagtgtacatttttaaagctatctgattttttttattataaaaaatcctactaatataagtgtacattttaaaaatacaacttttttgtagtagaattttttaaaaaattaataacaagaagtgagaaaaatatgggattgtcatatcaacgagaattattctctctttgatatatagaagataattactagaaaagtgtaattgaaacaccaatttaaaaatcatcaaaatcaattcaacaaattataaaatttaattttcttagaattatacactaacacaaaattataataccttctaaacatcaattattcgaaacatattaatttactaaattatttcacaattttttttaaaaaaatatgaattgcggaattgaactaaattaacaagtaattatttcacaaagaccattggttttacatttaccattagtaattttagttctagagattagggtgctaagaattattttatggaaaaatgttaatcttttatttctgattgtaactgtttagcttgtagatatgattggtatacgagaactcaccgtacgtatgggcggacatgcataataatcataagcaaatttgaatagaatgtttcccacatgcataaacaaatgcagtctcaactgtcaaggactattgagtgaaatccggtgaatttacatgatgaatatctctcaggtttcatttatctatcccatggttgaggcaggtggcagtagattgtctgacctgttttttaatttaagtttaaaagcttatcaggagataagactttgatgggaacgagaccaactcctttcaaatatcaatgcatgcttttattttgaaatactaattattgtgctacttacacgttttcaactcctttcaaaggggagctccgtattgttctatcgtcacttgtctatacaagtttgatattgaattcgcatgtgaactgcgcctaaatggacggtgtttgttgtgtttctgaaacttgtcaacatatatctgcagcttgcagctgagaggagagcaatcaataaacattggggacagaaacttgtttatcagctgttacgagtgatgtaatgtagttataggatgagtacagtacgacgtgtatattgaggccgccaaaacaagtcactaccagtaattttaattctatttctttttcagaaaatataagtgcaagtataagtgaaaaagttgaattttttaaaagtggacttccttttggactaaggtgatggtactggaggcataagagttactttgcaaaagcataaaaccaatgtcaatgaaaaaagcacaaaaccaaacaaagtccacgagtcattctagttggggggatatgtttgagtcagttgattttcgtcgctcggaactctttagattccttccaaagatccgataacgtcgctagtatatcatcgagaaaagcataccagtttcagctgctgccacagggatcagtgtatatatagcatacttcacgatcttatattttgttgcgtcgaactcatcttttaactcgttaaaaccctgaaatacccaaaacatatattacttcttctgatttccgatctaaagactaatctcaagtaataacgagtgtaaaataaatggatagagctaggaaaaaaaaagctatacctgctcaactttgtgtatgtggttatcgtgatcacacctgtttcaaaggaaaggtctaagtttaaatgggacaaaaacaaatattaaaaagcgagtcaaatttaatacctctcctctgcttgtattgtagcaatatccgctcgcatcttttcaatatcggctcgcatttttcgaaactcttctgcaacacgagttgatttatactcctatacacaaaaaaagacaatgaagaacactaattaggttgaaaaaagaaacagatcttctagcattccttaagtgagaaaactaaatgagtatttatcacgtacgccatggagataacaacacaagatattaacaaagacatctatacttctggacacttgtcatcaacacaagataccttaaccgtttctaaggataattaagttcacaacacaagatatactagaaaacagatctctacacacgatccatcatatgttcctgacttcctgtagtaatagtgagaataccagtactaataattaacgaaagtttggaaaagaagaattgcctcggatttggcgatgtcggctttaaccttccccatcaccgactcaaagccactggtgattgcgccggttaatgcctccgcttgtgttgagggtacgttgatcgcctctagagccttaaccattcctaatttgtcgacatggttcccggaagaaagtgaacgataactcagacctcttccgattcttacgatgctaatcgtgcgcttaagcattgccatgatgactctagcgcgtggaaagagtgaacaatcgaaattaatttatttgttaacgtatgactaacgaaaccctaaaccctatgaccaagagaaagaagaggaagatcggatactcacaaaacaaaaacaaaaggcttgcttcacaaatcacaaggaatattcttctatacctctcgcctcctctcgttctttgtttttcgcttcttaatttctctctgattcaaattgtaacaaagacaaagagatggaagtacttatataaagtaggtttacaaatctttcacgtgtttaccaaaaaataaaaaaataggtttacaagaatcccattatttatttatttgggtgtaattatgactataattatttattgattgacgtatatccttgttaatcaataatcacaatacagataagcgtgggaataaattccgaaacccaaaactgctttctcaaaaatccaaacagattgcataaacaacatatacctataaacagatcatacattaatcaatttggttcggattgggatgctaaaattacccaaacagatcatacattaaatttttcggattttggtttggtttggatagaatccaaaaatctttacggatcgaaaatccaaaatttggaacgtatcaataacccaaaacattttgatcctctagctcctgagaaaaaattatgcctagcttgttccggaatgataagctcgtggaaattttactcattttgacaaatcattattaatataaatattgtatagttctcgtaatcctccgcatatcgcatacctgtgactatatcgataaatatatgaaacctaaatatatttgtaaactaaatatacctccatatatttataatgtgtatatatttatgcgtatcaatgttgggttctattctagtaggtctgacccgcgagtcatcgttgcaggcacatgggtcatccatcaccagtaagatcgcactacgtgttattaaaatccgatgtgattttcatcatcgcatcacatcacactcacacacacatcacatatgataacaaaactagttgcagctgcgaatacgaaaacacgtacgaataaatacacgacatgaataaatgaattttgtacaaatagtatgtttcttttttgtcgtctttacatataagttttacttatcaattattatgtctcttaatttaattaggatactattcattttgctatcatggaccaaacataatttagacaaatgtggggaagaaaattcttcttttcgagaacttcttcaaagtatggctggttcacattttcagacaaaaggaatacctaacatatctagctagcgatataccaaatctttgatatttatcttctcaaactatttgtattatatgttcaaatttttttcattaaagatttggtagtttgtgagagttatagttcctaatttataagcatattcatacaaaatttcaagatttttgtttgaatcagaaccttgagcgaccgctctatttgaacatgctaaagaacatcagatttttttgaagtaagtatttgtgatttgtttcgttgaaaacatactatatattttaccatttgtgttgctttaaatcatatcgaacatctattttttttaggatcgaatcacatgaaataccaaatcaaagcatatatctaacatataatttgccaaccctagtcttaataacatgttcacatacacgaggttatacatacgaagtgagaggctgtggacgcccatgataccaaggttgaccatacaatgaaggggaacactacataagacttatcccgccgttcttcattgagcttctaaaagatgctcgtgatctcttagggtctaattttactatgactaatgattggatacatgatatacatacctatatgagtagatagaaaaatctactagaggttttgtaatgacatttaagtatctcaacttcaacatatttacaggtcctttacatcttgactcgtttgaatgtgtgtatctctttgtagatcttggtacccataaaattttgtggtgttttgaattttgacaagcacttacactagcattttagtttgagatttaatgtttaatgttattcgaatcttggatcggtatatgttaataaggacgaggaccacataatcacatatacatcattagtaatccgtaccagctgtcgtattgtttatatttaacatacaaccacgtgagttcacctatcgcataatagccacatatatacgcgaccatatcattattacatgaaggcaaaatgatcaatttgttgtggtatttttgggatatgacattcgattaaaatgaaattctattatctagcacaaactagttatatcagattaaaacttgcacgttgttactttttaaattttatttttggttggtaacttaattttggactatttatgaattgtcaacacgccacgccattacattatttcggaattcaagtgtgtaagcgagatgcatgcaacgtatggaatatacgtatgaggtaattaatctatgtataaacaaatatgaaagaaaaaaatgattcgaaaagaatagagatctgaaatttggactcaagtttaatttgtaggaaagctttactaaagatctcaatgaaaatactctgtatcaacaaacaataaaaataataattctaatcatcgttttttttttttttcctaagattccaatcatagtttttaaagctgttatattgctttttatatctacaaagacttttttttaagtacctacaaagactttaacgtaaccatgtgacggagattatttttatttttattttctaatgaacgtgatggagattattacaaaaacaaaatctcatgtgcatgtacaaccaaagtagacttaaaggaaacttggttcagcattacggatgggatggtccaatataatttggatattttattgtttttgtttgataaatggttcaatagtaattgataataacgtgaatatataattgaaagttcgatcttttcgtgaatctttgaacttcttgataaatgatgctatgacaaagaatatacaaatataaatattatataactaatcgataaaatcagtgacaaagaatatatgtattaccctacacagggctacaactttccattgtgattctcttagtttaaataatgtgaggcttttgtcatgtaatacttactgtatttatctggaatgtattttgatgaacttcaggtctattcaatgttaataaaccattttcttggatccaactgatcttgctatgaatcttctgaatatctttttctacagaaaatgtcaatttttgaaattaggggtctaataaattaaaggacttttttttttgggtgcacctattaaaaggactatattaaattattgttgcctaaaagggtaagtacgggatcacctggcgtgacatgtttaattacccaaattagacaaattacttttgttaacccggtcaatgtttctttatatatcaaacgttcttaatctttttataggtaaaaacgttcgtaaggtcaaaacaattgaacgacgattaaaatttgccaaaataaacgtttggcatccatagaacttctttttttttccctccaagactccaaccaatatcattatctactcgaaaacatgtctggtaaatctaatactataatatagatctaataaccagtttagaattcaaagaacgataaaataaaattaaaaatcactttttcacataatcagcttttgatattttccgttggtgaaatttgttgacggttacatttcattacaatacttttttttggataaattcattcatttcattacaatactttatatactatttttttatattttttttcagctacatacatatgaatgtatatttgaatccaatgatatagtgagaacactagcacacaaaccactaatacttgtcaattttcttgaattaaaacctaagtttataatatataaatttttaacaacttaaactataagccttataaaaaatccaaccacccgattgtaaacatatgttttaagactgtgaattgggtcatttcaacttttaaacgcaagtttcaaccatttacatcaacaattgtttcatcggcttctacttggaaatttggtttaggtaactatgcacatcttgaaaacgaagtgttttctttcatcatttattattattcaccaaacccaaatcactacttcttttaggtagctttaatgcaatcttgaaaaaccaaatgtttctaccaaaactacatctgaccccactctggtgatggtgcttattcccaccgtttattgtgaaaaattgatccagtgaaatagctctaaattttatcttcttcatcttttttttacatcatcatactaatcagtttatttgccctttttgaacttgatttttttttccccaataaaaacgcagagtagtttttgagtgggtaaaaagaattgtactttcagtcagaacactagttaaataatttcttcgatagttccaataaaaactctccacgttcatatctgtcagaaatcagaatcatatgcgtactttgtctctctctttctctctatagaattctcaatttgcctgtatcttttttactctctaatcagctgcagagaaagagaagtcaaaacgcagctctctcttgcgttttcttcctttctcctttctcaattccccagagaacaacataactctgtaaaagggaaactctattttgttctggtaacttcaatagtcctcgttttatttcagtgttatattcttttattcgatggtcctgaatcgaacaggacccaccgatggaacagtgagaatctgttttcttatataaagacataatttttccagttcgttgtgtttatcctccatagaaataatgtcggggttggtttttggaattctctaagtgttgtttattgatttttgtttagttttgctgggtttactgttgaagttttgatttttttggcatattcttttatttgatacttgtttgattgttacatgttcctgattatctttggctgcttgttaattaacacgatatattagctagtatttcgatatcttttctcaaatttttttggcagttattgtaattagtatatgtaagctcttacgacattcctctttaggaacttttctttttcttgaacaatctttcttgtttgtgaaagttttaccttttttaaagattcgaaaccaattcaggttttgcttgtgtaaaaagatctggtcttgagaggaaggttggtttttattgtgttagaatcaaaagtagttttaaatggcggcaagagtagaagcagcaacgatgggtggtgagattgatgaagaagagagtgatgagagaggtagcatgtgggatttggaccagaagcttgatcaatccatggatgaagaagctggtcgacttagaaacatgtacagagaaaaggtatcatttttttttattacagattcatttccatttcttgtctctgatcatgttagagtttcgatgacataacaataacaacatttttgcagaaattctcggctcttctacttctgcagctttcatttcagagtcttggtgttgtttatggtgatttagggacatctcctctatatgttttctacaatacatttcctcatgggatcaaagatccagaagatatcattggagctctatctctcattatttattcactcacactcatccctctcctcaaatacgttttcgttgtatgtaaagcaaatgataatggtcaaggtagtgtttcctcaattcacaagctt

SEQ ID NO: 332 - DNA, 79881 bp, Arabidopsis thaliana
aagcttgttacttgacgggaagcataccattgaatcgcattttatcctcgttaatcaccaagtaacaactactaacctaacatgatccctcagaactatatgctaacttgaccacctttctaattttacatccacctttggtccactttacagatgaaacagatcagatcagctctagccattgcatctcttcttaatcgtacactggtgagtccattcaacagcttaatgcatatttcctggtgataatgattgattcttatatatagctggttggtctctacaatgttatcaggtgatgccaccaatatggtgcaggttagataggctttggtttgggcatcctggtactcttcagggatctatgacccgacaacctttcatctgcccacttgatcatgtctttgaggtagtatttgtaatgatgttgtaacatgtcaatatctgattcttcctctgcaaatgactcataacagctgaataatttcaattacaggtcaatatcatgcttaaggagctaccagaggaagagtttggccctgggattggtatcagagagtattcttttctagataacccattgctgccaaaacaagtaatatagccgcccagatatatttttctaattaatcatttcatagaaaaaatgtcaggagtgaaaatatttttcaggtgaaagagtcatggcttgatgttcagctttgtcaagaaggaaaagaaggatgcgaggcatcaaataacactagcccctctcgggttcttaagttcccaaagcggagcaatgaagatacggtaactaagatttcattagctatctatcactctttgttatatttcaaaatcgctggcttagccttatcgccttgttttgtgctcaccgcagtttaaggcgatattctcttccttcgacgatgtcaaagtgatcaagttttcttcaattgaagatgctttcatcggattctctgacaaggcaagtagatatttaaaccgtgaaaacatttagacatgttgatacaccatgtaaatctgacctgaccgaatcgggtttgcaagcaggagcgagaagaaagatttagaagacgggtaaagagatatgtgggaatatggtgttgtgaggagaacaagactccaggacacatttactacgatatgtattgggacgagaaacctggttggaaaccggttccaccacagacaccagaagaagatcatcctcctctctgataacattactggcaagaagactccaagaagcttacactcgatttcttgggtcacaaggagacagacttagggagttttttttttccttctatacggcctttttatactactgtggaactgtatctttcttttctctgtctcactcaatgtatcatgttataaccataggtttggacacagaaacttgtttcttcttttcatataatttctctgtagatttttatattaataaatggcttatttagttgtttcactttcatacttcaaaaaccacgcagtcgtgttctgttgaattggtatatttggaaataagaattatcctgctgagagataatgagatgtgaaggagtccatgccatattgagatggaagaagattatagtagagataaaaaagttccaagacacaaaccaccattagctaaattgactttgaaccatcatccatacataaaccgtctaagacagatgggaactggctggtagtctatatataaccaataaagatcacccataaaaagatacaaaaaaagaagaaccgtttcttggatgatatagtaatagaagctaaggaaaatgcaatgtgggaatcaagcagacttaggaaaatgttgagacagaagttttgaaatctcgaggaacccgacagtgtctttcccactgaagatcgtcttgagttgctcatcgcatagtatctcccttttgttcaccggattctacatcaaaaaccaatagtatgtgttggaaaacaagaatctctaaaacatagaaatgtaagaccagctaaggctaacaacacgatcaaagtaacttccattagctcgtaaatttccctaaaagcagtgatttcttcactcaacataagcaagaacatatagctacaaaagttaggctttgaaatgttgactcctgaacaaatcagatatccaaaacatcaagatcataagctgcagtcacaaagataaacttaatcaccgaattaaaggctaatcacaacaccttgttctaccattttgaagaaatcaagttacttcaggacaacacaaagcctcaaaatttctacgaatcttcctacacccagaaaaatgcttaagcagatacagtcaaacaagctctattagatcaatcaatcacccacgtggcataaacaggttattaatttaagtaacgagagcttaattaaaagacaaaatccagtagaactcgcagagagaagacccagaaatgttcgagaagataaagcaaaccctaacctgaagattgttaagcttgatatattcccagattttcttgacggcagttgtgcgagagacttcgttttccccaataaaattagcgagcggcttcgaaacgggaaccaccttaagaatgccagtaccttgtctaccagttttagcgccggtggaagaagcggccttcgccatcagtaccctgcaagctccgaaaaccctcgacattttttcttcttcacacagttttgaaattggaaggagagagagctctgtctaaaaccctagatcaaactcacagactttgaaaactgaaacgtttcccagtctctctctttctctcagccctttaaaaattaatgaaggtctgtggtttagctcttcttagtttgggcctgttttgggcctcctattgcaccaagattctgggcctttttggatttatttgataaacaaaacaacaattcgaagcctataaatgtcaaaagaaagcaatggcattcatcggtctatcatgtcatccaatcaaaagatacaattttccctacataacaaattgaacaaatatttgatagacatgattctatgtttttttgggcaaaacacatgattctatctaaaacaagagaaaacgatttaaagcaaaaactttgataaagagatccaaacaacaactaaaaaacgtttgtgactgatgcgaccgtacccattgggggagttgtatagtgtgtaaaatcatgaccgtaacacgacccgtttgaactaacgtcatccaattaaaagccgccactaggctacttcctgcacacgtaagagaactctctctctctctctctttttatctccgtcaccggcaaacaccaatgggccctccctgccgtctcttatcgagaccaaatttcaaggtttactcaaagagaaagaaaaaaagtatctccgtcaactcacgtcgtaagtaatctaacgccgttaatatctctatattttcctccaccttataaattactcacggtcggtcctccaaatgccttctctctttctctccgtcatacttctctaaacaaaacccggagctccgtaacagttactgggtgacccgactacccggattcttaccccgtgatttatgcttgtatttaaagttcctctccagtcgaagagtatatttcgctgtttcttggagttttcgatcttctccggagtaatttggcttcgacagagcggagattatcttcagattctgatttgaattcgcttcaagaagacgttgcggttcaggtacgactccgaataaccctccatttaaagattttctcgtgaaattttctaagctggtcaaacctttttttgtaaaaaaaaaatttctggaaaccaatcagataatttctctactgttacattctattacttcagtatctacaggctgatttaaatcatcgttctacgtgttttgtttcttatgcttcatttttgatggttaataacaaacacattacccaaatctatcaattttttactaaccagatcattcatggcaatatttattaccacattcaaaagtttccctagtaatatttgactagactactactgtttgctactttacttttgctttttactcgacaaaaaaaagggaagaaattgtgtttctccaatgaaaataaaagccattcatcataataatcaattacgtcgtccttttgcatttacttcatattactactgcgcctgtaacgctgctaaatctctgcagctttgttgggtctattataggaaacaaaaagcaatccttaagtttcagatatacacgcttgacgcttaaccttgcagacttttcgatacaaggtaaaacacactaaacccatacttcaatttaattccattcattacctctgatttttttttttatctactgggttttgaatgaaaacaactcattttcttacatactttcgattttattcaattttttcgacatgcattaagattggtccatcatcacttgaacccaactctttctttaattctttctctgttttagctctttcgttttttttatcatacacgtgactgttacagattccattttgttgctaagttctttttctttacttctggctgtaataaattcgagtgtcttcatactttcagttttatagtttaaaacagtatttttggacacgagtgatgagaagaaacaaatttttgtttttgttttttttatagaattgtatatttttattaagctctctaatatttaaatgtcagaaacttcggcttgccggagaaataaatattctttgaaacttttgatttatgtgtgtgacgaggagatggggtctttactttggtattgctgctcaacaaagcatttacacactcagtttcgcttctctattcagacccactttctttgttaaaaaagaaagaacagaaactatataattttaatgtcatcccttgtctctatcatgatcatatttcaaatatttttattgttccaaaggttataatttgatccattcaggtgccatcgacaatcctttgaaaatatattttctctagtggtccttttctctgatccccaagttgtatctttgaacacttttgtctttatcaagattattattgcccctaattatgtacctccatagcttgtttttattttaatactacatataaaacttgtatccctctctactttatttcatgagttccttaatttcatgaaacatttttagggatataattctttaatctttatggcttactgcataaatcatgtgtctcaactcattcttgcatcctaaacatttgcttcatctactactactattctaggaatatatcatccttctcaagaaatttgtttttactcctttaatctttattattggggtttcactaacttattattagttgagttgcttatccaattaattaattaagctctagcatcattaacattttcatagctttgttttttcttttatatagctacctttatttatgagtaatggtttagaagttgtgatgtttaatacactctgtttctgttttatggctcatagggtttaaaaggcagagaacataaaaaagagtgcaaagatgtttacttgcataaattgcactaaaatggcagacagaggtgaggaggatgaagaagatgaagcgcgtgggagcaccactcccaacactaaagaagccgttaaaagcctaactacacaggtctctttctctccctaaagatcaattctttcctttgttgatccttaagactctttttcactttacttttgttgcttttttcctaattgccttggtcttgaaataaacaaagccaaattgagaaaaatggtcctcttaaactgttttaacaattgtagtgaaaagtgaaataaacagttttgaaatttggctgtcaagtacaaaagtatagaggttactgtagttaaggctgcaggttacaaacaatattaggatctttagacaagattttacagtgatgcaacatcacttctctggaatctattacaaatctctctttaataggttatgtcagtgttttattttctgcactctatgtgactagacataaaaaatctagcaaccaatttagtaaaataattaaaatatcaaaattatgtttcacattgaatttaccaatgtagtggctgatgatttgtgtggaaaaggctaatggagtcacgccttgttgaacatgatttttgcttgttattgaagattgatctatatactttcctagaataagtccctagtgggttcttatttagattaggatggtggggcaagtatatagtaaatcaaaagaagcaaaaaaaagaagctatgattatgttctagtcatggagaagacaagatgaactatattatttgtttcaaattatatcagatcttctagctttattcatgctctttatgaatgatgatagtagactctttttttcctagttgggatcaaagaaaaatcatccatttcttgactcttttttttcatgttagtagactttattgcttacttacctgttctgtccaacattattctgtccaatgatcacctagtaaggttgtgttttaagattttactttaatcaacttcttgggcacggatgctatgcagatcaaagatatggcgtcgaaattctcaggttctcataaacaaagcaagccaactccgggctcttcgagcagcaacttgaggaagtttccggattttgacactgcatcagagagtgttccatacccttatcctggtggaagcacgagctccactcctgcttgggacttaccaagatcctcctaccatcaatctggacggccagactcaagattcacatcaatgtatggcggtgaacgtgaatccatctctgctcagtcgtgtgatgtggtactagaggatgacgagccaaaggagtggatggctcaagtagagcctggtgttcatatcacatttgtctcacttcccagtggaggaaatgatcttaaacggatacgtttcaggtatttgaaacccattctctccataacattttcaagaatatgtttcacttaaggacatagaatgattcaatgtgaaatgaagctaacatatacttgtatcgtttttgaagccgggaggttttcgacaagtggcaggctcagaggtggtggggtgagaactatgacagaatagttgagctttacaatgttcaaagatttaaccgacaagctcttcaaactcctggtagatccgaggaccaggtaaaacacatcactctttagatcacaactttaagagaaggtttatgagtaatcttatctttcaacttctgtttgtttcttctaacagtcgcagagagattcaacttacacaagaattgattcagcaagagaaagcagagactggacacaaagagacaacaacttcagaccaccaggaggcagtgtccctcatcatttttatggacctccaatggacgcagcaagaatcaccacctcatcgagggacgaaccgccttcaatgagtaatgctagtgaaatgcaaggtgagtgggttgaagaggacgagcctggtgtctacattaccatcagacagttaccagatggaactagagaactacgccgcgtcaggttcaggtaaaccagagaaccgattttttcagcactatcctaatttatttggcgattaaccgtaaacctttcgaaccgggtttgtacagtcgggaacggtttggggaagtgcatgccaagacatggtgggagcagaacagggacagaatacaaacccaatacctctaagaggacaaaaaacgagatcaatattgtagtcttctttaacacaacaaaggtatacacaaaaatcagaattttgttcatcttctaaaattttgaagaaaatcagaatgtgatatgaaaacaaaatgaaaatttgatttatgtttagagatttgtagttagctacttctcgacgttttgatagctatgtaattttcctgacgacgagatgagctttatgccttcatttattggttcattttttgacatgattctaaaactgtgaaacttataaatagagaggtttatcgatgatggatagatcactaaacaaaacagaacacagtttgttctctaatttgccttggctaactacctaacaaccctagaaaaattatattttaaacaaagttttgatgagatctattaaacggaatcagatcacaaaaaaacacagagagaatggttagcttgaaccaatgaaactaactcaaaatatacaactgaaaatatggaacacaagcaactctaagtctaatcaccaactctttgagcctaaattgtttacttaatttctcaagagcataaaaacaaagaatccgcccaaaaaacaaatctactcgagaagaatcatagtaagaaggagtcactatgaacataaagctcaagcacaaagctaacataacaacatctcatgttccatataacctatacaggcaagcaaatagaaaatagaacttacgatggcactccatgttcgcctatggccggcttctaacaacagaaaacatggagaaaataccattaatgatattgaattcgatacgcaattttctggatcgacaacaaataattcgattacacaagataaataaaaaggtttaaaatcaatgaatagtaaattattaagttagataaaaagaaattggactataaaaaatgaactagaagaaaaggaaaataaaatgaaatagaagttagcatatttgagaatttattaatgtaaattttatttcctagaagaaatgaaataaataacagtattcctttatttaagattcaaatataattatgataactctttgttttgtcaataattatgataactctataaataggttattgtgttaatcgtctaagtctaagagaatccaaagaagtcaaacttaacacgccgtactctcgtaaaagaagatggaccgagaagcagtaaaggatcaatacgacatccttatcgacctggaaggatcagtagggactcaaagcgacattgttctgaggtggactcagaccagattatctctttacttcaggcttcttcaacggatgagcttaacgctgtcttctccaggatcgtcaccaccatcctcgccgacagcaccccgagtggcggcccgacgatattggcagcgaatggcgtttggatcgaaaagactctctctgtggaaccttctttcaaggatctcttgctaacttctatataaatttactagggcttgtactaacattaacatgcttttgatgtatgtaagatagtaacatgcttagacatttagacttagatgtgtgcgtaatcagatttaggcaaggcttttgtgtgaaaatcaaaccacagatgttagtgtaacctaataaacctaattcccttaaaccttctccatatatttccttcagtttcacttatatgaacatattcggtgaataacttagctaaatactagattgtatataggaatactagggattatactaatagtttgtgctttgaagtatacacaaggcttttgtgaaatcaaatcacagatattgatagctagcttctctgtttttgtttgtattgtttttgaaaggctgatgaagtgaataaagaggtgaattcatgggttgaagagcagacaaatggactcatcactgatcttcttccaccaaactctgcttctcctttgactgatctcatatttgctaatgccttgtttttcaacggaagatgggatagtcaattcaatccatcgctaacaaaagaatccgactttcaccttcttgatggaaccaaagtacgtgtgcccttcatgaccggtgcccacgaagacagtcttgatgtttacgaagctttcaaagtcctcaatctaccgtatagagaaggacgcgaagacagtcgtggtttctctatgcaaatctatctccctgatgagaaagatgggttgccttcaatgctggagagcttagcttctactcgtggattcttgaaggacaacaaggttcttcctagccagaaggcgggtgtcaaggaactcaagattccaaggtttaaatttgcttttgatttcgaagcctcgaaagctctcaagggtttgggtttgaaggtgccattgtctacgatcatccacaagtcttgcatcgaggtcgatgaagtgggatcgaaagctgcagctgctgccgcattaagatcatgtggaggttgttattttccgccaaagaagtatgacttcgtggctgatcatccttttctcttcatcgtcaaagagtacataagcggactagttttgtttcttggtcatgtcatggatccttctaagcactaatttgatgtccaaagtctcgggacttaaggaaaatgtttttatgacgttcttgacgtatttgaacttttatgcccactggttttaaatttggaaggaaatttgagttttagagatttgtcgttagctagttctcggtgttttgatatgagctttatgcctttattcattggttcatttttcccatgcctttacttttgaatgattcaagtggttagactcttttcaatttctttgcttatagcatagtaacagcatgcgaattcaactttgttttttttttattattattgtaacaaaacacaacgtatgttgttgccaaaaccatcctgaagccggtaaaccaagactctgctcataattttcctaaaccaaatggggagatcgaaatgtaatcgatgcatggaaaaggaactagaaattgaatgaaacttgtgtggcgtgtgatgcaagctactgtagcagctgtagcatcagcctattgatgaaacgaaacgctagctcttaattgggaaacattggatatacaatgtctcttttatgtttatcggaggatgaagtggatgattttagttagatataataacattcattcactatgagttggttttgttcttacacataaatgtaaaaagagtctagaccatccatgcaggttcttagctagatactaccagatactttgcattcttctagtagattaagcaagtcgtgttccggcgcactaagtgaaggcaagatcggacggttggtattgcattggctagtccgcgatggaattgacgtcacagaaacatcagattcttcatccatcccatcttggacaatagccaaatcacttcgtctcctcatcgaagaagccgacactctctctttccagagtctcccgtcctgtgatcataaaaaatagagtgaagctttctacaaacactcctatctttgcagttttcactatcaaaaaaaactaattttttcttttcttggaactttttcaagaatcttacattgagaatggatggctctgggagtggacattggatcggttgatcgttgtctaagggctccatcgggtgatccaccggtttaaactctgttgctacttcgatcccatgagtttcagtggttgtggtattagttgccggagcaagatcagatcttggagacaatacttccctgccatcctgatcataggagaagatttcatgtcaagtgtagcctgaaaccaatttagggcttttccagataaataaaagggtctcagattcaactatagcttgaaatctattaaaggtaatcagattacaaaagaacagagagaatcttgaaccaatgaaaggaactcaaaagaacagaagaagcactaaacatctcccattctaatcatcaactctttgagcctagttagcatctatgatatgagcaaagaatctgtccaacaattaaacaaatgtactggagaagtgtcatactaaaaaggaatcactatgaacataaagctcaagcacacaactaacagaacaaaatatcatgttccatataacctctactggaatcagacaagcaaatagaaaagagagcttacgatggcactctgtgttcgtctatggctgcctctaacaacagaaaacctggagaaaataccaaccatgctattgaattcgattatacgatttttttggaatagacgaatttcttgatcttcactttgaatttcacaagctaaaacacacaaaataaacagtagaagaaaagaacaaaagcagagccacaaagaaatctccagaatattgcagtggactgatagataataagaaatgctttctcagctttaagctttaagctttgcttggcttgaacagattctctgttatggcttctttctttctgtctcttctaatttatccttcaacaacttttctttggctttgaaaattagtattaaatgatgattcatcgcattattaaaatgaaataattcccttattggaaaatgacaattttttctggttcagctatattgttttgttcttgagagaataaactattcattcaatccacatcgagaaagctacaaatcaactagacggattatttaatatgactaaaatactagtaataattaagctatttgaaccaccagctcaagaactcaagtgttattgaagtatcttgtattctttttcaggacaggctaggtactaactaatttgtcgttattctttttcaaggaaaaaaagtatattaaaaaaaaactaatctaatcagctaatgctacgtactacgttcaaagccagatttattacactacaccttacctaatctcgcctaatcttttggctttcgtagttattagttaattgtgaagttattagctctatccagatgatttaacaaatgaaaatatcttgagtctttgtttactatccttgtcctagaaattgaaagcaccatcagagccagcagtggcaaaagtaccatgtaccttataaaatacacacctcaaacaatcaagtcatcgttatgtcaaaaaaagaaagcaatcaagtcaaaatttgcaaaagaaactatggttcagttagaatttttaaatatggacacaagttacatgaaataaagttttgattttggttttggacccttgaaaatacaccaatttgtttgtcagtttaacaatgtcccggtgcaaatttacttcacgcacatgcgaaatttatgtagccatgtcggtctccttttaatgttaaaaggaaaataaaagaaagaaatcagaaaacagcacaactttggattaaaaaaagttaactaaaagaaaaggaaataaaacgtgagcgtatttaggaaaatatgattatacaaatatattaatttgattgagaactataatttatgataactctataattagggttcttgtgttgtgttaagaggttttagttcaaaaacataaaacaaaagaagagaagtaaaagaaagaagtcgtctaagagaatccaaaaaaatccaacttaactcgccgtaagaaagatggaactggacactaccaaaaaaagaaagatggacctggaagaatcaatagagaagcaatataaggccatgatggacctgaaagaatcagtagggaatcaaaacgacattgttctgaggttgacagcacgtgatcgccactacctcccgaaaaacctcgaacctcgtcttctcgccagcgttaatcaacgtcatcctcagtattatcgccgccagttctcccggagacacagacaccgcagacaagattgtctctttacttcaggcttcttcaaccgataagcttcacgctgtatcctccgagatcgtcaccaccgtcctcgccgacagcaccgcgagtggcggcccgacgatatcggcagcgaatggcttgtggatcgaaaagactctcaatgtggaaccttctttcaaggatctcttgctgaattcgtacaaagctgctttcaatcgagttgactttcgcaccaaggtactctctttgatccaaataaacctaactcctttatatatttactaggtattatattatactttacatgcttagttgtatcatgtatgtaacatagtgacatgcttagatgtagcatagtaacatgcttagacttagatgtgttcgtaatcagatttacccaagcctttgtgaaaatcaaatcatagatgttagcgtataactgtataaggataacattattgaccggaaaaaaaaaatgctagtgtaacctaattcccttaaatcttctccaaatatttccttcagttttcacctatatatatgaaaatcattcggtgatcaataacttagctaaaaactggtttctatacaaaatcactagggattgtactaatatattgaaaagtgtgcttagtcaaagtatatacacaaggcttttgtgaaatcaaatcacagatgttgatagcttctctgtgtttgtttgttttgtttttggaaggctgatgaagtgaatagagaggtgaattcatgggttgaaaagcagacaaatggactcatcactaatcttcttccatcaaaccctaaatctgctcctttgactgatcacatatttgctaatgccttgttcttcaacggaagatgggatagtcaattcgatccatctctaacaaaagattccgactttcaccttcttgatggaaccaaagtacgtgtgcccttcatgactggtgcctcctgcagatacacacatgtttacgaaggtttcaaagtcatcaatctacagtacagaagaggacgcgaagacagtcgtagtttctcaatgcaaatctatctccctgatgagaaagatgggttgccttcaatgttggagagattagcttctactcgtggattcttgaaggacaacgaggtccttcctagccactcggcggttatcaaagaactcaagattccaaggtttaaatttgattttgctttcgaagcctcggaagctctcaagggttttggtttggtggtgccattgtccatgatcatgcacaagtcttgtatcgaggtcgatgaagtgggatcgaaagctgcagctgctgccgcattcagaggaattggttgtcgacgtcctccgccagagaagcatgacttcgtggctgatcatccttttctcttcatcgtcaaagagtacagaagcggacttgttttgttccttggtcaagtcatggatccttctaagcattaatttgatgtccaaaggtctcgggatttgaggaaaatcttcttatgactttcttgacgtatttgattccatgcatcacttgagttaaaagttgaaattgactttagttataatcctcgtgcttttcatctttttaaaaagatttatctcttttcaatgatttttattctttggcctaatatgatggctatataaactaggtttcacaaacaattaatattaagaatgtatgaaaataactatgaaatctcgatcgaaaattcttgaattacaaaggtttttttttcctcaatttgaaaaaaaagaagaagaagaagaagttaggatcttttagctcaaaacaaggtaattagggtttatgtgtgtaaatttgcagatttcttgcttaatttcatatctatttatttatttatggaccgattatcggtttatacaatttacttataaaattattcttgatacattcactatcatttggttctgttcttacaaagaaaagcgataatgtgatgagagtttaggaattggaagaagttatatatatttactctcataatgataagctttgggttacatatgtttatatatagtaaaatggtttcctaaactaagatagaactaaatctttacatatgaatataataaatataaaatattttcatattaacttgtggatcttctggatccttctacaagtactcgttgtcgagaccatctctggtacttgttcaaaacataaaagaaaacaagagaagtcggtttaagagaatccaaaaaaatccaacttatcctcgccgtgagaaagatggacctgaaagaatcagtaaatgatcaatacgacatcctggagaacctgaaagggtcagttgggaacctaaacgacatcattctgaggttaactcagcacgttatcgctagcaccgccgggaaaacctcgaacctcgtcttctcgccggcgttactcagcgtcatcctcagttttgtcgccgccagttctcccgatgagcttaacgctgtctcctccgggatcgtcaccaccatcctcgccgacagcaccccgagtggcggcccgacgatatcggcagcgaatggcgtctggatcgaaaagactctctacgtggaaccttctttcaaggatctcttgctgaattcgtacaaagctgctttcaaccaagtcgactttcgcaccaaggtactctctttgatccaaattaacctaacttctacataaatcatagatgttgatagcttttctgttttttttgttgttttgtttttgaaaggctgatgaagtgaataaagaggtgaattcatgggttgaagagcagacaaatggactcatcactgatcttcttccaccaaactctgcttcttcttggactgatctcatatttgctaatgccttgtttttcaacggaagatgggatagtcaattcaatccatcgctaacaaaagaatccgactttcaccttcttgatggaaccaaagtacgtgtgcccttcatgaccggtgcccacgaagacagtcttgatgtttaagaaggtttcaaagtcctcaatctaccgtatagagaaggacgcgaagacagtcgtggtttctctatgcaaatctatctccctgatgagaaagatgggttgcctgctgtgaggtttttagcctctttacctctagctttcttactcacaagcacacaactactaacttgaagcattaagaactgacttgaagaatgttgagcagagactgaaacttaaagaaaaagttatgcaaagatagagaagtgtttaactatgaagatgcagagaatgagtgtgatgcagagctgttaaagaagaatgatgcaaggctggaaaaacgaacacacacggtttaacgagttcggaacctcaacgtgaggaacctacatctcgccgggaaaaatcccggaatccactaaaccacttcaagattacagctttgtccctcaccctctctaggaacttacaaagctctctctctcttatgttcactctgttttcccaaacccttagccttacacttacttctctctcacttgtctcactcctctgttacagagtcaaaacaagacaaaacttgtggtccttaaacttggtctccaagctggtctctcattggctctttcaagtagggtcgcgaatccgtacgagaaagcaactatgagaacgttaatgcttgtccttagaccttccacacgctttagagacttaccttttcctttgaagacttcagactctctgttgcaatcagagtgtctcattcctcttcatctttcttttgtctaagccacttagtcttaacacctgcaatgttggagagattagcttctactcgtggattcttgaatggcaaagaggacattcctagccactgggcagatgtaggagaactcaagattccaaggtttaaatttgattttggtttcgaagcctctgaagctctcaagggtttgggtttggaggtgccatccactatcatccacaaatcttgcatcgaagtcgatgaagtgggatcgaaagctgcagcggctgctgtaatatttgttggttgttgtggtcctgcggagaagaggtatgacttcgtggctgatcatcctttcctcttcctggtcaaagaatacagaagcggactaattctgttccttggtcaagtcatggatccttctaagcattaatttgaggtcaaaagtctcgggactttatgactttcttgacgtatttgcatccatgcacaacttgagttgaaagttgattctaaagactttactgaatcctcgtttttttcatctttttaatagatttatctccttttaatttggtatgagtgtgaagtcacctataatatatatgatgactgcctaagtttaagaccatccctgcaggatattcgtatgaagtcaaaacagagtctcttgttgattcgctaatattcatttcttattgaaatttatttgtgaattccaaagcaatgtgttgcatgaccgaagttacccaagttcatgccataatgtgtttccacgactgttgggatttttgcaggaaatatactctacttcaggggaaacaagtaaaggatacctctactatagcaaatacagtactcccaaatatataccaaaaggctaagactgtgaaaaggacttaaaaagaagccacaaaagctaatatctaaatcaaacccaactaatgaaacgactacttgatggtcacaaacttgttagtaccgtgtctggcccaatggttcttgagatcaagagggtgagagaggtcatagccttcgtccgcaagcctcgcaaggagcttaacataagcaccattgctcatttttcttcctgcaagacgagctccaggtcttgttgtgctcatgggtagtgggtatgtcgatatgctgatggtacaacatgaggattgccaaccgcccatgccccatttgtagcaaacccttgaaacgcctgtacatgaacatacaggaggaggaaccccagaagtatcaaagcttgagatgtcaatgttgatgtccagattctttttctcacgttttgtttctggtatgctaggtgttttctttgacttgttggatacagagcgtttcttcctttgcggttttggcttcaaagctttcgaaggagactgatttacggacttctgtttcacagtttcagtatcgtttctggaatctctaataggaggaggaaacaaatgagattgaggcaccatcacaccttcagcaggaggttcctgagaaagatcaatgcctgtggtctttggaacggcgatacatgaatgtaaccaatgagcattagacgtacgcaagcctgagtccttgtttgcgtttgtagcagatagcataaggttttgtgcaggaaatgaattcatcttgatagctagtttcagtggaaagatcacaccttcgcgttgcagctcctacatcatttcaaaagcagataagatgagccaacacctccaaacaacaattgatactaagtactaacattattaagcaacacacagatgcagaagcaacctacatgctctacttacagagaatataatctatagtttacttccagtatcagttttcaatcaaaagacagagattttacaagacagaatctgatatgcataagtctaaataagcaaacttgataattgaaacccagatagtcagaacagataaaacagagatataaagactacatacgtagaggaaaagatttgatctttcaagattgtttgattgaaaatcggcaaacccagaagagttaacgaaagaagaatcaagacccatatgcggaaaaaattaactcgctacaataaaccatgcaaaatcaaaaacctgtgactagggttccaaaagaatcatacggcagaaacagagtcgacaccaaaaaaagagtgatctttcggcttacgcaaacgagaaaaatcgtcggagttaccagtggcgacactccaccgctatgctctcgctcactctgcgcactctttctctctcaaacctctgatggacgaaataattcactttgaggccttgagaatttctagggctcaccgatttttaaactccgtttctttttgccccacgcgaaatttatgcatatattttaaacaatataaaattcttaagtttacaattagtcaattagataattaaactttgaaaatttatttttttgccactaagatttggtaatataacacaatatttaacttatctatgcaatttataaacttgtgggaaagtctttggactttgggtttgggcactaaatatagttgatctaaactaatatgattaagttagacaaatatagacatgaagtgcttgtttctctttgtcatgagatgatgagaaacagaaaacaaagaagtgtctatgttcactaagtggcagaaaccaaatcaggaggaacagaagcaagatcaagcacccaagactctttcagatcagctccagattcatcttcaggcagcttcttggccggaatctgatgagagagcaaggctgcaacatcttctttctcgacccacctgactgcattatacccgtaatcccgtctcttgaacaggttgctatagtcgttaaccttctccaaatatgctacacttaatccatatgcatcagtatacattgtcaagcatacgacaatctcatagcgtctggtctttcttctctgaagacctggatttgtctctgagtagactgcccaaaccgagcctttctttggatatatttggtatatttctcgtgcagccctttcgcagttgacaaggtgagagaatggtttcacttgttctatcaaagctttctctgaaacccggaacctaccacaaggcatatgagaagaactaatcttcatccaagagattagtttctcgctctcaaaatccaaccagctgatccataccttaaaaggattcaaagagactacttcactaactaaacagtaactccgaggcattttgtcatcaccaccatcatatatcgcccaaatctgccctttcttgaagctcctcggcatccggtccttatcaaaatcatacagttcaaaatcctcgtcttccatatacatttcttggcttaacttaccacgatccctcttcctatcaacccgaggcacgtattctaaatccactatctcagttaaatccttgtggttcgccatcttcttcttctttatattcttcctattctttaaaacttcttgtttattattcactgcgttagtactcatctcccttaacgtttcagtcatggaggcatcagctaaagatctcttctgcgtttcccttcccatgttttcttctccactgctatctttctcagtgatcttcgaattcaccttcgacttatttctctttatcaccgcttgcatttctgccaaagtcatcatcccttcatcctcttcatccgacccctcaaatacattaatagcttctgctgcttcctgactcatctcccctgtctcaacttcttttatcagactttcaccatcgctatcaacaggcctcttcctcctactatatgttatgatcttggaagtacaagctccattttctctaccctcttcttccttctcaacttccttcgcctcaaaactattcttgcaagtagggcacatcaaattttgtcctaaatacttcctatcaaacttatgcaccgacctacaacccgaacaaaccgccgaaaacgttgacgtttcatcaccaccagaaccaccgctaaccatttccccctgaatcctaatcctcaacttcatatcatactcagtcctcctaaccttatcagagaaaaccctaaaggcctcattcaaaagtttgaacccctcctcacaccccacatacggattcttatcaggatgcaacaccaaagctagcttcctatactgttgttttatggtattaatatgagaaaaaggctctacctttagaaccttgtaccattccggaaaacctccggcgactgtggcggcggagctgatgatctcgaaagcggtgaccatggcggataaaccttccgtgttcggagacaagctgagagctttccgcgcgtgagttaaggccgacatcaaatcaccgcaattgaaactcgattccgctagtgctttgtggtgtatggattccttttctacttctgagtctgatccagaagccattgctgtgtagccggagacgccttcaaaaacttcaactttgaaagagagggctaaaaagagagagagagctctgctttttctattcccttgaattcactcaccctagtctttttattattttctttatcaccctcttatttattaagaatctcttttctgcccaatagttttttttgttagtgttcctaactattttgtcataaagtcatttattgtttttgatgacatgtaacattaccaatgagtcaatgcactatcattctatcaatgtgtattgtatacataaacctattcataacatttaaaatatacttttgcaaagacactttttccatatatttatgtcaattttgattttaaagatcttccttttcaattggggagaaacttttttccttatcaaattgtgacattttgggtgggttacaaattattgtaaggctttaaatgggtaaagttcataaataagttataaagaagggcttttaataaaaatacttaaatttgggcaaagaagcaatttttattcctcgtgaactccacgccccctttcttctccgtcagataacaaaaaacaaatcaagcaaatttatttatcttggtcaagagacattgattctcttaaatttctgcaaaattaagctcagagattcacaccgcatctgaaattgtgctcagaggggttccaaatattaccagtcgttaggtatttctgttcacatctctccaagtttgtatctttggggttagattttagcgtttctcttctgaattcgattgagttttctagggcttttcgagggtttctatatatacttctcggttttgtgttattgtgtttctccggtccgacattgttatttacctgtttctgcatcttgagaaaaagactagacctttaagctgttgttggattatcaatatatatatatatatatatatatagctgtattggtcaacgatcaataggagaagtttggaacgaaatctctaacatcttattagctgaaatgttgaattgttggatgtgttgagtttatgcatgagtagatctcgtagtgagttagcttatagctgacttcgtcttgcaggaagcaatcacgagttgttttaggaattagtgaacgtgataatggctagcaatgagatggaaaaatcgagtaaagagaaggaacctaaaacacctcctccttcttctactgcccctccctcttcacaggtttgtgtttgcccttctctgcttccaattttcttaagaggaccataatgtaaaaagggaaaacaaatcccatgatttaagctattagaagccgaattagaagtgagatactagaaaggaaaataaaaatattctagatttcagctaattgtgattttgtatacctatcagtgatatgctttagttggaatatttctgtgtttgtaggaaccttcatcggctgtgagtgctggcatggctactccagattggtctggttttcaggttaggacagattcctccatctatggatctgcgctctcttttcttgttgcatttgatctttacggctttcttttcgacaggcatattctcctatgccgccgcctcatggttatgtggcatctagtccccaacctcacccttatatgtggggagttcaggtgaactggcttacgctttatcgctttttactgtgatgtctatcggtgttcagagtgctggaaaattgcaacattcttattgacttataacgaattcgttcagctgtctttcatcatatctttgattgattactgaatgagacattaaattttgcagcatatgatgcctccttatggaactccgcctcatccttatgttgcaatgtatcccccaggtggcatgtacgcacatccttcaatgcctccggtactgccaactgtagtagattcaattgcagtgaacataaattaaaatgtagctgttaattatatctttaatatgttccattctgtatcagggttcttatccctatagcccttatgctatgccttctccaaatggaatgactgaagtttctgtgagttagcgtcccatcatacttcattcgttctttctcaaacggtctttgctacctttgcttattgtaggaacataattgagagatgattttatgcagggcaatactacaggcggcactgatggtgatgctaaacaatctgaagtgaaggaaaaattgcccatcaaaagatcaagaggaagcttgggaagtttgaacatgattacaggaaagaacaatgaacctgggaaaaactcaggagcatcagctaatggagcttactccaaaaggcatgtaacacgcttgtttttatccggtctatgtgacgtggcatgtatgcatggttgttatcttggaaatattattatgtttggactaggaccccttttggacttatgctacttcattagataatattcattctattattgctctgagattgtcagaattgtttggttacagtggggagagtgcttctgatggttcaagtgaaggaagtgatgggaactctcaaaatgtaagtttcggatagctatcatcagccttttcatttgaattatatctttgttggtatgcattcattctggcaaccatgttgtgatgaggcgctgtttcatggggaacacctagtttgtttgctaagaatctagcatgaatctgaatttggattgacctattcagatctgtcagtcccttggaatttctcatttaaattttatgagtgttgctaacacttggaatctgcacactggaacacataacctttgcgttccatatgtcgcctcatcaaacgtttttgttggatctttgggctcgaaaagtcttaatgttatttccgtctttctatgggagtgaggagttcttacagtaattatgactgattctgatttgcttgcaattcatgtaggattcgggatctggactagatggaaaggatggttggtttacgatcttttctttttcctttcgttactatcatgcggctaacaccgtgaaagctacttatcagagagttctttattgtttttccattcagctgaagcagcatcagagaatggtggttctgccaatggtccgcaaaatggaagtgctggtacacctattctaccggtgagccagaccgtaccaatcatgccaatgacagctgcaggtgttcctggcccaccaacaaatttaaatattgggatggattactggggtgctccaacttcagctggtatccctggaatgcatgggaaagtatctacaccagttcctggagttgttgctccaggctcgcgagatggtggccattcacaaccctggttacaggtgtgcccacctttcttaggcagatttaaatcgccttttatcctcaaactcagatttgtttgtcttgcaattaggacgatagagaacttaagcgacagagacggaagcagtccaatagggagtctgctcgaagatcaaggttgcgtaaacaggtactaaacatccatttagatcacctctagcacgcccatgtgagcaaattattgacccggtgtttgtgatttaggccgaatgtgatgagctggcccaacgcgctgaggtgttgaacgaagaaaacacaaatctcagagcagaaatcaacaagctcaaaagccaatgcgaagagcttaccaccgagaacacctctctcaaggtaaaaaaaaagtaatctttcaaaattagttttagagccagccaacgaaacagttaccaactttgttcttgcaggaccaactttcattattccctccacttgaaggcataagcatggacaatgaccaccaagaaccagacaccaatcaaacaggtgccgcagagagaaaggttgattcatacaaagactcaacgtgagaagacatagagcaaaaccaattcctaacacaggtataaaaaagtagcagcagcagcaacaacaacactcggcggttctttgctaacagatggtttgtaggattttaggcatcagagatcgattggttccgaatagtttattgagggttgttggtccagtgtatgtgtgtgtaagttacgaaattagatattgggagaaaaaattccctcgtttaatgttttactttgcctttgctctacttgcagaagcgaatctgaggcaatgtgcttatctgtatcaaaattgttaccctttttattagcttttcctatttattttttcttcactttatggatgcgattgaatttaagtgaaatgaatttagtaggcctaccatttctgtatcctgatgatgtatgttctttgtcacttttgcgtagaacctaaaactggctgtggagttggctcaatcactatgagaaagtagcattaacaaaagaaaaacaagctcttcacataagggctactaagatgataaaatctcaaatatcagaaataaagtttatgatgtatggaaagcaagtgcagtgattgttctcaaaaatctcatgagatttatgtccggcttgagaggtgtttagtttatcccaagaagtttatgatcactaggtggaggactaagttgcagaggacaaaatcagcaaaagctcgctccggtgctaaatcctgcaatattcaaaaggaattgcaaatatgaatagctgtcttctgaggatatttagacaacattgtggaagcataatgattactgaggagttgaagaaactgtaggagttcgttaccttaaattccttgttttctttgttcacttgaatccggaggcagactatacagaaaagaaaagaaaagaaaagaaaagaaaaacacagaatgtcatatccgtatccaggacattcccaagctaatcttttaacaacaaacagatacaagggaaacttgtaaacacattaataaactaaccagcaagaaccgctgtcccgatacacgagagaactccagagagaaatgagttgaaaggaaacgatccaacaagagccatgtaagcaacctgctcaatcacagaaattaaacacactaaaactaagtaaccaggttctttaatacacagagaattcaacactgtttatcaagaaattctgtagaatttaacatgagtcaagaattaagcaacaagagtttctttgatatagtccttcaaaaaaacacagatcaaacatttcaacgacaaagtaatggatgatgctatacaaatgaacacaaaaattgcaaatcaagtatatcaaatttgagtgtctttctatttgaaaatacacatatcaatacatatgaacataaaaactcatacatttgaaatccccatatacataaacgaaacgaaaaggcacggatcgagaggcacagtcgaagcaataaaggagattagagtacctgaatcaaagctgtgaagaccgcgaaacaaacataaaggtcgatgatctacaaaaacagagttcaaacaagaacattcagcggatttttcaatttcaatgatgattcataaaagatcagaacaaaatgataatggtggaccttgagattcgttggtgtagcggtataagcagagtgaagagaatggaagagatcctgagcatccttactagtcgatttcaccatttcttcaaagactgaccaacacaggcacagcaagcaaacttttctcctgcttcttctttttctcttcttcacgagtctggtgctctcgctgaaatgacgttgtttcaggatttgctgattaaaacgggctgtcattgtttggggcctttgggcccaagcctttttaagtctgaacttcgaaacgtcgccgttttgttatgagatattttctaaattatgttttccacagtttgtaaatggactaccactcgagcttgttcgaaaaatctttagacgttactcgagggctcaatatgaatttggcgattaatttaaaaatcggaaataaatatttagggttattataatgtttttaaaacattttaatctaatattgttttgaaaatggtagtaaacataaaaatatatttttaagacaacattttatgtttttagttaaaattttgtacataagttgctataatttatcatactcttaatgtacatgtttgaataaaaaagaagttgttttatatttaaaatcttaaataatcaagatatacaaaattaggtacgaaataatcggattagatggaaggtaattagataactgatttcttcaagagattaatcattcaataaggcaggcagagtggatgtaacaattaaaaacggaataatcggagatacactgaaatttttagaataaacacaactttaacaaattcaaagagaacgtttgtaatttccttgtacagcgtaaggaaagtttagataaaagatgtatataatataataattgaatgcatacgtaagagatgagtttattttcaaatttaacgtaaccgaacaaaataagttttcttctaaattccgtaacatatgtcctaaccactcaaactaaaacaaaaattaaatttttttctggtctgaagtattaaaaccacaatcttgacaaaattgaaaatttattttttatgataacaattttataaatttatattattggagcgatatctgacaaaactagtttaaaactgaaaaaatgtctatgtaactataatagagtagtttacaacacatttatttacttgtttatacttgatagtgaaattggccgtgtttgaccgggtcagaattgataggtgacggtccagttagaattgggctttgacgtaaaaaaaaaaaatgtgtaactttgttctttgcctaaacgattggctttgtgtccaagagtagaccgccgacttagattttttcgccgacgagagaatatatataaatggctcgtctttttccaaacgatttcttcttcttcgtcgtcgccggtttagggtttccgttgctgtagcaattttctctcgcttctctctccccttttacagtttctcttatattgctcttgccttgcgtccaatctcaagagttcataaggttagtttaaatttgtctttattgatataatctatgattctgtgaattggtgtgttacatttagtcgaaattgttgtgaattgtgttgttcttgagatgttttggtgtcaattgatggtttatttgcataattttattaggggtttcgctgaaaagctgaaaaagattgctattacataatttgttaagagtgaaaatgtctcgtctaagcttctgttgttatgattcatgtattcacctaaacagaagagagcttgtctcgacagctttgatagcctgttgttatttgttggtctgtttctgtctttgaaggttaaattttttggcttgtcttacagagttgacatttgtgaacatcgaagaaatacggtgacgtttcttctctgattactttttgccaacatgaatactaatgtatttatcaacaagtgctacagcctggtaagtctcaagctttccgatgagtttaccgttctatctagtccggatttgtatctgcagttttgcttctttgttctgtcatgtttgttataagatcttgccttctgagtagctgaacctcttttttcatccttgtgtaggttagttgtcacttctttcctttcttgtaatctttcttatattgtttttcctatgatttgtaaagggattttactggtatcgattcgacagtgttgtttcaattgaaacatgatgctttgtaggaaaactcatgaataactgttcatatagttgctttctgttggtgtttatagcagtgtctttttgttaagtaggttattgcatgatgagagtcttttcatttttattttatatacagtcactgcacttttttcatatctgatgcacacctttcttcttgcagtttttttcgaagctgttggtgagttcccatccttagtactgctagacagttcggtgtgttagttgactttatattcaaggttataggtttagtgttgttagtagagaaaaatggaagccaaaatcgtcaaggtatcggatagtagttataaagatggtcttgggaagaagagaaagcatccagggaactatactccttatgattctggaaggtcatatgcaaagctgcaatgggtgctttcacccaacagttccacccagaagcttgagaaaaggagaaatttggatggtgaaaacaaagttattgtttctgagaatcatgttgagaagtctttggtcagatacttctcttattataagaagacaggagtgccaaaacgtgtaatgttccatgagaatggtgaatggattgatttgcctgatcatattctatgcgacatcaggaatgatcttgaagcaaagagagctacaattgagttcaattggtgcggtcgccattttctcctggatttcttgcacatgtatcgactagacttggaaacaggtgtaaaaacccagcttgcttggattgatattgctggcaaatgctttttccctgaaacttttgacaccctcgaaagggacggctgccatcatatccgtggggaagatccggaacaacatgatcaacgtgagatcaagctgcacattgaaattgatgtaaatagtggggagttaccgaggctgaatttgaatgtggtcactgacgagtctggtgacaatatggatgattttcaagctgttcagagatcctcaaatgggccaaatgacgaggcatcagaggatagctgcagccgtgagcttgatgatgctgttgagaaatgggacaaaacagaaactgatcggttctctggtgtcaagcctgctgaggaggagcttgataaagatgctgtcaaacaaatgtttgctttgggtgctgccactctagggcatgtagagtcgcttgatgtgtatcagttttcaagcgagattgcaaaggctcgtctatctcttttccagaagcaagctgacatcactaagaaacaccgaggagatgcaaacattagatatgcatgggttcctgcgaagaaggaagtgttatctgccgtgatgatgcatggacttggagtgggtggagcattcattaaaaagtctatgtatggtgttggggttcacgctgcaaactgcccttatttcaggtttttattcgccctctatgccagttcctctctcatttagcctgccttatgctatttttgtttcactttatagttcatttgttttatggttttatctaagcacatgtgaaagatattgtttacagtgctagatactgtgatattgacgataatggtgtgcggcacatggttttgtgccgcgtaataatggggaatatggagcctcttcgtggtgataacacgcagtactttactggtggagaagagtatgataatggggttgatgatgttgagagtccaaagcattaccttatctggaacatgaatatgaacactcacatttacccagaatttgtagttagcttcaagctgtctatccccaatgctgaaggtgattaccatttgttatttctcctgtaatttccataaaaatcaactgatgacgcattgaatgggagacagcatatagatcttactgaagatcagctatttggatcctgaaatcttcctctataagttagaaaaggatccacatcaccttgtgacctctgggggtggtaaacatacttcatcatcccaagggtccagtgagatatccatggctaatatatatgggtatttcgatgatcacatttgttttctgtagtattcgaaacgggatgacatgttttgtttgtgcagggaatattcttcctactactcagagtaggcacgagagttcgggactcaccttggaaggacccaaaggttctccctcaaatgtaagttgaattgtacctgatcagattctcattttcaagcagtcattgttaatatttgatatggacacaaacgagtaatgttgcttgtttgtatgaagcaggagccaggaagggtatcaaatggaggttcagggagcgaaaagaatagctccagcagtagaaggcccagatctcctataatgcctttccctctgctgttcaaagcaatctcgagcaaaattgctcgtaaagacatggatttgataattgctggttaccaggaactcagggtaaataatataaaccatgtcttttaccaatagtcaaggttatcatattgtattaacataatcggtgtgctcttgcaggagaagaaggtgtcgagaaaggaattttataagacgctgagtatgattgtaggagatgatgatctgctgatatctacaataacaggccttcaaaggagtttgggttagattaatgtgtcgacttctctttgctgtcgtgaaaccttaatagtttggattacgacaaacgtgacttgatctttagaaacttagtagtagtactgttatatttactcttttggtgaaactagtctccattatcctgtttttctttacttggaatcaaagagtcttttattgatcaacagccttggttctttgtgaggtttaattcatcagctggaagttattcaacagccttagttttaaaaagcgcgctaatggcgtgccatggcgcatagcgcaccgatgctctaagaatagggcaacaagacgtggaggcgaggcgacatctataatgcgcacgccatacgtgagccttggccgatgcacaaggtggcaaagcgatcgcctcttgtgttcaggcgaaaactcttcgaaaccaacaacagaattctgtgattttagggtttgcacgaagaaatgactaggaggaataggataaaccattttctaaacctagctggttaatacatgattcaatttagctggtcaatacctaatccacgactagaaagtttaaccatgagttataattagcttatcaaaccaaatcaatcctaggtttatcttaaactaaaacggatttgacccttacctcttaacccacgacattttaaccagttagaagatgtaaaatccctaatttttctaaatagaacaccatagacgatataagcttgaaggctaaaaccatatgcagagaatctgttaatagaacaccacagatctaaaaagcgcgcgctttggtgagccatggcacatagcgcactaaaggactctctgagccatggtgcgctttgtgccatttaaaactcagattggtagtcaattctcaaattatccaatatacaacttctttaacaattaaataccattgacaatgacaacaataacagaaaatttcttcaagagcattcgtttgtaggagagagcaaaaagcatgtcttgacactgtttatgtaaactgtggatgaggtccagtgtcagacgatggatcccatcccggcggttttatattgggccaatcgccacggcatcccaagcgtatgtacaaactcttcttaccttcaatatcataaaagacgcatttaatctccaaaacatttatcagattaaagcatcaatttacaaatgggtttcttctatttattacctggaagtcccttgtctgagatgatcagttgcttaagtgcactcaaggaagcctgagccacgctctttgcatgcgtcgggtcccaaccttggagcttcaccacaacgtcggcgtttgaatacccaatctccctctcttgcttacttctcctcgcttcttctttagctgactcttcatctacattcagaaccaatcttgaatgtataagcagtgattctcgttttctgttcagaagggttcattttaagtggatgtagagagaaattgacctgtggcttcagtctgtgatacccaaacggtaaatccggagtaaagatgtctccactgatcagctctccccgcagctccatgtttacctcccaaagttgagacaacagtacgcacatggctgcaaagacatggagatcagtggctaatcttggtaactggaaagagattgaacactagacatgactttttacctgctcaagctttccaataccgaactctctgcttcagctacagaatccggcccttctgcaagaatccctaaaatgaagacaaacaaaagggtcctgagaagtgaggaagattcttgttagatgatgaccatgatccaaaagcaaacttacaagaatcgattgtttgcttggaaaagctttccagcaattcctttgaatctaaaggactgtacctgcagatcataacaagtgtataagactctgaaatactattcatactgagctcatgaacgaaaggcgggaactgaattcacccactgagaagaatctgaattcatacccaaggccaacggctagctctcgagacactttttggttgatttcagttgaatctccaacaatgtagattgatgcacctttaagaagttgcatcattcctgcagtcaaagactcccaggactcgacaatatcaggccacttcaattccccatccaccttcttcatattcacaaccaactgatcttcgtctatgtacctgttctggatcaaaaccaaaacttcagccctcaaggaaatgtcacacatcacaaaaacaagtcatataatgcaagatttacacgtagctaaccatattgtttcagagggcataatcttctcaaagagatggttagtctctagaagtgtaatcagcaatccattccgcttttctttaacggctaacgatgttccatctgcgtcaacagatatatcctttggagaaagtatctcacctgtctttaacctcaatcttaattccacctctttgccaccatccgtgaactgcatcatatatgaaaacgattcaatttttatctaactaatgtacaacaactacatgatcatggtatatatacatagaccttggaaccagccatttatacgcaattctccattttatcactcagactgatagaccagcaacactagtatagacgtgaatacgaaaattcacctcgtaatcgatagtgctggtggatacggcggataagcaattacatgagaagctattaaaccggtcggggataacattttgagagaatcgccggaagccgcgacgtcggaggctgtgaaatccactgaaaacgcgaggagaggaacgaatccgattcgaagaaaggaaggtcgcttgagttgtgacagggtttagtgaaggagagttgaagattatagccaaaccagaagcaaaagcagccattgatgattgatttcaaactcactcactcagacaaagtatcactacggggataagggaaagagacgaatacaaatcgttataatgggcctgggtcaggcccattagtttaaagtttttttttttttgaagttttaaaattgcgttttttctggggtcatctaaatttcgtgtgattttctaagacttgagtaatcttgttttccgaaattttctcaccaagctcgaacacaaagatcggccatggctacgctcttcaccgtcgctcgtccttcttcactcctctatgtttcctccataaatccaagcaagaccttctctccttctatctccctaaaacttaactctctctctttctcttttggttatcgtcccaagccactccggttttctaaaatccgatcttctctgccctcggaatctgaatcggaatccgacctagatgcgtctgcagttacagatgaatggggtgagaaacctggagatgcaaatgagcccgactctcagccagataatgtgaccgtgaatgtgattacggacgaatggggcgagaaatccggacccgaacttgaggaatccgggacccggtttatggaatcggatcctccaaggaacgaagacgagtggggaggagaaattggaggagaaactgaagccgacgctggaaatggaagtgcggtgtctgacccgacttgggagctgaaaaggtgtttggcggattcggtgtacggaactgaattaggtttcaaagctgggtcagaagtccgagcggaggttttggagcttgtgaatcaactggaagctctgaatcctactccggctccgttagagaatccagaacttctcgacggcaactgggttttgctgtaagttaaatgatcttgtttcgatgatgtaggaacctttagttgtcgctgagaatttcaacactgtgaattgagaatgagacattgtgaaatctttgatgaagaatgataataatccaggaattgttactgttgttccaattttgtgtattttcttgggttatgaaataggtacactgctttctctgagttgattcctctactagctgcgggttcgacacctttgttgaaagttaaaagcataagtcagtcaatagacacaaacaatctcattatcgacaactccactacactctccagcccttttgcagacttctccttcagtgctactgcttcatttgaagttcgaagcccttcaagaattgaggtaactaaacttacaaacaccagtttgagtattaaggtcactgaagcattaacagtttgtacttttgattacattccagtcaatcaaaccttaccattaaaacaaagctatgttaaaaaggtttctttgtagattgaatttgtattggtatcaccatctggttgtcttaatgtttggtaaatgtcaggtttctttcaaagaaggcacgctaaaacccccggtgatcaaatcaagtgtagatctcccagagagtgtgggcgtctttgggcagcagattagcctttcgttgttaaagcagtctttgaaccccttacaagatgtggcagcaaacatttcacgggcactctctggtcagccacctctcaagcttccgtttccaggaaaccgaggcagctcttggctcttgaccacttatctcgacaaggatctcaggatttctagaggagatggtggccttttcgtgcttgccagagaaggaagctctctgcttgagctctgaaatatttgataaagtatatatatagcaggcttcatgtaaaaaccgtaaccactacagtagagacatcttcagaataatgctgaatgcagattattgggcctaatcttaaattttaattatgtactcatttgtctgtcacgaaattagataagttcagtttcggtcagtagtaaaaaactaaaaagaatgattcagcaaaattggaggactgatatgagacaacgagtcagtctataggccaattggatccaatcgagagtgaaaacccgaaaagtaaacctgattgttttgttattgattatagaacccaaaatctctcagaagacattcctggttgtaattagaagaagaagaagaacagatagacgtgttagtcaagtaagtaatactagtcacaatttttagttgtccaggagattttcctatcaatccaccggttattaaaaactcatacaaagtgatacggttgagacaagtgtttccttctgagtatgttgtaatctaagaaacagaagggcctttgatgaattttggcggctttatctcttctgcaccatccactgcaaaatgtccttcctgatgacgctgttgaacccgcctctagcataaattggtttaatcagactggattcaccaacactgtaaggcctgtactgagtagtagttcccgtggatcttggaggtttgatcatcatcatcgaagcaatggggtatttggaccgaaagttcctcaaggacatgaacaagttcctatcaacctcacggttctgaggagtctgcgtgttaacatgtggtttaagacgggttgattgtaatactcttttcgccttgtctatgcttggctctgtattctttggtagtagaacctgagccgatggcttcatccggtcaagcccccggagaatccagtttccaagattccgaccaataaccatgtctctctgttgtatgttcttgtggaccctaagtgccatatcaaagatttgataagtcctcctgcataaaaggaaggaaagagagagaaagttaacacaccaatcgtctcagtcggtaatggaaatctcaaatacacaactcaagactcgtttaacagtagcattatctatacgactgtatgaccttagcatcaacaaatatatttcctagcgacaactacacttacaaatcccaaacgggcacaatataagacttcaatccaggaaacaccagatgttctatctctccctctatgaataaatgcatcatagcttcgtgtcactctactcttgaatctcacatcgaatggttcaagagcaatgtatagaattacgaaatcacataagtaagttcaacgaatcaaaaccgtggaaataggactagcctacctcttgattttacttaaatccaaccacttgcattgcattgcattgcttaaatcacatttttatagcgatacgggagtcagaacaaaactaactggacagtagaaaatcgaaatcaacctaaacacaataaacaatcagaacgatacatcaataacaaagcagtttcatcaattgaagaggccaattcatatacaaagaaacgtatttccagtcaaacctaaatcagaaacaaccaaatcgcaaaatccacaaaaagaaaagcgtaaagatgaaagaaacttcaccgatgcataaaatctcgaatccttggatgcttagggctaacaagccgacgctgggtcttcaatgcgagccggtaagtccgcctaatccccaagaagtaagctgttcctagagctaactcccacaacaccattactttctacaactttcttcttcgtcttcctctttgtcaccttctttcttcctcaacgtatttgaatacaatctacaattttcctttgaaagagccgccagaaatttcaatctcactcccatcggaatcacagatcctccgtttctagtttaaagcaccaggttgcttgatctgcgatacaatcttgaccgtccattttacttgttcgtcaagattttattttaaatgttttaatgggctgggcttttgtagccttgaaatatgcccatatagacgagacggacaaactttttatggataatttaggtttttgttcaccaatcataatttttggtatgcaatgtttttttttctttttttttagcaataattattatttttgtgtgaagcaataataatttgtttgcttgaaacgataagatttatatatatattcgctctaaaaatagaataaacttcagcaatcagattaatccgaatcaattccgttggtgttacagttattctacactctctatagatcccaacctctttcttttaaatatttatatacatctctctttttttgtgaatttttttactagattccaaagtaaatgagtagcgaatacgacaactctcgttattagacagagatatataataatcgcgtaataattatttcctatttaaatatgataaactcatgtgtgtgcatatttactttttatttacttatgggatactcaccaatatttatttgatacgaaccataaccttcactaagttttctttctctagcctccctcatctttctctctctgtcggcgatgcagaggatatcgttagactcatcagcttcgaagctccatagctatggaggacgaaaggacgatacctacgatattgatgacttgaaaccagcttcctcttctccttcttcgtcgtcatccgcagtagattacgacgatcacgagctcaaagactttaagccgcgacggttatcatcgttgcaatctccttttgttacgacgaatcagaaacaagagaagcttgttcacttcattccgattctcactctcatctgctttatcatcctttacctcacttcttacgctccgtctcaatcaggttggcttctcctattcaaaatccgacgatccacctgtttttgattgattgattgatcttctcgtgtttattgattttgatcggtttttcgattttgaatttttctcagatttggctcagtttaatggattcatgcgtccttcgaaacatctaggtacattgcagattcgattcccatttcgaattttatttctgttggtaacacattgaatttgagttcctgatttgattgttttgatctccactagaatcatccgacgaaaatggcgacgaaatttctggatttatcagagccgatactctatccatccgtagtagtgtacgaaacctacaagagacggaaagcttcacgacgaaatcacttccccgtcgccggacttctcaccggaaaaccgccgacttctagcaatcgcaatcttaatttttattcgtcgcatcgcatgtcgatttgtttacttccaattaaaatattgcgagtcgcgtttctgttataactgatcgaaaggcagataaaatcgaataaaacctcgccgccgatgaaattataactgtcatgctagagtacgctgacagaggcgtaggttaacagtagagtgaagtaggagtaggttagagtgcgcctttaagagtagttatgcaatccagctggaatttttggaccgttacagtgcctcgtgcttcggattaatattccagctggaaagaatcgtcgttgttgttcctctaggcatttacttggattcagtgaaatcagaaaattattactactatgaggagttaaagtgaccaatctcctctattcaataatcgtttttaaatattcctctatttatgaatcaaattcgataatcagccacatgtattatttttattgaatttgaaacttttaatcaattaattaattggtaccaaaccatacttgttaaaccggaatttatccaaaaatgaaactgatgaatttcatacattattttctaaaaaattacattacactactactaaattatcatcataggttcaatatatatccaaatcgatcaaataattgctgaactaaaacttaaagaagctgaaggaatcaaatctaaaacgtaatggcaagtgttaatgtgtccggttcgtcatatcaacgtgttaattagggtgctccacttgtgattaatttgatcaggaaaataatgaaaaaggacatttggtgagataaatgatgccacgcggtctgtcataatgacgactgtcactttagtccacaatcattatcgtgacgctcctctctcattcacttgtacgtgtcaaataatcattggcttgttcggttaattaccttccactttttaatcttgttgacgcagtttcctcttactatttgttgttattttaagtggatttatgacttgaagcctaagttttgcaaatagtgtcattcataggattcgctttcttatagatatttaagcatgatctctaattatattgtttcgttctatccattaaatctgatgcaaatgatgttgacgtgtatacattgacttctaggagattcgttgtagagtttgtctcagctaccaatggcactatagttcacattgtgagagacttcgcctatggtctactctcacgcctaatgttactgacaatgttttttctttttagttaataatataaattgtaagaaggattaattgttgaaaagccacagaaaaataaaaatcttataagatacggcactattgcaaaatgtttatagaaataggcactctttttcttgtcgaatgacgattttgcccttgttgaataatctcttattgagacatgatttctctcgatctcggctccatcaacgataatgaagaactccgacgatgacaaccgcttagtgctccggtaaaacaagagtatatgtcatctctcaacatggcttcccgttaacgatgatgagaaggcaatgaacactgcttgaagcaagggtggtagcctatatatagctccggtgaaacaagcatcaagaagaggatggcaagatcttgagtgccaatggcagcggcgatgatgagattcgagggtggtggcttagatatcgagatgtgtttttgagatctccaaatttgaaaatctcagaagaaaaaaagagattttaaacttctcaatttccaattgttaaacaattgcaaagttatcaaaggtgatttcaagcattcgttttgggtttttgttaagtggttcatattagatcaaattctccgattgaatatacaaatttggttttttcttattcgattgatgtggcttctccaatttgatggaaagaaaggaggaagaagatgaatattgacaattcgtttggttttcctattgggttccctatgtactagttcccttaaggtttagtttttgtgaatattagagatgatgaaagtatgaacgtgatggaaacaaaagagaaagaggatgaattcttacaattcgtttgatattctccttgggttccctatgtacaacttagggtttagtttttgaacattgtcggagcaaaaaaattcggtggagtagatatcagagatgacggaaacttaatgacagagatggatctgaaaaatttcttctcaactccgacctaacgctccgaagggtattatcgtcaaatttcatctctcaaaattccctttttcgatgcccacacgcaatgtgcttaaaatcaaagttttttttaaaaatgtgcctattttaacaataaacccttttaagaaagaataaaagacaaaccaaggcacttctacggtttgcaagatatgatcaataaccctaaggattgtttgaacacttgaagtaaaaaaagatggttcccacaataaactaaaaaacaactattaaactaaaaactaaaaaccactaattgaatgaaaaaaatcagaaaatcagaggtcaacgtggcacttggtgggatgaaactgaaatctttcatctgaactagaggtgctcaaggggactttgagatgacacttaatcttgggcctaacggcccatgagttcaaaaacccaaacttaaaccttaacttaaatctgagcttcacgtcgatcctgtaaaccccagacctccgatcctccctaaaatctctccgtccaccggcaccgagcaaaaccagtttctgtccgtttaactccgttccaaccaccgtcgtgttcttatgtccctgataaaacgacgtcatattcgcagcagaaaaacgctgatcaccgtagtaacctctcacctctaactgatcatagtgtatcccaagacgttgattaggattacgtatcgaaaagttcaacgagatattgtaatgaaggttatggcttcttggatcgaactcaaatcgcgttaaatcagcttccgtaacttggaatttcacgacgtttggtcggaggataaaccagaggattaaagcaacgactccaaggcaaacgagtacaccgatgaggatgttgcagatgatgtttacgagacaacctccgcaacaaaggagacagctggagaaacaaccacagataccgcaacctacgtcggagccgcgtcggccatgactgtagtaagttttcaccggtggcttgattggtggaccgtaactggcgccgtttaatccgttcgccatggcttcgagaatgtcgtagagagaaggaggagagatgtagattggcacggcaacgaattatgtgaagaggtagagtccgatatatagagtagatatatacaaataatatgtgtgatttttgatcttatcaaacaaacactaaaaagtaataatataaagcttaatgcaaaaattggaaaacaaaaaaagcttaatgcaaatacaagtaggattttaacagtgtaaacaattttggaagatttttatatatagttgtttgttatacaaaatcgaattgtttacaaatgtagaaattcgattggaactttatgatattggactattgggccgaacatgaatacatgtatagcccaaacatatttttatcgttttaccaaaaaacccattaaatgatatttacgtgattggtggtattgtcggggggatatggctgtgactctgagattaacgaattctttagcattttccagtcatcctctaacgtcgtccgtactgttccgaggaagcaaatcgatcggtactattactaagatagcatcaacaatcaggacggtaaaaatggcggcttttgctgggtctgactcagaaacaacgtcgtctacctcgagagttatcgattctcatctccacatttgggcttctcctcaagaggtcgcactcttacactttgttaattcgattgtggaattttttggatcactaagttaagcaatcaagcaattaaggcaaatgcacttaagattgatcctagttagatgataaggactgattaagtgatctaatgaatctccaaatatacgtgtttttcaggccgagacatatccttattttcctggccaagaacctactttgactggtgatgtcaatttcttgcttaaggtttaaacttagctctgacactattatgggttgttgagaaaaaatggaaaaaagtttcttctttgatacttgttgtgttattcctctgttttgatgttgtttgttcgtcttattttagaacatggaagaggcaagagtagatggagctctcattgtgcaacccataaatcacaagtttgaccattctttagtaacaaggtctcgtcctttttaatacttgaatctgcatttttctaaaaagatgtttttgtatttcttaacagaagatactatagttctttcacaatttatgcttctctcattttattttagtcatggtaaatctgtttcgcttcctttttgttagtatatgactatgggatgcattactggggcataggttggtcttggttctgcgtgaaattaaaagttttcaagtgattctccaatcaagtctgcaatatcagcgatttaattcaagttacttttgaagatgatttttgagtttcttattgacagtgttctgaagagatacccatcaaagtttgtcggttgttgccttgctaatcctgcagaagatggcagtggaattacgcaccttgagaatcttgttttagaggtcttccctttcactgttactcaaagcatctccaaatattatatatgcatctcatttctgagagtacttaaatctttttttgtagagtaattatcgtgctgttcggtttaatccctacttgtggccatcgggtcagaaggtaacagtttaaccattccaatgaccttagatcaagtttccaccgtattctgttgattgtcaatgactcaacacagatgacaaatgctgttggtaaagccttgttctctaaagcaggggagctttgtgtgcctgttggcttcatgtgcatgaaggtctggtagtattttcacctttgtggtctccaaagttgtgtggtttacgcgaagttctttcgttaagaatcttgttttctttattcagggtctagatcttcacattgcagaaattgaggaactttgcacagaatttccaaagacaactgttttactagatcacgctggattctgcaaagtaccagagtgagctgttctttgctttttgtgaaaaataatcccgtcccctgaaattcctatagaatgtagtactaatattcatggtttcaacaacctgcagaagtggtgaggcaaagcttgcttattctcaactcatgaagctgtctagatttccacaggtgaaaaagaaaaaaaaattacttttagaatctgaattctcatagattatagattatacgagtctgagggaagaatattgtaacaagcaggtatatgtgaaattcagtgctctattcaggatctcaagaaccggcttcccgtatcaggacctatcgcctctcctatctcaacttgtgtcccattttggggcaaatcgtgtcatgtggggcaggtaaacatacttatttacctcgctttcccgactaaaaaccacaaaaaaccttctatatctactaacaatacatgatcatatacggattggctgttttccatctgctgcagtgacttcccatttgttgttcttgaatgtggatataaagaagctaaagaagctgtgactatcattgcaaaagaagcatccttgtcaagttctgagatggactggattctgggaaagactctgatgcagctcttccctggacaatgggttcttccttgagaggcttgtcagaagtaataggttgcatgcggatgagataatgaagcaagcaatggaagttgtatcattaaagatacttaactctagcctatatattaccaaacactagatgtataccaatttagtaaatcaacaaaaatcttatgtgttgatatcataatgattcatcgtgagatgatggagggcctggatgttgatgtgctctgatcgaaaatttcttccacaatgggtgagctgctaggatcccctttccgtgttcaatgaggtgaggtgataatttataatcatcggtggctttgctgggacatttatgagggataagtttcaagaatcaagcttctctccagtagcttgttttacaagtaagtaagagttggcgtctccggttataatttatacccgtgtaagttagtttcatctatttacgaaatcgccatgatggagtatcgagttgtgcaagtgatagcaatgtggaattcaaagagacaattgagttttctttgagaattgaaagaagtggtgatcgagattagtcagcattgtaaaacttgtttgggttggattcttgaaatgtacaagcgcggtttcatatggtagaatcgattcagagagtgtgaagtgaatttacacaacttgctaaactagtagagcaagtgaagctcttaaaaatagaaatcctctctgcctaacaacttttgttttactcgtcttaattatcaacattagttaaacttctttcttttatttaatctgtgaccattattgattttatagctaatcacattttgatccttatataaatgctactactagtacgattttgagtggctttactctactttactttccacttcctcttcatctactctttctctctctatctctttccacttcctcttgcttttactcctgggttagggtttagggtttcttggtcgacgtgatgagtcatcggcgagattacggcagtgatgcagttcacgtgagaatcacccacgaccctccgcctgagaattgttttccaaattccggcgacagttccgtctgggccactgaggatgattacagccgtgtctgggccataaactctgatggcgcagagtctccgagcaagaagacacgatcttcctcctcctccgagatcgggaaatcgttcttcaagacgaagctttgcttcaaattccgcgccggaacttgtccctactccgcgagctcttgccactttgctcacagcgcggaggagctccgtcttcctccgccgccgccgcccaattggcaggagacggtgacagaggcttcaagaaacagagaaagctttgcggttagtttaggccctcgtggcaatgttgctcagactctcaagtctccgaattggaagacaaggatttgcaataagtggcagactactggctattgtccttttggttctcactgccattttgctcatggaccttcaggtaaagctacggcctttttcatctattagtaaccccaacgaatgtagtttagaaatgggttttaatcggtgttgcttgatgaactgtgagtttagagtgtcactagaggttaatggatgctaattctctggactaagagatcatctttgaacactagaactatctttattagcttaagttaagtctgttgaattgtatatgtaatggtattggtttccttgaggattctttatatggactgtgggtgccaattagttaatcgtgcttggtgaatggattggtgacaatgtctattaatggacttaaagtggatcgagtgagattgttgaaatgtttcctattgctacattgccattacgtgatgatgtcaattggtttctgattggaaagaattcttgatctgcttgttcctaatggctatggaaatgcagaaagtttcaatcgtcgctagctaaaagtttgagtctttatggtatcttttgcagagttgcatacatttggcggaggactcgttgaaggagaatgtaagatcggaacatccgccactttggacacaaagcagagaggacaagtagacacagtgactagccttgtttctcctggagtctcatcccaacggacatctagtgctgttacgcagaaacccaacggagtcagaactcaacggaaatggaaaggaccagataaaatcagtcgtgtttatggtgattggatcgacgatattgagtaaagtcactgcattttcactgatttgttgatcaaggtatagcttcttttagacttgtaactgtgtggacatattagcttcctcccttctgtggttgtagattgtgactcactcaacaaagacaaaaactctcatctttttgtttattctctttgtcaatcctaaatctaatcttgcagaagatcaaaccgaactaaataatgttgcgtacttgtaaaccggatcatcattgctacctaaacctttttctttatttccatggtcaatattaatttttcgttttgagttatttttaacagtaaaatgatttattattaagacaacgattttaactgtcacaaaagactcgctcaaaatggtaagcaaagccacttctgtctctcagacatagccactttattctcctcatttctctctattaacttgaacaataatactccttttctcacaaggatttgtaagaacaacctttcttatatcccaagcaatctacgaaactggtagaatctgggggtttctctaatcatcaaccttcaaatgtcgtcaacaacatcaatagattcaataccagctactgctgttttccctagtgtttccatgcctgtcaccgtagttttgaccggtgttcttctctttgtaattttcgccggattcttctctcttttcttatggcagtttcttctgaatcgattatttactacttggaaccttcaacgaacaccttacggtgacctaatccatgtggccactccgcctgaaaatactggcctcgacccgtttatcatccggtcctttcctgtattccactattcatctgcaactaagaaaaatcatgggacggaatgcgctatttgcttgtcagagttttcagatgaagatacagttaggctcataacggtttgtcgtcatccctttcattcaaattgcattgatctttggtttgagttacacaagacttgtcctgtttgccggtgtgagttagatcctggcatgattggatctggaaggcttgaatcattccacaacacagtcacaattactattcaggacataaaccatgatgaggaaaatcctccaaccgctggttcaagcaaaaggctaatagaagcctcggcttggcgattctcgaggtcacattctactggacatttcatggttaagactacggatgctaatgtgaagtccaaaagaaggcattaccaaacaggaagctgtgtctcgttcgacgaacttactcggtatgaaggagcaggatggcaatggcttggtgattcatcacacattagcaggattgaagtatagtttactgaatttctgttacatcttcattattgtgttctttgtagcagtagttatttcaaaactgtaataagatctctagtcagattctcatgctcctatcggataacagagaaaataataagagtcactccacaatgttttcttcggaagtgtttttgtcttctacagtgtctccatcttcagaagcgttgttagcttctacactgtcaccatcttcagattcactggcgcttctcagactaaactttagagtgataggtctacccattatctcctatagaaaaaccaaattgtaatgaaacactttacatgctcaaggctaaaggagcaaactttatattaatatgcttggaacttcataccttcccattgagttttgtgattgcattctcagcttcttctctagtagcaaatgagacaaagccatagccagaagatctaccttcggggtcagcgaaaacaacccgagctgagaccgggttgaaatctgcagcagtgaaaagctctcggagatgtgttgatcttgctttccaagcgagattagatacgtagagtttgtgacgagtgtctccaggggcaggagaaggaagatcgttcggtgatttcggagtaggcttcttgaaccttcttgcaaagcttacgctaatgatcctccctgacacttgctgaaaacaaagaagatagaagcttaaacatcaaaccttagctaacaactcaacacaatgtatgatttagtagtttgaactatctacctaaaaggctttgaaattaaacaaacaacactcaatcagaaaagaatctaagggatttgagcttacaaaagtatcgaacttatcaatagctgcttgagcttcttctccagaagccatagttacaaaagcaaatcctcggttctttccatctttttgccttataatctaggaaaagtttataaattgaggtaaggcaattgctagtaataacataaagattgaaacgaaattgagaaagaagaaagacctcgacattgttcacagtcccacattgtccaaagagctcggaaatgtcatttacactcatagaccaaggaagattgaatacaaaaagcttccttttcagatttgaattctgggtttcttcagtcttctcctcctgcgacgtttcttcatccgccgatgtttctttctccgcgacggaacagagtacggagacgagccgccgtgagttatcgctgccggaacgtagagagaagacgggagagagattgctgggaattcgaagactaagggcagtaagttttaaggaagaagagcgtttagaaaagagataaggttttgaagaggaagaagaagaagagaaggagaaaatggagagagaagcttccaaaaccgccattgttagctttggcactagagaaatggattagaccgagacaaaaggataaaactttttgggccggtttggttattcggaaaaaaatgaattgtgaaccgggtctaccaacttcggtttttgaaggtaaatggcacgaggaacttaaccgtatatcatgtattttttttggtataccaataaattccaatccctccacattgcagtcaaatggaagaacaaaaaagtgatgaatctcatgatttttctctttgaagtcaaaactcgaatttgactaaaactgaatttgattggtgtatattctataacaatgtaaatacaaaagtttaaatttcaatattctaaataaataagttagtaaattttttttgagttttgagacatttggtgaaatacaaaatgaagagaccaagatttcaatcaatcccaaaaagttaattaatcctaagaaaagtccagccagacgtctccaatccatcaaacgatgtcgtttagtaacaacttgtagtcttgtacacaccaaccaaaccatttcctatttatttttcacaaaacgaaaaaaaaaaaaatccaaattcgagaaagaagagtccaacacaaactcggagacgaagaagaaggagagaagaaaaccattaagccattccttcttccgtatcactctgtcaccttcaaaatcctaaaccataatttttccgaattcgttgtggaagagactgcttgagtgagtcagaggtgggtttacgtgaggtattgctgacaatggcgtctctgggtctatcctttcctcccgccgcaaaaacgccgacgtatctagcctcttcgtcttcaactttcttctctaactcttctctatccgtcagaacctctcagtttcgctcccgaaactctgtcttcgcttgtgttgtaagcggtgttcatgaatctatagaattgcttattctgcatttttgaatgttgatccttcctttcttattacgtttccggatttgaggttcctagattgagtggaccctaatagccatcttgtcaagtttgtagttctgagatttttattggcgcatgagctgaaaagctcgtctctttcgtttgaatattgtttgtttatgcgaatatagctacataaaggttgtctctttcttcagaatacatttgtttgaaactatccaggaacagaaattgagacctatatgattatatgaatctctgattgagtcttgttgttgttgttgctagaaatgtgatatgccggagtcattgaatgtgggaaacgggaatccaagtatcccaattattaatgagaggacacttccaaagttcttggaatctgctcgtatggagaaatcagtcaatagaaccaatacaaggttgaagttgttctctggtactgcaaatccagcacttgctcaggaaattgcttggtatatgggcttggatcttggcaaggttaatattaagaggtttgctgatggagagatctatgttcagctacaagagagcgttaggggatgtgacgtctatttggtgcagcctacttgcactcccactaatgagaatctcatggagcttttgattatggtagatgcttgccgaagagcatcagctaagaaagttacagctgtgattccgtattttggatatgcaagagctgacaggaaggtaaagtctctttgtgtggtttagctactttcacatgatatggagggtttgttgataacttagctattggtaatcttttctggataaaattgtatgttttgctgcttgcagacacaagggcgtgaatccattgctgccaaattggttgcaaatcttatcactgaagctggtgcagatcgagttcttgcttgtgatcttcattcaggacagtcgatgggttattttgacattccagtcgaccatgtgtactgccaggttcacctctaaagccacgttcttgatacccctctttatgcattgtgtgtatgctcctttgtgtataatacctttatctgcttaattgtttcagccggtgatacttgattatcttgctagcaagtcaattccctcagaggatttggtagtggtttctcctgatgttggtggagtagccagggcccgcgcttttgcaaagaaattatcagatgcaccacttgccattgtcgataaaaggcgttctggacacaatgttgctgaggtatccctttctttcagagtcagagtttgctcaccaacaccgcttgcttccccttaagttcacatttgttatactttcctttcaggtcatgaacctaattggtgatgtaagagggaaggtggcaataatggtggatgatatgattgatactgctggttagtaaaacggcatggagttgtcattttaccgacaaaccaagtttcctatctctctctattccccatcaacttctccttttccaggctgaatcatctatgaaccattcttgtttcaggaaccattgtaaaaggagcagctttgttacaccaggaaggtgctcgggaggtatatgcgtgctgcacacacgctgttttcaggtaaaccactaacctatattttgtttgttcctgaacagtctcaaaatcactacttcctgaagcattatttgttttctttgtttcaaacaaatcaatatggaagcccgccagcgatagagcgattatcagggggtttgctgcaagaagtgatagtgacaaacacattacctgtagcagagaagaattacttcccgcagttaacaatattatcagtggctaatctcctgggtgagaccatttggcgtgtgcatgatgatagttccgtcagtagcattttcctttgacctttctcattgcaaccaacaatttgaacgattcttggtttgttagtcggtttagaaagtttatcccggttcatgttctaaccggaaagcttcaacaaaatttgcttgcattgtcttttgatacagcttaggtttttcttatttgctccacatctcaaaattatggatgcacaaatggtgttgaaccgattttttattatggtgtacacaagtttttaacttaatatatagaacatcttgtatcgtatctacatttaacatggtgcaaattggctcaaaaatcttgttgacaatttgataatgggtttcataatcagacaaatctatgtattggattgtacagtccacggccaaccaaaaaaataaaaaaagcccaaaagaataggttgagtcataattagggcttctatttgactagtgtcaactagtatatatagaagactcacattggaatcacaagacaagtctattgttttgtgttccgcctcaattagttcttagggttttgtcatctgtgattttgtttggctctgtttttcgatttgtgcatagaaatttatttaaatagaagagctgtgaggaaaaaatcgtgtgccagagatggttaatccatcgctgacggtaatacacaaccctctaagaagttctgagcttttctagatcttaatctcttcctcaattcatgttttttttggatttttgtaaaaactcttttaaggacttttatgagtcgaggtgacgatagaaattcacaggtctgtcaatccactgatatatgtgatgtaattgtgttctcgacaggttctgatcgactctacaataaaaatccttaaaatcttgttttcaattttaatatttcgtttttgtatccttaaaaaaatcgttttcttttgaatctgagtataggatgaatctcatatattgatgttatttactactgaaattacattgatgttttattcaccttggagaactgatactcagattcatagtctcttttatgtttttgtacaattcgaatgtcttgtcgattttaaggatttggtttttgattctctttgttttctactgggcatatgatgaaattatatttcatgggtaatttgcgtctgattctatgtgatgctaacttttatgattatctgatgcccagaaaatataccgaatgtttttttttgtttttttactagttgtgcataatggaaatcacttgactaattaatttgacttgttcacagttctattcactttaaatgcaaaaacaattctcaaaggttttctactgatgccttgaaatatttggatattttacttcggaacaaaacagagtccttcaataattggagttatcaattgtcagcttagatgacaagctgagattattttgacaattcacttgccttaagcagaaacaattccaacaaacagacctgtatcatacttaattggacattgttataatggagaaaataatggaacttatcgaagttgtaatgagttttgtgaagttgatgccttattggaagaccaaaagaagtgcaaacaatttgtattgattgatgtttgatttcagatattgacaaatctacaattctccctaatttcaccttcaatacctgtaagaacattaatattacccatttttaacatagattccacaaaatctatgaagaaaagatcttgattaactgcatattcccaaactttctgaaagatctctccttcatgatcttctgagaccagaacgttatccgaaatcaacaaccctctcccttctaacagattgatgaaataatggttatcgaagtaagctggtgtcttaatatccagtggagacagttcgttgtctcggcttgaatctttgcattgtgaccctaggactcgacggaacgtgctgtgtcttctgaactcatcgacgtagaacgtttgttccatgtttggttgaacaatgcgttgcttgaagctcacgcatctcgctttacctattgtatgagcacccgaaagagcgatgagatcttgaatgttgagcccttgttgcttgaaattgatgatgaggctgtcgagagaggagtttggtgctggaatgaattggtttgctccggcgaaacttgcctttaatgagtctcttctccctagcaaaacttcccaccatgggccacctctctgatgataccaaacaatatttgtgtttaaatgaaactgaccacataggtttcgatttaaacagaaagagccttaaggaagtaaagtgcaagggggaaattaccaggaagactgagtcacgagcggccaaggcaaggatatcggaacatgagacagttagaggacaagcttcttcgaggaggtacttaatgtaatcgattacttcaaatccacgtaaagagttcagatttggagttgcttgtttctcactcaacatatctccatgtgtgtccaagagcacagacgcatcacaaccctaaacccacaataaatcccgcaactgaacatcacatagacgcaataagacagtctcactctcatacacgcaaatttcgaataacgttcaagaagtatgctagaattagagcctcaaaaatacttgataaagttatcatctcggagagaacaattataaaacctcacaaatgaggaagttaaaagagtagagagggatgattttctgaccaagacgaagcaatcgtggaactgaagacgaagaagagaagccgccatacgaggatctttgagaacagcaacttcgatgttatgcttcacgatttcctctgccaatgggcaactctctttgtagaaacccttcagtaatggttctccaaagtcccccaaaactgatgtcgtaattgcataaagcacaattaaagaaagccatactttcttctgcttgatctccatttggaaagttatgtcatgtgtttctgttcatctctatctgtgtttgtgtgcatatgaatatatatatacgtgtcatgtgtgtgcttcgttaatattatgttccttgtatgttatcatatgtcgttatgtttgttttcatgcccaatttttaccacaatggatgttacagttttgtcaacggtagatacaaccaaattgaccaatagggacctaacttgccttatgagcttgaatacgtgatttcaatataatggagcagattgtaatatttggacgaccagtttcttttcttatgaccaattatttattttaaagtaatggttatatctttaaggttaccaaatttttattaataatttttgattaggatcaccttttttattggactggcttttggggtgatggtaaatgcattttgaggataacaagatatatgaaagaaaaaatcttaatgtgtttgttaggtctctgtttcatcttcttgaactcttattttgtgaagttggtcatagagtgtatgcaaatttagaaaacaagcatgagaattgatagaacttggaacataaaagacagagagaaaccctcctagtgagcagcatcttcctcctcgcagaacttggtgtattcctttggacccatcaaagattccaactccgcggggctacttggtttcactttgatcatccaaccatcttcataggggcttgagttgatctaaacaacacacaattgccaaatcattgcttatatgttgtcacatgagtggtaacttacttaatttccttaagactttaaaactgtaccaagccaggtgattctgtgagcttcttgttaacctcaatgatttcacctgagattggtgataagatctcacttgttgccttcacactctccactgctccaaagcttttctctttgctcactgaagtattgtcctctggcagttcaacaaacaccacttcacctaaatggtcctgcaacatcaatgtcatttctcctcccatttcagccaataatcttacaaaactatcattatctttataaccattctccaaaagtccaaagagacatctatctagtttctgagctattttaacacttagattacaaaaataagaacctgagcatgggcagtgatgccaatggtggcaacagagccttcatgtttaacccactcatgtgaatttgcatacttcaaaccctccaaaactaaaaaaataacagagacattcatcaacagtttcagataaagctatgcacacacaactacatacacaattacaaacacctgtggagaagcatctagagaaggagaaaggagagagatgagacttggaaacagaagaagaaagcttgagagcgtttgctgtagaagaagcccacattcttagtgccatttttgctttctctcccttctttctaattcttgttctgtgttttgtcttctccaaataaagaggagatctcaaagatattctgtttctttgctttatttgtgtgtgtgttctatcttttgatatgtaaggcagaaattgaaggcctcatcctatgcatatggtgtgtatgaaaagtgtaacccaaaccttctttttgacgcagaagctcttacaattgcttttccaatgttttggagttttttatactctctgaaacctttggggttaaaagtggaattaaaaacatatgtaaggacagatatgaaaatattgaaaactcaagtcgactctccgtcatcggagaagtagcaagtgagaaaacaaactctgtttttttcaattcccaaattcgaaaccctaatcctcaatttctcattgattgcatacaattcgtggtgagatgatgaattcaaccgaagagctgagctcagattcaaccaacaatggcaccgtcgagatcacgtacaaaaccatcggcccagctcggccgtctcaaattcgagtggcgtctcatatcaaagtaaagaattttcttcttctttatctctctaagtgaattcctttgtacgaagggaatgattgattgatccttgggctgattttagattcgtgatttgagaaatgcaattgcggaaaagggtaaatttcccgtttcaactttaaggatgattcttcgtggaaaggcattgcaagacgaagaagatggagatgatttatacgttacgctcaaggaccaaggtaaacaggttctgctgaaaatgttataagcatcaatgcttatctgtgtttgttaaatgcgtctttaggttatgcacaagtcttgattttattgtgtagattcctttattgttgctgtaataccaaatccaccagctggagttgagtcatttgatgatgatgatgatgatgatttggtaaagaatggtttcttaactggtaaagaatggttttttagtttctgtccttataaaatctcttttggcattgcagaagtttaaactcccaccgtcagcaagccggtggaagaggaagttatactactttctgcgtaacaagttgaagctgccaggtgagaactctttaatctttgatatgtgcatcatctgcaatgtccaagaacttatgaaacaaatagtttattgatctgtggttgtgtgatgatcttctagatatcattcttatgggacttttctctttaagtctaaagatgtgggttattatcaccttgtggtttatcttggcgcctattgcacatcggtgggatctgggccctatatttgtaagtcatctttatcttcaatgtctggattcctgaaaatgcccaacgtttttgcaatgccattgaatatgagacattttgtatagagaggtagtgtctctaacaagtcgtttctgtttaatctcctttgatggctttctttgttatcacggggggtttcagatactagggactggattttcaatcatcttgctcaatcttggtaaacgacagcctggtgatgttaggtatgtacatttctaaaaacacttagcctccattgatctgactgacatagcaactcattttccagataccaaattatataacacttatctaaaacgtaaacatcattggtaacttggagatgtgaaaaaaaagtcttaggattctggaagcataagattctgctagtattcttattagctgtaaagtggtatcctcatgagtattgttgagttttaggccatgaaatatcttctcttttgagtgttagagctgaataagttcgatcttttttcatgctttctttcgcagtgcatattccatattcaacgaggattttagagagcttccaggtacatataatgcagatcgtatagaccgggacatacgagcaggccagatgtaatgcatatttgcatcaaaaccattgcttggtaagattcacacaacagacgaaaaatacttaatacccaatgtgcaaccaagagatcagttttttgtcctgtctgattgagacacaacacaaagcatgacagtacttgagaccaaaattcctattgatgtacatgatctagctagtcttttaaattccatgatcaatggtccgtgttgtactcgaatattgagattcccttatattaaagaaataaagtgtgataagttttgtcatattattattattatgggtgtgaaaatgagttctaggtcaacttaggtcccatcaaaacttgattgagccttaggtgtgaaaaagattcagtaaccaaatctgctttcctagtggttaagtgggtgacaatttccctgacttataaactcaagaaaaaaataaaatttattcaaaagtctatgaagaatggaattaagattaatattaaataacattaaaaaggtatgcatgccctttaacttacatatatacacaatctatacgcgtttctgatttaaattcaaatcacttttgctttttacggatttggtgaagaaaatatatatacctataaagtaagctatcttcgtggtagaaattggaatttaaatttgtattttcaggaataataaacatttgtgtttcataaagggttttcttggctatgacttatggattgtgatttgtgagtagttgggagtggctttgccaattcttgacggcacgtaacgtttaaggaaatgtcaaacttctcggttatctacaagataatctatataataaattgtcatattttttggtataatttgaaaggtaagtgtgataatattttcgtatcgcataagacaaaaacaataatttcagtaactttccaatgaaatatgtacatgtctaaagagtttatgacaacattaggcaaaacatgatcagattactttaatttagattctgaagtgtatatatggataagtttgaatatgtgtaacctaaatcgaaacaaaagcctgaaatcttacttgatgaacaaaataaaaaagttataatagacaaaaaataataataatttaaggcaaagggggacaagacaagaagtcttagcgggaaagggaatccgacaagtatgacgtcgtttcagcgaaggagtctacgagataggtcccagttgtcaaaacctcgttgactattttttatttgttcttcacctctcgtggaccctacgttgcctaatcttagttaagtcaccattgttacgactaattttcataaaattaaaatacagaagactgtgacctttccataatcataatctggcatgaatatacggaagtcttttattcttaagcaaaacatgtactttttgcgattttaaaaggttatagaaaacttatttgtttttttcttgccaaactacttgaaagtagattgttccaacttccaatcaatgaaagagttaacaaaatcaacctttgcaaaacagattctaaatatatgagctaaatagtatttttgacatttaaaagttaaaacgatagaaaataagagaaataaaaactactaaatttatctatgaaataaattaaaattctttcaataaaatagataaaactggttatttcgtcagttttgggatcattcgaaactaatttaaaattgttcgtttcagaacaagatatcatgtatatacgtagtccaaatcacggtttttagctccgaatgtaggtataggtgaggtttttactctgacactttcttgtaattccgaccaaaaactacacctagaaaatttccaagttgaacaatcttgggttccctttcggaaggagttgtcaagtgtaatagcaatattgcggggaagtcaaaattataggattgtgaaattggttggattctttgtcatcatagaagagaagcaacatgggttgggaagatttaatgatcttttaaaaccgaagcaagaagttttgagatgagtgtgttagaagtgaacaatagcaaatcttttagagtgacatatcattggtatcttgcaggatatcctagtaattaaatacgtcttctagctagcttattgtgtttcataccggaccggtcgaaacataagcaaatgaatatatcggttaatgcatcacattttaaagcaccatatatatattgggagaatttctatttagaacaaaattttacattaacagaaggacacaaattttcagttgtgcatcgagtatccaagaaaattttgaaacattggaccggtcatggttgtatatatagatgataaaactaacgttgtgtagatcttaggttaagaatttgttaattattcctttttactgtgttattgactccaatcctgtggaatgattacaatacgtgatattggttggcaatcttaacgatgtattaaaatctcccaaattacaaaaataacaaaaaaatatatgagataaaaataaatgttttagtttggagtgaatttgttagttttgtaacagcagacgagaaatagcagtaaaaccttatacgctttttttgttccacgttaacatacagtcatattgtattcagaatcagagaaagacaaaagtgggatgaatatataattatttattttgtgatatttatgcatgctactattaaataaatgacaaagctaattaattaggattctataacaaaaaccagattagtgtatcttttttctaagcataattaaacatcacaaaatccttttttttctctaaccatataattacaattttattagttgtaatgtatttggagctagtgtgatatggattggtcttctttttttttccttttctaagtaacgtaattttatttaacaacatatcatgtttaagacataatatgttgttataaaagtgacgagatatacaatgatacatataacgacataaaaacaaaatctaaatacaaaacaacataaaatgtaacgtatgcggactgacaaaaaaaaaacttttgacaatttttgtaaaagtatgcgttatatctttaaataacggttataaatacaaattttattagttttaaactatttggactatcatatagattagtcttttttttctctatgtgactaatataatttttattaacaacatgtcatgtctttaacgtgacttatgtataaaaatgacgagatattcaatgatacatataatggcacaaaaccaaaatttagatgcaaaaacaacaatatgtaacgtacgtggactgacacaaaaaaaaatacatttgacaattgtcgtaaacatatgcgttatatcttaatgaatggttatagatataattttaattagctgtaaaagtatttgggctatgatatagattaattttttttttctattctgagtaacgtaagttttattaacaatatatcatgtcttcaacgtgatttgtttataaaaaatgacgaaatatttaatgatacatagaactacataaaaatcaaaatttggatgcaaaacaacaatatgtaacgtatgcagactgatataaaataaaaaaaactacgcttgataattactgtaaaaatttgtgttatatctgacaactagtattagttatgaaattcttcggaaatcagttcgaaactttccgactaaaagttttgtcggaaactgtcgtcgtaatttgctatgttttcttgtaatatatgtatttatatgcgttataccttaaaatagcgattgtatatggtagcattaattttgttgaattggtaaaatttctagtggaattggctgtttttttggaacacatcatttgaatggaaataattttatgtgctgaaaataatatattcagaaaaatatgacaaaaaattgatggaataaattacaatgtgaggaattaaccaaaatagttggcgaatgggtaaataagtggtcaagagagctaaaaacatttacatatacgaacatgtattgaagaaatgaatttaaaactgtaattgttcaacttttcatgttgttaatatgataattatatttaataactctagttttgaattagtttgttaataattattttgtctaataacttttaattatttgggtatttaccttatttttttcttctggatgaaaaaaagaaaaacacaaaaggatataaatatgaaattctcaatgtcccagagaccgatgagcgcgaacaaagcaaatgacaaaaagctttgttaatacaagaatcctttaaaaccatgcctcgatttccccattttgaccctccccttttctttttcccttttttttttctctctatgaccaaaaaaaaaagtgatgaataatttttgcaaaagagattcttttcttcagactaatattttagttctataatataatctgtattctattgatccaagtaattattagttcagaactttattaacgcgatgtctcgtggtgtaaaaaagttaataatgtgaacacttcgacttgttctaattatagcaagttgattactgaagtcaaaaataatttctaagttcgactttgtgatttttatacaaaaaagtctagaagcaactgtgatcgaaataaaacgaatactctattttactttaatatcactaattatatgcgagcaaattggtctttttaatcttctctctttttctttcataaaatatttcagattaaaacgcaaagattattttttaattaaaatatcattaatatctaaatagtcacaaatattaaattaaatattacatacaatttttttaaaatgaagcacaagaaacctctaaatcattttataaaatagaacggttggaatattacttagtactatttagtcaaacaattcatatataattcgtttataatattattggcttagtttaaaaagataatttgtaattaagagagaatgttagtggtatttacgtaatcaagtcacgaaagaaaaagaaagttaaaaaaagagtcaaagtttgtgctaattcgaaaccactaaagtcgtctcagcttaaaaagaaaacatattttaaatccaaaagaagacgacaaaagtctcgctctctctttttctttctctctttcaattcaaaatctccccatacattttttgttttctcttataaaagattttctcgacaatctgcaaaaaaaaataaaaaagagtgttttgaaaatcaaatgtgatgggaagtggattctcctccttgttaccttgcttcaatcaaggtcaccgtaaccgccgtcgtcactcctcggcggcgaatccctctcattccgatctgattgactctttccgtgagccgttggatgagactttaggccattcttactgttacgttccttcttcttctaatcgcttcatttctccttttccttccgatcgattcgtttctcctactgcttctttccggttatctcctccgcatgaaccgggtcgaatccgaggttccggatcatccgagcagcttcacaccgggtttagagcgatttctggtgcttctgttagcgccaacacttccaattccaaaactgtccttcagcttgaagatatttacgacgatgccactgagagcagtttcggcggcggcgttaggaggagtgtggtgaatgccaatggctttgaaggaacgtcgtcgtttagtgctcttccgcttcagcccggtccggatcgctcgggtctcttcatgtccggtccgatcgaaagaggagccacttcaggtccgttagacccgccggccggagagatttcgagatctaattccgccggtgtgcatttctcagcgccgctcggtggtgtttactcgaagaagagacggaaaaagaagaagaagagcctttcctggcatccgattttcggcggggagaagaagcaacggccatgggttcttccggtgtcgaatttcgtcgtcggtgctaagaaggagaacattgtgagacccgacgttgaagctatggcagcatcttccggagagaacgatttgcagtgggcattggggaaggcaggagaggatagagtgcaattagctgtttttgagaagcaaggatggctctttgctggaatctacgacggtttcaatggacccgacgcgccggagtttctgatggctaatctctaccgtgctgttcatagtgagttacagggtttgttctgggaattggaggaagaagatgataatccaacagatattagcactagagagttagagcaacaaggtgaatttgaggaccatgtaaacgaaatggcaagttcgagctgtccagcaacagagaaggaagaagaagagatgggaaagagattgacgtcttcattagaggtggttgaagtcaaggagaggaaacggctatgggagcttctggcagaggctcaagcagaagatgcgttagatctttcaggttctgataggtttgcattttcggtggatgatgctatcggtgcaggcaatgctgtgtctgtgggaagtaagagatggttgcttttgtcaaaattgaagcagggtttatctaaacaaggaatttctgggaggaagttgttcccatggaagtctggtgtggaggaaaatgaaacggaggaggtagataatgttggtgtggaagaaggggttgataagagaaggaagagacgaaaggcgggtaccgttgatcatgagttggttctaaaggcaatgtcaaatggtcttgaagccacagagcaagcattcctagagatgactgataaggttctcgaaaccaatcctgagcttgcattgatgggttcgtgcttactggttgcactgatgagagatgatgatgtgtatataatgaacataggggatagtagggctcttgttgcacaatatcaggtagaagaaacgggtgagagtgtggagacagcagaaagagtagaagaaagacgcaatgatttagacagagacgatggaaacaaagagcctttggtcgtggatagtagcgatagtacagtgaacaacgaagctcctttgccgcaaacgaaactggttgccctgcagctaacaacagatcacagcacaagcatcgaggatgtaagtctgaccttgtgaaatctcttcagtgttttttctttgtagactgtagttgcttggtctcttgatctagaatgtaacagtctaattgttaagtagttttggaatgctcttgaccatatagttgtttctgcattccccatcatatccgcatttgtaggatactatggatcagatgaagttccttagtttgatcagttctgcttcttgcaatgttcttgttgcatgataatttccattgatgaactcaggaagtaacaagaataaaaaacgagcaccccgatgacaaccattgcatagtgaatgacagggtgaaaggacggcttaaggtgaccagagcgtttggagcgggattcttaaagcaggttagtcaataatatcttcaccttacaatcgaaatatccatcactccgtaattctcataaagaatgtgaatttgcagccaaaattgaacgatgctttgctggaaatgtttcgaaacgaatacattggtacggatccatacatatcatgcacaccttcccttcgtcactaccggctaacagagaatgatcagtttatggttctctcatcggatggattgtaccaatacttgagcaatgtggaagttgtttctcttgccatggagaagtttccagatggagaccctgctcaacatgttatacaggaacttctagtccgtgcagccaagaaagctggtagataaaacttgcctttttatacacaactgaatatctgtgcgatatggtttgatgattgattgttttaaaaacaggaatggattttcatgaacttctcgatatcccgcaaggagatagaagaaagtatcacgatgattgcactgtattagtgatagcacttggaggaagtaggatatggaagtcatcaggaaagtatctttgagaccataaaccacacagttcgatgaagccaacagataaaaaacgctccttatagattaacttcttttgacttaatgcagcataagatcaaaagggtgccaagttttcttgctttttgtttccttaggaattttgggtcagattaggtgggggtgttttatattttgtttctttgttgaatagggtagggattggaatagcggtgaaaccaaaaacaaaaaagaggatatgtaatttgggggggtggggacaaaagggtaatatatagaacattttcctcctgggaaaaaaaaattaagaaaaaatactattttcttctctggctttcttaatcgcatactgttcctctttttatatatttcaattttaagtagaaccttgctccaaattacaattgtttgtgaactgaaattttttattcatataggaaaatacaaacaataatgtgactatttgctattagaaaactagataagcacatatgactaatagttcttggaggcaattagttttcgttctagtgttcggaaaatcatattgttttaactattaagtcgtatcaatctcagttgattgttgtagtaaaatctcaatatcgtgtaatttgtttattttttgtataccgtttcactacgcataaagtatattgtttaacttatctagagccggacagcatgctgttttctaactaactaaaaacggcttttttaactcacaccacgatccaactgttaatattcataacgagacaaaaacgttctctcttttttctcccacttttagagagatgaactctgtttctccgactagatttttcagtaaatcgccgtctcgtatgactcgagcttttgtccagcatcttatggccctgttagccaagattgttggcttccgtccagaatcaactggcttcctcagccgtgatgtccggcttctctccgacatggatggtttctttaattctctttggtcggcttccgtctggaatctattggcttcccacgcagtgatgtccagcttatcaactgacatggatggtttcgttaacatcctttggtcggcttccgtacttatttgctttgaataattttatgggatttctcattggtgatttcaatttagtgaattttcactaatcaattgttttcactgatttatcctttgagtttctggttttttcatatgttatatcagattttcaggaattatcctagtgatttgcagttttaattgaagagaagaagtagaagaaccgaagcatactatcaattccctttagctgttatcctcttatggactccaattttgttaaacggtgaaaaaccacaagatttactgaacgaaagaatatcgacggtgactcttgtcaccggaatcggtggtgtacggcaaggttaatgtcggtttgtgatggaagctctctgtttgttctaattgaaacacgtgttagtgatggaggctctctgtattttcctcttcattagggttatgtttaggctcatgctgggctttaattaatttttgtaaaatcatagttacagggcttttgtttatattagcccatattgttggttcagtacttcagttcaataaaatccaacttttgtgagaaaaataaaaaaactgttaatattcttctattaatataaatatctaagttaattagagggggttatatgcaaatcaacaatttagcaaatatcgtcattctcagtttctccatcatctttgtttgatcaaagttgctacaccacagctcggccactggttttgggcattttcttggatgtagctgcaaaaaagatacatcatgggatgagattatttaatattagagatggattccgaattcatagaaccaagtaaggattagacgaagagaaagcacagtattattaccatcttcaacgtccttgagctgataatagtgtggagctatctcaatcaaccactcgggttttaactctgttacctgcattttttaagttaaaagaacaaacccgataaatgaaaccagaagaatcaacccaaagaaggctttggttcagaatgatcgaaatgtggtttacaaagtaaaaaacaaaaacagaattttacctgtcgcatgtattccttagaggtaaggactagttgatgatatacaacccatctcggcaatacctaacaatattatcggagaaggattcatttgtttgatttctctattttttagttatatgttttcaatgagtgagagttaaactaaacctgagataagccagaggctggatgtatgtgtacggtttggggatgcttcactgttcgatatgatccattcttctgtagcttcgcagtgtgtggaaagaaacctgagcataagtatacaactgctttagcaacaacaaatatagctttttatgaactggagattaagaaatttaccagctacaatggattttcttattgaatccaactcattcgcgtttgagctaacgtctatttcaactctctcgagaagaccctccaactgatcacggatatctctggctcttttcatactccgaacctatacacataggattcaaaaacccattctataactataaccagaaaaataagaacagaggatgatgccatatacatacctgaatatagttctcgtagcaccattgtgttgagtagttcgtttccttccacgaattgtaaatctttcagaaaacaaagaagacatattaataaacagtaagactgcaaagaaaaacaaagtaggggagaaatgtacagaccttcaggaaagcaatgtgatcaccgacatttccaacgtgaaaattcttcattgcattgtcagcgtgaacttgcttgtccttggggcggtaaaagatagaaggcccgatggacaacatagcagcaattgatataatctcatcggagcatttgtatttgtcagaaacaacaatcatcttcgacaacattggatcaagaggaaactctgccatccgtctaccagctttagtcaattcgccaagctgattgagagcacccagagcaaagagcagctctaaggactttataagagcttcagaaggcggagggtccataaagtcaaagttcagcagattatgaataccaagactcttcaaagaaagcaccacactagcaagattagtcctttgtatttcaggtacggtattgtcctccaagtcattgtagtaattaaacgccgtgtacaggcggtaacacttccctggactggttcttccagctcgaccagttcgttgagtcgctgaagccttagagataggcgttacaagcaaagattccatccctgttctagggttataggatttcatcttgctaaagcctggatcaacgacatactttataccatcgatggtcaatgatgtttcagcaatattagttgctagcacgacttttcgtgccccttcaggagttggttcaaatatttttgcttggagctcacttggaaggttagcgtaaattgggcatataatgagttcgcggatctttgtacccaaacctcttatcttgtgcttcaagttctcttctacggcttcaatttcctcttgacctgggaggaagaccaaaacatccccaagtggctccttcacatgtatcgtaagcacagtagttattgctgcgtccatgtaatcagcttcaggtgcagtagtaaagcaaatgtcaacaggataccttcttcctgggaacctgaagataggggcttggtcaaaaaaatcagaaaacttctctgcatccatggttgcactggatatcaataacttcagatcaggccgagcccgtgctatatcctgccataagaagagagaatcagaacatatccaaagatctaactctaattgaataatgtaaaaagatagctaggtatctacttgccttcactaatccaaatagtatgtcggtgcgcaaagttctttcatgcgcctcatccacgatgataacactgaaaggttcagctattagtaagtaaagaatatatcacatgccccatgctaagacaaattggctaggaatgttgattacctgtaactgcccagatctggctcaccaagcaactcacgcaaaagcattccatcagtcatatatttcagaattgttttctcagacgtacaatcctcaaatcgaatggaatagccgacctgtgtcaagcaccaccaaagatttagcttcttgcagtgtatgcttaaacaaatgtgtaacaaacaatttccaaaaggaaaaatgttaagacgactaacaaaaagaaaacgtacctcatgcccaagtttaccacccatctcttgagcaacacgagcagccacactcatagccgcaactcttcgaggctgcgtacaaccaacctgccgtatgacaaaataattagggtgcttaaaaataagtttatgctttaccaacatctgccttttttgtttttatactttccaaatcatctggccacaaagattatgcacaaaggcaatcctcgtgaacctctaataagctagcttctaaaatataaagcagaaaactctaataaacgggctatacttgcttgtggcaactttgacatgctaaagctctcgactacagaataaataacacatcatttattgatgacacttaaattcctctattaaatgctttacaagcatatcatttatttgataatgtgcttcaattaaggtcaagtgtacctttccaagctttgtgtaaccagcttcgtgaagatattggggtatctgtgtagtcttgccagaacccgtttcccccacaatgataagaacctggtcagttaaaaatgagggaaaagggtttgaatcatacatgtcacagaagaaatcgttattcaaataaaagaaaaaatatatgcattttcataatgaaaaactttaatccacatcaataagatatgctagcttttctcatacatgttctcttatcaaagtactttttattatttaattctatgtcatagacttagatgctgtcaggatgaaatttggtccttatggattgctagggaaatgtgacgaaatgattttgtaaatgtacaactttccttggaaatttgagaggaaaaatcaataacttaaacaaaaaataagtgacatgaaagtaagaatcacctgatgatctttcacagcattaagaagttgatcacgatatgtataaattggcagagcttttctatcctcctgattaattcatgaataacataaaaacatgtcagaaaatttatcaacttttcccagggaacttcaaacatgtagacatacaattattcagatgttttatggcaaggaaacatctaaacagtgctccagccgttgaaattgatgaaataggacaagctgagaaaagaggaaaacctgaagcatatgaaaagccgatttcccagcagaatcttgagatggtttagcatgcatttcatcttcatactgtaatgaaaaaacgagtggtcagctaaaactccgtgcataaaaagaaatactacaggcataaataggtatcatagtcaatacattatcaccagccaacacagatgcctttatgaagtctatttggtcttcaaatacaaacctgcaaaagtaattttcatggtcaaaaagatagcaaggataatcagtcgaaggtaaaatttgaaatcaaaatataacacgagtaggacaaaaaggtaacaaatcttactcgtaattgtctgagacctccttattctttgcaccaaattttaatgctgcgttttctgcatgaaaatgtcatttagttaatatcacaaatgatgtcgtttaaatagagcatgcatttaaaacaagattggtcattggtaaaagcgctaaacagaatactaccaatctgatggtcctcccaagcttcttgctctgcaaaggggttcattttctctgcggaacccatgtccctaatcaaataagataatttagaacatacgttagccttttacaacacaaagaagagtgatctttaaaagtgtaagcaaagtagaatgttatggattccaagtcatgcattctttctcatctcacctgtaccgttgtacagaaacagcaaacctcttctcctgatcaacacttccctgttgatcatatgcatccggcattctatactgtactccaacgaggttgaaaaaaaagagataagtacaaataattcagaagaaggaaaactaaaatcatcaagaacacttgaagcattctaaaaaatagccaaaaagttaagaagggtacagtaagatgcaattacctctcctacattatcttcttcttgtgtacttttctttatgagctcatagatttctctcttgtatctgtcaagatatcagatcgaccaatgctcaattatattagccaaaaattaacaaatcctagcaaatcagaataaaccacagcttcagattgtaacaaaaaaagtccaaaagtaagccactactgtgactttttataatcaccaaagcaaccaagctccatcttggtgcaatagatgtcttaattacctaaattcacgaatttctctttcagtgagcttttcatctccaaaaaggtatggttcatcttctatatcatccctgtgaagaaaagaggagaaaggagaagtcaatttaggatcaacagtataattaggtacagaacttccaaggagaaatataactcttaaagtcatgtactttagctctagtactttcttctgtttccttttcttcatatattcttgccatgagaatttcctgaatcagcaaaacataatcaataacaatgaatgagtgaaaagacattaaagagctaattttcaaacattaggacgactagtaagaattgttaatgaggagacagttgacaacgtcaatagttcttaactggcaactttacatggtatttcaattacgggaataagatttaacccacaagtatcttacatagtcaatcatgccatgttactgtatttcaatatggatggatatgtttatggctatctcaaagaggaaccatcacagaccgatgcagggaagaaaagattaggtagagaacgaagtaccttaaggattcaatatcacccttgtctacagcactatctcttcgaacaaactcttctgttttacaatcgaagaattactaaatgagtccagcagaagaaacaaaattttggtttcacacacaaagatgcttatacatgttcaagtgagctataataggccgtaccttgctctttctttgacatttttggctcggttagctgttcattaaagaaaagaaagggacaggtcagtaataaaaagatcagatagcaaataataaatggatcaatgaatcctcacatgcttttcgttaactagcaaaagcatccaaagaatgcaggattgaatggcatattaagtgtagagatttggcagttctgttatctaacttaaccaagttgaatgagataactagttcatcttgtatattgtttccgcaaaactgagccaaaacaagatgtcaagaagagaacggatagcttgttccttgtgaggtatgcaaaggaaacacataagaactactaaaaacaggatcttttcggtgcacataacagataagacatacctttcgtgtccgtgcagtatctcgttctcttaggtgctgctctagttcttctctctccctttggtcacgtaatctttcctcttcagactgtgccaattatttgtgattaaagcagattttcagaaaaacaattatgaaagcaggtattatccacacataactatgtttttcctaaggatccaaaacataaataaattgcaaacaccctaatggtagccactagtaaatatacctcagtgccatcatcctcgtcttcggaaacctttctcctaacattccttttgtcctctctaacaatcactacctgcattgttgtttagtcagaaaggataccacatgattagaagagctatggagctatatcttaccataaataaaataatggaagtctgtcattgaatagaaaatatcaaaataatttgcctcatcatcgtcgtcttccaattgctcacttttcttcctgaacctcttttggcctttatctgactttccggttttcgaagcagattgtttcttcacattgttttcatcttcatcatgatcagcctctaaaagggaaaaagttttctgcttcttcaacagcatcgctgcctctgcttcctgttgctggtagagctgaaaaaaacaagaaaaccaaccaaattatgactctgtttatgtcatacattctttaccaatagcaagaatcaacaatatatctactcagaaaagagcacgagagtcattgagggcctcacattcactccaggggttttccggggagctctagcataaatttcttctgcgaacgcgcgggtatcaccggacaaagaaaacccgcattccaccaattcacggacgagttcacctggtgattttgattgtttagctgcaagaaaagacaaactcactttgtcaacaacaatcatagctaaaaattgcttgatccaaaacggaacaccaagatttacccattgcaattagatactgcacgacagcagtttgtgaaaagcctagcagaaccatcaacttgtccgaaacccaggtgttcaaatcattgctccccattctcactgcactacaatcataaaccaacaccacgaaatcaacacagatttcgattatcagaagagctataaatttcaaatcacttgtttcagagatacaacagtagagttagagagtatacataaacttctctaaccaaaaaggagaaagtccccaggaattgaattccgagagaagacaaataatttcagaatgatcgaacaaggtagaaaccctaaaagattagggataaaaacttagagatctaggttttctgaaactcgaagagctggagaaggaggatgatgataggttatgaagaagcttaccccaagacgccaagtaagaggaaacgaacggcggaatgtatcgaagaagtactcaccggtggcgactcaagtctccgaaggcggattctacgtcgaatgttttttcgccgattaatgtactaacctctatttatacgtacgtacgtaattctgtagtgattttttttaatacatagatttgaatttccgtattttgattggtctgtaacggtgtagaccggtttggtccgaggttgttgaaatgtcaatagagttctttccaaaaattttactagacaaaattaagtgaaaagaaaaattagcttttgtgataacaaatgaaacttgttacagaagaacaatgggctaatattagaaattgaagcttaacttgttttagccacaagttagaagctaaaaatgaaatttttgtgataggttcatggtaagaaaaacatatcaagtgattcatgtgtatcagaaattgtgagacgacgtttcagggttgggtagaggtggtagaatttttatttacttacattgtgaatcctgggaagatcataaaccaggcaacatcttctttgaacaactcaaaacaatgtaaaagatgcgaatagtccaaaccccctcagattgaagataagagacaataggaagtagagagacggagccataaacaaacaaacaaacaaacaaaaaagtattacacctgacaaaagaagttgtgctgtgattaatctttggaccccagataattatctttgttactaagaactcgctccaaagacacggattctctgctgaaccggagctctgcaacaaggacaggtcgctttgccactgcccatgaagctatcgctgcagctcgcacagaccacttggtgagcacaagggagaaacacaaccgaaacctcatctttcatgcagatcagacattcccggtcatagtttgcttccttctcatatgatccatcaagcctattcagctcttcaagcagcttagacattgtttctcccttcgacttgtctgatttcacctttgtgtgagaggtgttattggattggaggcttgagtcagttgaagaggctttgttgagccgagacagctcttgttccagtctttggagatcatctttgtgtctctggaagtctatttcgatctttaaccgcaggctttccacctttctcttgttgctagcctcaattgcttccttcgagcgctgttcttcttccacttgagccaaaacttgctccttagctttctgctcctgcctccatttcgcctgcaaatacatattaacaagatgaaaagttgcctgaaaaagacaacctctctatgcaaatatgatccatctagcagcatagagagaaagacttggcccatgaaaagtatttacaggaataataattccttggaacagataattagatgcgctttcaaagagaagggttcattatcttatgttctaactaaatggacttccacaggttatagtgtcaaaaattgtgaagaaccagaaaaatctcggtgtgtaaacgaagataatgcattacttggtacctcatattctttttcttcctgagtgatctgagctaaagctctattgagtgccttaatcttctctttctcagctgtaatctcgtcctgcaacttcattttctgcttctcccacgccagtagtttctttaagcattttttctctttcttcgaggcctccatgcatgccgtgagcgattctgatgcacttaatttggaagcttccatttccgcccggatttctgcactttcgttctcaagtgcccttactaccgcatttgccttgtcaacttgaccgctagcttttctaagagcattttccatctctgataattttttcaaggttgagtcctcacgagtttgtttcccctttttcacccgctgaatttcctctctctcactcctcaacgatttaagctcggacagttcatcgctgaccttttgggcagcttgcattgccttcttctgagcccagtctttcctctccttcaattgctttttgagatcctgaacctgctgaagtagtcctattaaagcatcatccttcagctcctcaggtgccgaatcaacattgtcatcaaggttcagatcccggaatttctccagcactgaactgaaacattcttcacttccgaagacatgtggctgctcacacttctctgaatgtgtagcagcagccgtgcaagacaagctagtaccactagtttcagactgcatttgcacctgcttcttttgctccatactagcacgatacccagcagcaaaggctgcaacattctctctcaacaaagacttcatcgaaggtgagagattaaatctccttggacaatcaatctctctctgcaacgttaactcttcactgtgcaaagaaaacccattaccagaaaacttgggtcctttcccattaccaaaaccccaacctccatggaatctacacaatgccggagcaatagcaccaccaaccccatttacagtactactagcaccaccaacccctacattactactatccccttttccagaactcggtatatccatagtactcggcctcccaacatgaagctcactcattagcaaacaccacattgcatcacctttactcaaattaggtttaacttgttgcaacaaataaaccatacccgcaagtgaatactcctccaactgtctcaaatccgtaaaaaccgtctctgattgatcctcattgttcacattactaccttcaccagtattactcttaagataagccaacgaattatgaagaatattagtcataacatccattccaccataacaatacccattactaagaacagctctcaacgccacatcctcatcataaccagaacccacaagcttcgaaatcgcttcattgtataaatactccaaatgtttcaacaaaatatcctctaattgctcctccgtacaataaccccaaccattattatcctcaaaactgccactagggtttgactctggacacgaatcgagaagacccggatgataaacaagatgcttaagactcgattcaacaatcgatttcgatagagccgtcctgtcgagcaaacaacacggatcgaattcgggtttcacggatctggtcttccggtttggtctaacatgcttctccctcacagtacaacccatcagagttaaagcacgtctatgtatatatgagaatctgaaggaaaagaaaaattccacagagattgaaagagtgaagatcattgaatccccacaaatgaaacacaaaaaccaaagcaggatcaggagaaatgggttttaattgatggcaaaatgattaatcaatcttacagattatagatacgagtttagaagtacttactgatcggcagttgtatttctcagctgagaagaatcaaacttcggtagagaagagaggagaagagaagcgaagggtcatgcaagagaaaaaaaacaagctt

SEQ ID NO: 333 - DNA, 107436 bp, Arabidopsis thaliana
aagcttgaaacagagagagagagagagcagatatggtgagagtaagaagagaggaagaggaggtaaccatgaaatgatgatgaccctctttagttcccttcttcttctttctttctcctttttttttttttttttttgcctttttaaaaaaacgtaaaatgaaaatgaaaattagaagaagataaagacatggatattataacagataataataataattaataaattaatactagtactatatttacgtattttctttcatgtagtggataaatcatgaccgggtctcattaatcataatccagttttaggcttttataagcgattaaaacttcacattaaaacaagaaaaatgagtcgattttgcctttagcaagagctaatgataattaaaagataattagacggtcgattgtcgaataattaaaaaaaaaaacaaggattaaataatagatttgttttgccaataaaaaataaaattaaaaatagttttgtggagggagttgctaataggggaatgaatggatagaggttgacgtaagacgtcgctggagccacatgacacgtgtactagagtttctattactggatttttttaaaaccgaaaagactagaacgcccttctgctttgcgtttttatttttgtgttcttttcagcgacaacaagtgaaagaaaagattcgagtctttatgtgtcacaaacagaccacaagcttataaattagcataaaatctgcattttgacattacagtcctataacataagatgattcataaggaagtcttttgattgaaatttgcatcaaaaagcggatccgctgtttttagttttgcctagcatcacgtctttagcttcattgatcttagaggctaggaaatggctaccacctgcatctggatggtttgctaccattaccttcctgtgtgcttccttcaccttttccgccgctacactctccctgtgttttcaatcacaaaaccccacatttcaaacaacgttacactttcttcaatggaaactatgctaatgctataaccaaattgatcattgaggattgagaaactactaaacacaagagaaagagagagtatgtgtgtgtgtttccttcacctgacgccaagaatgagagcagcttcccttttcgtcatcgtaggctggaaaccgccctcataaaatttcttaattttgggccttggtggccttgccttgaatgcttgccatgcttggattccatatctaccagcaagtgctgttgcagctactgcaacccccgctataaatggtgtcgcctggtgtaccaaaaacgcataacacaaaattaagcatttgtatatgctttattcttcttaccatcatcattctccaatgaatcaagctcacttgtcacagttttcaaaatctattgattaaaacttgcaaagaggactcatttctgctacagtaaatgacaaatacattgcaaacaagaatccaaagggacttaagacacactacattcatgaaagaagtattttgcagtcagttttaaatcttatcttaactaaacacaagactcttcaagatgagaaaagccaaggcagtgactcttcaaagattcatttccttatcaacaaaatgagccaagagagattcatatccaagaaagatcgatttagcttaagaaaatcattgaccagtattaaacacgattaacagagcactgattcatgatattataaaacttagaatccaaaagattcacagaacaagactcacaactaacggatgaaccctaatttctggaagagactattagtgttccgaattacgtaccattcagaaatctaggattcttcgtttcatccacagcttatttggatttgcgaagccgcagaggtggctgatgccgtcagagctctccgatcgctgcaaccaaaatgggaactcaatcaaaacctttgaggctgagctaaaccggttttaacgccaaccggttcaaaaccggttttataatttctcaatagaattagcaattggatcaaaccggtcttttcttatttgcatttttttgggtattagtgatgagaaggggaggaggtatccaagtatcttaaagagcttacaaacccaacaaaaatccacacccaaaaaaagagtataacaaaagaaacgaatttggattacaagttcttgaaagcagagtcatgagcatcctttggaggagtgagcctagccaacaatgccttgttagggcaatgatctgcatccacaaagtagaaattcccatcagccttgaagctcacatacggtctttgcgtgtctggataacgtatgtctgagaatttcagtgtctttgcgctaaatgtgccgagccaagtcatcatctcgacctcaaaagtgtctgaaccaggctgccacctcagcttgtgcacgtagggactaacaaaccagtggagagcagcggttgtggatgcgctaaggaagatcacagtagaggcaacagcacctttcatgatcacattcagtcccggggaagtcatgaaagtgatgaccgggccaagagagactgatagacagcaagtggagagtgagaggagtttcactttctttatggttgatgagattggtccatagtaaaccacacctccatccttctcttctttcttctcttggggtccgatgctgatcttgtgctcatcatcgtcctctctagtctttgctccaaatgatgcccagcttctctggctaagggatggaacctggaatctgaccttcgggttcactgatgatgaccatgatcctgctattgaccggtgatgatatcctgaaaagaaatgaccataggcttgatgaatctgtggtatctcgtgaccacatactactgcttcaaacaacagctaaggctcacaatgcttcaatgaagtggaaaaaccctaacttgccatttctcatccaaatgaagcacaaccccagtttcaaatccgtttgagaccaagactacatattgcctaaccaattgctaaaactcaaaatgctacaagtgaacgggaaaaaccctagcctgccatttctgatccagattaagctatggtatataatgctcaagtcaatttcaaatctatttcagcttatcggatgcaaagtactttcaccaatcaaatcgaaaagggaaaccaaaatcacgagagtggtttgagaaaatggatatacaaaacccataaagacaatatatagcagccatttctactctaaagccgtaaggattgagcttttcccgtaaattgtataaacaccatgatcggacttgtttcccggaaaatgaaaggtgtatagtggagaaaaaaagaacctgaagtgaaggtggaggaagagagacgtcgggattgggagcgaagcaagtgaatcagagctgatcttcccatcgccgtttctgttgcgagattgcaaagattcaggtctcctcctccaaatgaatgttgtagggttttagagattttattttcctttatatattaataaaacttgtagctttataaatttcttttagtggtctagtggttactgtttctctcttcaagcatgaagtctcgtgttcgaactttttttctttgaccttgataacacttgcacacctttttttttttttttttttttatcttcaacacctaatggacaaaattttatttttgtgtattgttttatgtctctctacaaaatcacatgactgattgaggaatttggatccgaaacgatgactagagtctagatatgacatgtattaagggataaccattagttactcgagttgtttagctaagtaagagtccgtgtacgtttttcggtttcttattggctcttcgaatcaaaaatagatgatgatacaatgtaacataggcaaggacaaagtcatcgttgtaaataaagtcaatgatgtaagaaatacaaatataaccgccatttattaatctcacttactctgtccccaccatcactcactgattttattatcatcaaaaacattgagatcttcacccttatcatttgatccaaccatggctcgactccttctcctcttcttcttcttccttattctactccattacgcttcttgttccagacacgaacaagaaaaagaccgaatctttcaccttcccggtgaaccaaacgatgtctccttctctcacttctctggttacattaccgtcaacgagtcagcaggaagagcactattctactggctcactgagtcaccaccgagtgaaaaccctgagtctaagcctcttgtcctctggctcaacggtggacctggttgttcctccgtagcttacggtgccgctgaagaaatcggaccttttagaatcaatcctgatggcaaaactctttaccacaatccttactcttggaacaaatgtacatctctctctgtttctccatttctctccaaattttgatttcacaatccttaaattaacactctttatattgggtcagtggcgaatttgctcttccttgaatctcctgctggtgttggtttctcgtattcgaatactacctccgatttgtatactgccggagatcagagaactggtaaagtcttgacctttgacttctctttctctagatttatcaatcatttgatgattttggtttgattttttctagcggaagatgcttatgtgtttcttgtgaaatggtttgagaggtttcctcaatacaaacacagagagttctacattgctggagaaagctatgcaggttattgttattactgattctattcaattggaaactttgtcttagctaagcattttcacttttcttctttaggtcattatgttcctcagttgtcacagattgtttatgagaaacgcaatccagctatcaactttaaaggcttcattgtaagcaagaaaaaaagaagcacaaatctattaacatgttctttttgtgttggtataaacgtgagtttgtttctaggttgggaatgctgtgattgatgactaccatgattacgtgggtttatttgaatattggtgggctcatgggttgatatctgatctcacttaccacaacttacggatcacgtgtgaatttggatcatccgagcacccgtcctctaaatgcaccaaggccatggaagctgcagacttggagcaaggcaatattgatccttatagcatttacactgtcacttgtaaaaaggaggctgcagctcttaggtctcgcttctcgagagttcgtcatgtgagttttccatcactgcccatcatattcctttaactactattaccagctcgagtaaggtagttttggtcattaggaggttccaactttactagagacagaacatgaaagtcaaacctttatatgcagaattggctacgtatctagtgtattagaccctctctttgtgctaccagattcaaaatgaccaatatatgagcctatttcaacaagtagatgtactttggttagtccaagaaagtagagtggggattacatgatatctggattctggactgcaaaaaaatctttcggattctctctgctacttgattccaattcattgtctgagttgattacttgatttgctttatggctgcttctatagattcaagttattctaccaagacatagtccataggtaacaagatttgacaaatctctaaacttgctacgttttttgtttatctaagccatggatgtggagagcctatgacccttgcacagagaaatactccggcatgtatttcaattctccggaggttcaaaaggctatgcatgctaatataacaggactagcttatccatggaaagggtgcaggtaaaaaacacattatagtgggtcaacaaatttaagaaaatgttctcttgtggttcattttcagtgacatagttttcttgtttagtgacatcgttggagagaaatgggcagattctcctctgtctatgcttccaatctacaaagaactcatcgccgcaggtctcaggatatgggttttcaggtatatctacttctccttttgatcatcatcttgtacatcccggtttggtatcatgattgatatcttgttctgtaaatttggatgcagcggagacactgattcagtggttcccattactggaacacgatactccattagagccctcaagttacaaccactctccaaatggtacccttggaacgatgatggacaggtagaaaaaaacaactcaatactcagtttcctcagtctcatttctttcttctgtggaaactaatgcatgagtactgaaagaacaggttggtggatggagccaagtttacaaagggctgactctggtgacaatacatggagcaggacatgaggtacctcttttccgccctcgtcgagcttttcttctttttcagtcgtttctcgacaacaagccattgccaatgtaaattgtaagacactgtgataagaccagagttttttataataagaagtaagaatctctttttcacattctcagctatcagtttattcgcactaatgacacaaaaccttgagcttctgtgtctaatcctaacaaatgttaatcattttcactttcaagtcttcttcacattatttattccaaaagctttgtgtaaatatcaatttagctgatctgatattcaaagaaaataacaatgttgcttagctgctactttaaaattatagctttccgttgcatttcttggtacacaagaaaacgagtaagacatggtttttaattaaataaattaatattgaaatggatgtctaagtttatgggaatgcatttaattagaggcacatgatcctcctctttgggattgctcaccttgtaaacatctctttatgcttttttgaaaataattatttttcattgatgtgaaagaaaagaattttaaaagccaatatctcactcgttacaaaaaggtaggacaaaaagaacccaaattgtaggttatggtccaacaagatcggtattaggtgaaactaaagtgaaaatatatgaacggacaagccatgaaatgtcaaactaaatcggcttaccaattaaaaccaacccaatcaactaattatttgtgatgagtattttatttggttatcgtttataaaggacttgcaaatccccactttctatgaaaagttcctccctgcagagacgatgtttgtctacacgtctccatgtgaaatacatgactaactaaattacggtgcaagcaagcaatatctagcttttaattagtcaaagctaagaaatatccctatcataaaagtatcaaattatgaaacctgtaaaatgaacagagaagtatactattttgacaatgactacataacgatacaaatgaataaaataaacacgagataactttcaagatgagatatgtatacaagatgccaatgaatcagaaacagaataatgtgtaagaaactagagagtagtcaaaatactcgatccacaagtaagctaatttgactatatgcattattaatcaacagtttaattatatacatattatatacaccacatatatgatacctaaaaatggcataagttgacaacgaccctcgtttgccaaattatagtataaaatcatcagggtgttaaatgagagattcccaataaactcaagaaggaacaaagcactctctttctttgaagatgatgatcacaaaaaaactatatcaatgtatgtgtttattatgcatggtgattgcattattagacgtagtgagtagtgatgatgctaaagagcaaaagatgaaggacaagattatctctttgccaggccaacctcctaacctcaacttctctcaattttctggctacgtcactgttgatcccgcggccggacgggctctcttttattggctaaccgaagctcctaggcctagcggaacgaagcccttagtcctatggctcaatggtggtccaggatgctcctctattgcttatggtgcttctgaagaagttggtccatttcgggttaatccagacggaaagactttgcgtctaaatctatatgcttggaacaaaggtattctttaaatttgatttaatttggaattcttaataacgaaacacatcagaattcttattattagtcattttgataatgtatgcagtggcaaatgtgttatttttggattcaccggcgggagttggtttctcttacacaaacacttcgtcagacgaactaaccgtgggagacaagagaacaggttttaatcagtttcactaattataattaagaaagtagttattaattacatcattaatgaatataagatattatgtggggacaaaggggaggatgcttatagattcttggtgagatggttggagaggttccctgagtataaggaacgggctttttacatcgccggcgagagctacgctggtactttctttcttccttcattttactgttacattttatatattctttctcttctaatttactaaatctactattttttatgtaaactttgtcatgtaagattctacaaatattaagcagttgaaccaaaaggttgtggacgttgacttgatttaaatatctgatataactgtttatgcctacgacacgatatgcacttccggtccatacatgcacatatgcatcatgcatgtgcataattaaaccctataatttcgtaacttatttttttcattcaatggctatttcaattacgaatcaacggaaataaaagaaaatcaacaacaacccaattgacttttcttttatgaccaaattaagtcttcttgactagtggacaccatatagatttcatacgaaggttgtaacgttatgacgtcgccggtggaactaccatatattatacccaaatggccaaatgagatatgcttgatggttattggtgacaatattaatgtttgatcttattgcattggttttgtgattaattaggacattatattccggagctagcccaactgatcgtcaaccgtaacaaaggtgccaaaaatccaactatcaatctaaaagggattctggtaagaatttattttgtataactcactcatttatgattcaattattgaagactaaacttaatgaataaatatgaaagatggggaatcctcttgtcgatgactacaatgacaacaaaggaatgcgtgactactggtggaatcacgggcttatatcggacgaaagctacaatgacctgaccaaatggtgtctcaacgactccatcctatttccaaaactaaactgcaacgctgctctgaaccaagccttgtctgagtttggtgacattgacccttacaacatcaatagccctgcatgcaccacgcatgcatcatcaaatgagtggatgcaagcatggcggtatagagggaacgatgagtgtgttgtgggatacacacgcaagtatatgaacgatcccaatgtgcacaaatccttccatgcccgtctcaacggcagtactccttggacaccttgcagtcgtgtgataagaaagaattggaaagactcacctaagtccatgcttcctatcatcaagaatcttcttcaagctcatctccgcatttggatcttcaggtataatcactaaatatatatgtgtgtttttgtatgttaaacttcataagcttcctactcaaaatcaattggcagactcgtatattttacatcttactttagatgtgaggtttgtaatagaaatatttgtgttgaattatttgtatagtggggactcggacgcggtgttgcctctaagcgggacgaggcattcgattaatgcaatgaaattgaagagtagcaaaaggtggtatccatggtaccattcacacggcctagtaggaggttggagtcaggtttatgaggatggcttgctaacgtacacgacggttagagcagcagggcatgaggtgccattgtctcagcctcgtctcgctcttttcctcttcacccacttcctagccaaccactctcttccctcctctccctcttaattttttttccacttatttgcatgaggtacattttgtaaacatcattatttgcgttttttattgataggtggtatttgtttctgttttgtgtgtagttgttacgtattagaagacaaatatacatctttttcttttaatattaattaaaaataaagtagtacatggagatcaaacttgattggctgaaaatgttttccaaacctcttcgctcataaacaaatctctagagtccccattccctacaaatatacaacaaacaacaacaacaaaaagaagttatataacataacgttgaaccatgtgaattagaaactaggagaaagatttaaaacaacatacttagctttatcaccaaaccagtggtagacggatttgacggtagaggagacggagtccacgacaggacgggcatgttcatcgaagaatttggtaaagtcggttgcggctgagtctatcctctgtccgatggttggtgtttcctcggcagaaaccaacacggacataagcaacatcaaagccatcaccaaagccaccttcttctccatgatcctgtccgttaacgtagattcttccttcttctattttctttctttgtgaaagaggtgtcttaaataaatgacttgagggaacaaaatgtaaaacaatgacatcctcgtgagtatgtctatatataacttgctctttctggccacagtctatatataaactgttagttttggcgagaggtgtttatttttatgagaatgagatcaatgaaattatgttttacgttaaaactcaaaaggattggtggtaattaatccatcattatatccatggatgagttttgaagttccgttttttggttattaaaagcaattcaaaccaaagatagactaaacatgtcattgtttgtggttttaaaaaactacatgtaataattattcacatcaaacaaccataattgtcatgattatgtttatagatcagctgagatcatgacagtaagtaatagcggtatacacactgagagataagaggacacacaccacaacatttaatagaggttccacaaacaaggttggtccaagaccactacaggccttcaccaccgtgagcttggcctagatttgcttccgccgtacaaacgaaagacaccgaaagccgaaatgcaagagatcaaaaccattccaatgcaagcaaacaaagcgctcgcaattccttcacccacttggttacaaaacttcccatacatattacaaattttcatccattgaagctctggctcacccaactttgcaaaggccgcagactgcgccgcggctgcaacccccgccacacacaagtatgctactgcctgctcataacatacataacaaggtcatgaacaatgtcactactcacttatacaacaacctatgtgaactagaagaatacagagaccgagtcaatttctttgctttcagttagcaggaccataagagattatcaacattcttgatcaattattgatttagtgacattaatgaaagattccaacctaaacccaataaattcctataccctaccaaacaaatgaatctcacacggtagacttttcaaattcactgacccacaaaattcacagcaaactttttcagtacttaatagttaagtcccaagcaaaaacagagaaagatcaattgggtaaaaaacagagtcacctgatcgccgaagaaaatggcccaagccagaggcttactaaacaaaactcttcctttcatcaaacccaccacgcaacgaaccgcctgaaccaaagaataacccgcggctatgccattgacgaccaccaaaagcctgaactcagagaacgattgttactaaagttgcgaactttacacaaaagccataaaattgaggaatctttgtcatgaagcttacacaagcgccttcatgtcggtgaatttggctttcttctgaatcatgaaaatctctctcacttgaacatctgtagcaatgagaatcgcagcgacgagagcaaggacacaaaccaaacacctcagaatcaactccgtgactctcactttccgatcaatcagcttcattttggtagtacttccggagacgtttccgggactaactccgactcccaaataactcatctctgtccgtaaacttgatttcttattaaaagatgaaaactttgtgagattttcagagagactgttgatagaaacaaaaacactgatttgttgtttgttagttggatcctttgttgcttttagagtgtgttgctacagctctccgtgttaaagcaacaagtggcttaaatagaaaagagactattaatgtaattaattgcaaaatttgcagagactattgattttaaaggtgtagagtttgaaatcatgtacccgtgactatccctatccctaagactagtttgttaatcatttgcatagtttagttttgttggtgttgaataaactacacaaatcttaagtacatatacaaatgtataatttgactatggattggggagatacatagatcaaacagaggtgacatgtgtcgtggacgagagatgttcgtagaagtaatcacacggaaccatgatcattgcccatatctacgcggtattttaatgatataaaagtaagatttgtgggatatgaatatggtcggtttgagaacatttaaggacttacaattattagtggaaaagatggagacagacaagtgaaagtgaaatactatgaaagtgaagttatgaagtttcctccacacactttttagtgaaacacagtttgcatttttgttgagattttagaatcaaattttggaattagcaactctgctattaacttatgcaatggatgtgcgtctaggaaaaatagatttcggattttaacccacaaaaagacaaaatgatgatcactaagttaccattatttagtactgctttaaacaattttcatgtttgataatgaggaaatttagtaatttagaacattgtacaaaagttataaagaaactcttagaaagatttagaaaaatgggctttgcaatgactattgagacggtacgtgtatccaatagtggggttggtggtctatggaagtggtgtggtgcatcattgcatggggttggttaaatttaaaagtcattcatttgtgtaatcatggttctctgtttccaccgtaacccaaactaaattgttgacaactaagagtttttaaacaagtaaatcattattaacttgagatcatcaaaggtaaaacaatttctatgcgtccaaacatttacattagtatggttctaaccattgttctcagaggatcttacataaaacttgatattgtgtaaccggttcgcgaggcttctagtgctaaattacatttgtatgttttttttgttgacgtaaattgaaaactccttcattgaaaaatcgttggccgaatgttaagctaggaaaaataataataatgaactaggagccactaacaatgtgttgaaatttaagtcgaagtcgacactgaacacacacacattttataagcatgggtgaactgcatgagacccacactttacattacacaagtccgagaccgagatgggattagtaacctcatgtgcagtgtcaccttcctaacttgtaaaagtgtacaaccttaggagggttgtttattcagtctgatggcccaacaacatattacaatttacaacaatttgaatgggtcttataaagctacaaataaaaataaacctaatgggcttaattgggctctctcgtagaattaacaaaaggcccgtgatgttaaaggcggtgtgattctttagggcttcctcaaaaccctaatctcttaggtataaattgacacaacgcaccaccttccttctcatcttcacttcttcaaccttttccactcttacgattccttaagaatctccttctagcttatcttgtattaattttgagttttgtagggtttaggttgtttgattaagttagcaagttagggattagttacgtgacgagatttctctccaaggaatctattactaaaaagatggagcaatctgaaattgtgattgcataatccactagtaaacgtcacaaagcaattgggcatgcccatggacgttgatggagctctagggcttctccgttttgggtatcttgctattggctctcatattccattgccttgcggagcggcgtcgctgcttttaccgtttgggaccggccatgagatctatattcccctgtattttggttttcagttttatctagttaggattgtatttagccaatgaggacatcagattataaaagaacaccatctttcgggactgattaacattgatgatacttctgcaattctgaggctatttttttgatgagttttgtttttgattagtatagaaaaggcagtgatgaacgagaatgtcatgcaccactctgatattagtgctgataaccatctctaacccatattttctctgagcctttattatttctgaaattttttttgtaagtttataagattgaaaagggttttaatagccagatgatggtcattataatgacttgaccttgatgcggactgtatttctttgatgataacttttggttgctgatggttatattattacccttttacagttttacattttgactgatttggttttgtgtttacatatttttaacgagggacacaaattgtgtattggttatgtggttggctttgttttacagattcagttaattgatgtgatcttcgacgggtttgtcctaactgtagctgtgggtgatgatagttctgaaaatctagtctggatgttattgatgaaggtgtttggctcattccattatgtctagccgcttgagacgtttccgcagtttatgacctttagtttatgttcgttttgttatgttcccgaagccggtaataaaagtgtatttctgaaactactacgccttgtattcaatagataatattcatattctacatttgatttctacgtttcttgtaacccagccatacattaatttatcttgtaacttataccgaaacgaagtaaactattattagtttcttgtaacttgatatccatcaatctctgatgtctacgaagaataaaaagatgagaaagtctgtgatttccttacgcgtacatcttattttaagcaatcatcagcttcaccttcaagttgtcagaacaagggaaagacaggctgcttgtcaagatgtcttaattggtgttcccattttcgacgaagaattcttgtgtgataatcttttctaatcacaacatctttacctatacttaattcaaacactcttgaatctaattggtagtagtatcagaaccgattaaaaccaaattgctttatggccaatcgattaccctgcaaatagtaaaatccaacatcaaacaacttataaaaatgcggtgatcgttgtcttctataagtcccgatcatacctaaattcgtgtataaagaaaacactggaacacactcataagtcatgactgatagcgtctcactcgtatccaccagcgccactagtggaactcatgcacattttgctagattaaaaaaaaacgccaaagtagtagcatgctctctatctataacgttaaaaccaaataattcaaacgtagcttagaacttcatctctgttggttgtatccggaataaaaaaattcttatttacacaaattgagatgatctgaaaatatatgtatcccttctggccaaaatatgaaaattacatgactgatgaaaaactgctgactctttatgtcacaagttgcaaaattaaatatttaattattttaccttttaaaaataatttagttacctttaatgggcttgcagagcaaatagtttgggccatgaagagcaaatctattgggccattaaggcgtataattaattcccaaaggcggtgtgtgtctcttctagggcttccaatttctcttgtatatatacatatccgcgcgcattctctcttctcatctcatctcatcttcgtcctcctcatttccttggattccttattctttgtttttttttcttttgtgtatttgtctcgattttgattttagttacgtgacgagatttctctcccaggaatctattaccaaaaagatggagcaatctgataattgtgattgcataatccactggtaaacgtcacaaaccaatagggtaagcataaggacgttgatggagccttagggcttctccgtcttagctattgccactggctctcatattccattgccttgcggagcggcgttgctgcttttaccgtttgggacctgccatgagatctatattcctttcttattctcaaaagttctctgttcttttggttttcaatttttctaattagggtttagtagccgatgtggatatcagattataaaagaacaccatctttcgggactgattgacttcttttgaagttttgctgatacttctgcaattctgaggctttctttatttgtttggttacttgtggtttgattagaagtagaggctgtgatgattgagaatgtcatgcaccactctgattttttgtgctgataatcatctctaacccatattttatctgagccttttctgaattgttatatgacttttggttctgaatggttattactacccttttagatgtgttgtctgaattagattgattcattgtggtgcacttatgaattatatttgtgtgaatggttttctactaattgttcacattggttggctttgttcgtaatggttatgctgatgggagcttatgcggagggtttggaggttgtctcatacgttgattgcttggttgcggaaagttctgaagattctgtccgaatgttgactttttggtttcggaaggttctgaagattcagtccgaatgtcatatggttaagagcgtagtgaagatattgttacattttacgaccttgaattcttgttatagctaatatgagtatttgtacgatttctaattgttatagcttaatataatgagacattgtttttcccaaatttcaaaagttttatcttggattgctaatttgttatacctgaaatcttaaaacatcagtgctggatattttcaaggcgatgtagatgttccttgcgtgcttgaaaacaaaaaaaatccaaacgattcttttcagttttcatcaatcaattgagcacctgcttccttcagatttatatcactatgaaattagactttgaccgcaaaaaaaaaaagagacttgatggacttagggtagcagagaactgtacaaggtgtttaagattctgaactgtccgaattggtcttctgtcttcagttttgtttcgaatccctcccatagatgtattatataagaaatgtaggttatgttcatgatttcttttttttgggagcaaccaggttatgttccaaaaatagtatggttacagttgtacaaaacagcaactaaggagataaagttttgaacagttgaatgcagaggaaacactcataacagattttttcaagtcaataacagacacttttttgcaaactgtcactctagctaatcattaaaaactggatattgagcctgatttgttgtcttcgaactctcctattcttggcgtttcttttttttctcaatccattatgctcctataaatatactctttcaagtttcaatgcttgtaactttcttcaggacatcttttctggacttacaaacatttctcgatcatttatcgatcagcgtaaggtttcgagaaaaccacttcagttagagagatggtggaagaagcatcgaaatcagagcagataaatatcacagaggtgtggacgacgacatgggagacaccttacattatgcggctggctctctctgccggtattggaggactcctcttcggatacaacacgggagtcatcgcaggggctcttctctatataaaagaggagtttggtgaggtagacaacaagacatggcttcaggagatcattgtgagcatgaccgtggctggagccattgttggagcagctataggaggatggtacaacgataagtttggtaggaggatgtctgttcttatagcggatgtgctcttcctgctgggtgccctggtgatggtgattgctcatgcgccgtgggtcatcatcctcggcagactcttggtgggttttggggttggtatggcttctatgacctcaccgctttacatctctgagatgtctcctgcgagaatcagaggcgccttggtcagcaccaacggacttctcatcaccggaggacagtttctatcttatctcatcaaccttgccttcgtccatgtaaccaaccaaactaactcacaaatatgtttattttcttttcttttttaagatttgaaaagtctctaacttactgatcacttacacagacaccgggtacatggaggtggatgttgggagtctcggcgattccagcgatcattcagttctgcctcatgctaacgctgccagagtctccacggtggctctatagaaatgataggaaagccgagtcaagagacatcctcgagagaatatacccggcagagatggttgaagcggagatagctgcactcaaggagtctgtccgggcagagacggctgacgaggatattatcggccataccttctctgataagctcagaggcgctctctcgaatccagttgtccgccacggtctggccgcaggtatcaccgtccaggtcgcccagcagtttgtgggaatcaacacagtcatgtactacagtcctactattctgcagtttgcaggttacgcatccaacaagacagccatggctcttgctctcataacctccggtctcaatgcagtggggtctgtagtaagcatgatgtttgtagaccgttatggtcggcgcaagcttatgatcatttccatgttcgggatcataacttgccttgtcattttggctgccgttttcaatgaagcctcaaaccacgctccaaagatcgataagagagactccagaaacttcgcaaaaaatgctacttgtcccgcatttgccccattcacagcctcccgttctcctccctccaactggaattgtatgaagtgtcttcaatacgattgcggattctgctccaacggagcacaggaggtaataaagtctctttactcaaaacacacacaccaaaacagtactggctagatgaattaagactcatgttggggttatatgtgttttgtcacagtacgcacctggagcatgcattgttcagtctgctgatatgaaggcattgtgccactcgaaaggcagaaccttcttcaaagacggatgccccagcaagttcgggtacctggccattgtcttccttggcctctacatcattgtgtacgcgcccggtatgggcacagttccatggattgtcaactcagagatctatcctcttcgctacagagggctcgcgggaggaatcgctgcagtctcaaactggatgtcaaatctcgtagtgagtgagacgttcctgacattgacaaacgcagtcgggtcatcgggaacattccttctatttgcagggtcatccgcagtcgggctgttcttcatctggctgcttgtgcctgagaccaaagggcttcagtttgaggaagtggaaaagttgctagaaggagggtttaggcctagtttattgcggccaacgaccaaggaaaatcaagtggaaacgccttagcagtacttgtggctgcaaagccaaaaaacaacataacacatacaaatttttcttagtttgtcacttcatattctttttactctgctcattacagcagagacacagaatgatatctaattagagacatacccccacattatatagttgaaatatcccaacttatacatagatcattcttgcaaaagctataccatactaacactaacaaactcctttttgtattattataatttaaaagttttttttggtaaaaattataatctaaaagttgatatgttttcttaacaagaatcaaagatgcttatactaaaactaggcaaaatagtgagataatgctttagcaatgaagaaagaaaacgtagcaagttgtctgttgtcgctgtctttgtctataatgttaactttatctcgttaagtacccgcttgttcaatttatcacaagggtcaagggagatagagcctagtgacacaaaggagacaaatttacctcttttgagagcaaagaggtttcaagttagcatattttgcagcttaagagttgcacagtagagcagtggaatcttgatgacatcaacacagatcaacggatcttcttccatgcttgcctatatgaatcagaaaaaaaagagttaaagttgataagatatttaggagtgatagaaagtataaagtgttaacctttaatttgatttctccataagagtggtaacacaaatacaaaataaggattctatgagcaacattggattgcttgatgaaattgacagcgccaaacacacacacaatctcatcaaatggaatggcaaaaacaaagcaataaaaattagaactgagagagacctgtccagatttttatggcagaatcagtttcgatagccatgaattgatcaagagaatcttcatcaaagaaaaaaagagacaaaaatcagaatccgccattttcgccgttttggtaagagaaagagagaagtatttatgttttggggaatttctgagttctgagaagaagaagctacaaaatgcaattctattataataaaaggcctcattagttattattatttatttataagcccaatcaagagtactaaacggcgtcgcagaacttcccaaataaaaaccctgagaattcgtctttctgtctctgttgttgacctgaaaacttgcggaggaggagttctgaagttgcagagagacagagacagagacagagagagaaagagagagatcgaggatgggaatattcagaagctgcttctctttcataacgggatcagtttttggggtgtacttggcacagaactacaacgttcccaatatccggaagctcaccaacaccggcctcgtcgtcgctaagcacgtggaagagaactatcgcaagcccaagaaagacgatccccaatgattttccgtacacaccaatcgctttctctttcgtgtttcttctaactttcggacttgttagggtttttcacgtctttttagttttgggaattgaagaaaaatcatcatcattcattcgcatattgaatttggggtttcttacttgtgaatttagattgagatcggaaacttcaattagaatctcgtgttaggagcttggtctaacaatgttgtgtctatgcaaactccaatcagtttcattgttaatgtattcaaggtttcaaatgtgaaggtgatggatgtttggaatgtgaaggtgatatctatagagaagagtggaggtggtgttgaaaggctttctcatcatattaggagttttggttctgccaatttgttgcagagatttgatttcactatcaagtttgattaatttacaaggttatccatcagtggtggctgctggttttacttgcattcttgtatgattactgatactagactcacactaaacacatcactgtgtctatacacttcttttacttcttttgtcaagatgtaataacaaccacaaggcagccaacatcttgttacctttttggtaattgaagacactactctttcttctccgtttcctttttagctgagagattcatggattttgatttcatagtacggttgtagataacgatttccagtggccatggtgaatcagaagaggaattttgttcagagattctgccgattttgatttcatagtctggttctagataatgatttcctgtggcctcacttgatcggaataggaatttttgtaaacattgctaaattcccaaatttctcttctatagacctgtactgcttttttcattacaaacactcattatacatgtgaaagagaaaagtacttattcatctagagggtttggcattcatagattaatggtataccaaaaaaggcaaagagtaagagatcatatgcaacccgtttcgtcaagttcaatggtggctttaacatgtttttgaccttctctcttttcttaaccaattaatattattatccttcaactcgattacattctaaattatctaaaatattctgcatcatttgactcagtccatctcctcattggcgtgtttttttttttttctccttgaatcttaattttcttccgtatattatttaaaagtttataacaaagtcgttttacctcgatgtgaatgtttgtagttgtttttttttatcaactttcttctgtaaattatttgaaagatagtagtcttctctatcttaaatttcttccttaaatgatttaaaataaaaacgaaatagtcattttatctcgatgtgaatggttattatgaaaacaaattgttattaatcctacttgctagtaaactttaatttttagtttattgcatgttagatagagattgtgggtgaaacgtgtaaagatgggacttctcaataaaataaacgaattgaatcactttccgcatacatacaaaacacacattccctataatttgtcaaagcctccctgaaaaataaacaaacctctagatacataaacaatatttatacataacatttacagcaaactcgccggcttggctctgccgtgtgacggcaatgaaggagccaatgatgcgaaggcgcaccctcatgctctgcgagaaactctcacttccatcggtacgttatacattcatatacttagacttctcttctatcaatcacttcatgcatctttcagttcttctctctcttttccatttttgaagttcttttgttttcttctctctaatttgaaagctaatgaatgaaaatatttggttccctgagtctatgtaagttgtcttgagtgaaaccatcgttgttgttggatcatcactttgttttttttttaattggtgtgacatgtatatagaatttatatgttgagcaaaatattaactttgggaggccaaaaacagtttcaagtgatagagataaacgcagatgtgggatgtgttgcttgtcaagacagagtctctaagattgtctccaagatgaccggtgagctctctacgttaccaccaaagattatttcattaaactcacaagctacttgctacttaattaatcaatttttaaatatgcttaaattctaatttcgtggctgctaccaaccgtttaccatcatccttattcgctcttaagaagtaagaaccatccacgatctttttgtttaatcctagctgtcatcattgatttttaagaatcaaattcattgattaaaaaaatcagagaagtagagaaaataattacgtatgtgtttgaccaaagaaagagaaatggctgcaggaatcgaagagtacgtggttgatttgaagaagaagttggtcatggcacgaggtgactttaggccacgtttggtttcttctcaacaacaagtcaaggacgttgtctctcaaactccttctcaaaacgccaaacgccttttgcgacctctaaaaatattccttcgttccattttctctctttgtttacgtccaactacattataacatcctcacttactacaaaacgcatcaatagttgtacaaagttattaatatctagagtgatttttttgtggtacatatcataaatttgtcttttcttttaaattattttgttgcatatattcttaaatttttttcaatttatgtgattaataaactggaagatgcatactgttcattaaaatagttcttgagagaaactgcataataaaataaaatcttcatatataatattctcactcaagaactattttcataaacaatatgcattataccaatatacaaaacaattaaagagaaaatggtaataccttcaaggcttcaatgtttctctttctcccaaagaaaacagctaaaatgtcacatttttttgttatttactcttattatttaaaacaaactttttccttatataaataaataaaacttgcttccatcaatagaaactcaaacgtcatgttacccaattccaaaatttaaatatttcagacaagaaattatatgtaaaagaaaattgatatctaaaaaaaaatcgatatctaaataaccacacgattacataaattttttggcaaacaagaatgcttaatttattgagaaagaaatgaatgtgtaaaagagttacaaatccccgaaagaagccattcgttcgtattaataaaaacaacaaagtggagagtaccgttttcatactctcactggccttcttgtggtatactcagctcttcatagtcaccaactattacctcaaatggctgagaatggtaagtgtatgcaatgtataactgcttaggttggccgggacagggatcgcaaaaacccatgatccctgatttcttcactccctcatggagcttgagctgccctgagtcactcacaaggaagttcatcggcactgtcacgtcaatgactcccgaatccagtccttccactccttcgtttcttctctctattgcttttgggtcaccatacaacgctttcgttactatgagcccatctgtttcaacttgacggtttttcttccttgtggctacggtttgtagcaattgctgggctttctcagcccttgcccttgcttccccaacctaaaacccacagtttaaacaaatattcataataagatcatctacaattacaaggaatctcgcttggctaccaaactcggaagtaacaatcacctggccccaagttttctccatattctccaaggccttttgtttttctcttttaagcaaatatggcttcaccacaaatttctgcgtggaacagtgaaaatgtttaataaggtaaacagcttataacaatagaccaaaagtagattatatttagagggtccaatcactcacctttaacaaaaagtaaagagatgttggaacaatgaatgctccagttgcaaatactggagctaaatgtgcggagagtagaatctgcacgtttcaaagataatcatcatgaaggtgtcaaaagtgaaagacttccccagagtaatacggatgtttgtctttgtccataattgagttgggtaaaggtttcagagagtcaaggataatgctctagaatccatccctaggcttttaggattggtctttggttctattggtttatgcttttttaatatattctactccacagattaagacacaatctgttcggttcttatccgaagacagcagacatgacaccacaagaaaagaaaggaagaaagtaacactcacgggaacaatcagcttttggctaccacggtgtagctctactttccagaaaataccctacaaacaaagtataagagtaccggaaataagcagattgcataatggctaagatggctccgaaagttttaaagagtagtttaccttgagtcctactgtatacatcattcttactgtactgaactcagaaatttgccttccaccaccgagctcaatctcaagagcattgctgaataagttaaaaaaaaaattccaaagtaaaatgagaacaatgattgcgccacacatgtaaagacaacttaaaaaatgatttctatcctctcgcacatcatacattaggttgctcgggattgtcaataaaacataccttccgattctacccacaatgcgaccatgagatttggatgaaagtttacgagtataacgagctgatgctccgagtccaccagattcaatctagtaatagcaagattagagctagggaaagtaagaaaggtggtcgaggtaagaacagtcagaatgcaatttggtactcagcctaccttaaagtcaccagcagcagatacattctcgtctctctttttccatccaactgtaattgctgatcgcatacccagtgccagttcaatctggatgaaatgaactattttaaaatcgagaaaactgctttctcgccatcttagaaggtttaatcaaaacaacagagcgaacttacatttccgcttgaagtttctgaaagctgtcgagtccacgtgttggtaagattgatggagccatcactcaaagactttgaaatattgattgtggcagttgaatgtatggttaactgactgccccaacaagaaacccataagagtcacataaaccgaaaccataaaagatgcccagaaataactggaaaaactcatgagcctaccgtgttgtctgcactccaataagcgactgcaaacccgttgaagcgacaaactctatggatgacactggagaaatctgacgtctcagtatggcagtagcgactccgccaccagacttttcattggccgccaaatttccaccaatggcaattgcatcatcttttgacaactgagactgcacttgactagccataaccattctgaaagttgcagatacaagcacaaaagaaacgaaaaggcatcaaaaactacttcaaatgaaacaaagtagtcagggctagtgttgagcaaccaaaattctcacacaagataactaatacacacaactagataagaagaaaacagaaacaagaccaaatcttttctcaataaaccatttgctatcaaaactttccagactagtaagtgtctccaaggtcaaattaggaacccaaatcaagaaccatgctaccaaaaatacatcaaaacttgaaaagaagaagaaaataagtaccctctcatgatgccatcgcctactaaaaaatgtgggacagacaaattgaagagaatagaaccagtgggttgaaaatgagccatcttcttagcttcttcatttctcctcttaatcctttcaagctcctctttgatctcatcagccttactcaacctaggaccaagctctaatcctgaattcaatccttccatgccatataagtcatatattagcctcttagtctcatccgacaatatctcatatgcttcacatatccgttggaaattctccgtagctacttccttcatctaaccacacaaattctaaatcagcccactcgaaaaagctacttcctttatgtaaagtatccaaatttgatatcacgaagatcagaggcgaattgaaaacaaagaagattgattcgggcaaacctgaggagattggatcttgtcagggtgataaacttgagcccattgacgataagcttttctgatttcttcgtcggaggcctccggtgataaattcaggagcgcgtagagttctctgttgggtggtcccgtcggagctgcttcttggcccatcattgcttaagattcaatcgattcagtgattgaaatctcgatagagacagtcaaaggaaagtgatagaagaaagagaaagttccggtgccggagggttttaggggttttgcggcggatgaggttttttgacaccgctgctctcggctttagctcgcttgttgacgctttgacccttgcttgattcccaagtccattcttctttctttttcttcgtccccaattccctcgtaaattctacttttgacatcttattttataaattgttcaattttgacccatttccatatgttaatgggccttaaaatgtccataaggcttcggctaaagctacacattaatcttgacccacaaaacaatcgatttctaaagagattaagaagacaagattaaagaatgttggactaaacatatatccaacaatctcggagaaatagagtcataatcttctctttcaggcgttttgtcaaacttattgggctttctttggaatccatcttgaaaatagtttgcatgctaagatcttaacggttggaccaaactcgaatttgaatacctgaatattgtccgtttgataacaatgggttttgtttggaccgaattcagatgtgagattaagtaattctctagcctaatgtgttatgtggatacttgaaaaaaggtaatcaagtttgcatttaattgtaagagttaacttttgtcatatgaagatttcgattaagttgtgttttattgaagccttgaaatagtaggtactcctgtttttcatcatcgcaatcgcaaagattggctcatgaaactcattgtagcaactagcaacctttcgatacttaataaaaagaaataatgtcaacatggtctttaaacaataaaacaaaaatgtacataagtagaagtcaacagaaaaaggagacacttggttggatccgtaagcatctaaaagacaatttcagacaatttggaccgacgcggtttcaacacaagataagaggagtcgtgtcttgtttaatcagtcaacgtttactcgaccctttccttcctctttcccttttctctactttcttcccccaaatttctgttctaatatacgataaagatgttttttgttccatttattagttttgttcctagtttttatttataatttagtagtttataactatttaaaatgtgcagtattttaatttgttatattggttgattttttataaatgagaaaatacttgttgtttcttaatctttgtgattttagccaaaacgtttttaagaaaatgggatagaggaaatataatacagcctattgcatgatgaaatgatacaacacgtaatcttgatatgttgtacaatataaatatccatattgccatatacttaataaaaaaatacaagatgggttgttatgtattactccataaatgtgcatatttgggtacgtacagtcaacgttggatatctgcctaaaacatacaatgaattttattttcctgttaacctcaaaataagtggtacaaaaccaacgtgacaaggacgactattagaaaacgataacagttaatgtagttaggtataattctagtgtctgaaacgatctttccaataaaattatactattatgcatattgtactttgtattttgctaagtaattgtgaatcaaacgtaagaacattactttcctcctctctcctctgactaatatagggcttcttaccgtacagtcttgtggatgtgactcaaaacatctgtacaagaaatttgtgtattttctcactattcttggtccaatctgagtatttctatacagtatagtataattttttccttattttcggattttccattcacttttgttggaatttttttccagtttaagagatacaggaaaaaagttctcctcttaattactctaattattaaatttactaatcctatttcaattcctctcatttccagtatttcaatccactgatcgtccaatatgcaatatattttacctttttaacacacaatgttagtttcttgacagatttgactttgaattttggtggagattagtaaaagaattaaagaaatatgtagtggaaatataaaaaataatgaactgggatgagattacacaccagacaccacttgccaagagaacaacgggctcagtcacatggtcctaaattgaccatttccataatattagctgccaacaaaatacataaaataaaaatacggttactttcataactccccttttaatttattaatattttaaaaattaagcagaccttaattcatcatcttttagtgcgttacaaactaacagcgttacaaatctctcttagtccaaaaaatgtgactaaaagatttctcttttaaacccttaaaaatctggaatcaaaatcttttatattttcaaatttttttggaaacaaataagaatgtagaattcgatcaatatgaaagaaaaatgaacggtgttagatttgctttggaaatatgtaaactaacagtaattaacttgttttagtcattagcaactaatacagtaattaacttgtttaaagtaaaattagagcaacctaggaatatatgctcaactttttcgttttcttctaattgttaaaataatgttgtcattggccagtcgccattatacctttttaacccttcacagtctcccagaaacctccctttctctttgatacattctctgtatatatatatatacgcgtatgcgtttacacattctttaaaagtttcagattctagataaattcttttcatttgatttgttttagcaattcggacattgtacagagaaatcaagaatggatttgcagagaggctttgtgttcttgtctttggttctatcttttatgataatcgaaacgacggcgtatcgagagagacagctgctgctgctgcaaccaccgcaagaaacggcgatagataccgcaaacgcggtggtgacggttcaagatcgaggtttgaagacgcggcgaccggagcataagaacgcatacgcaacgatgatgtacatggggacgccaagagactacgagttctacgttgcgacacgtgttttgatcagatcgttgagaagtcttcacgtggaagctgatctcgtcgtcatcgcttctctcgacgttcctctccgatgggttcaaaccttgtaagtctctcttccgaccatcttaaacgctgtcgtttcgaaacttgaccaccaaactattattaggctggaatatacaattgctattaatttttaaaaatttttttacaaaacattcgtaattttcactataatggcatcgtgcgtgaaacagcaggagttctaaaaacaaattcaaatggtatttttctatatatatcaacattacttatttaagcaaagggaaagaaaaaagtaaagataagaattggtccttgtctagttgtattcttgaatatataagctaatatgaaaacaaatatatttcagtttagcttatagaaacaaatattttaagaagttatagttggcagtggcacagacagatacaccttccctttcctctacgtccttccctggttggactcttgagtcttgattcacttttttctcttagaaattgaagttagcttagaaaattgttcgaatgagacaacgaccaccttattcatagaaaatatcgagacaaaagcatattagttttttttattctatcgttttctttctcttgattggcttcacgaattaaaatggaattttttgagttcattttttgaccttactattttggtgtaagtaaaagttggagagaaacaaatgtttgagtatttatggttgacagacacttagaccaacgcatttaactccattatatcctctcctattggtcctatatagtatatgacaacgcgcctatctgtatagaaatatatttgtgttttaaaaaatcaattctcaaaaactcgttaggtgtcatctagttttgaaaaacttcttttgtttttttcatattaagtttttgattagtttagtatttttataagttaaacaacaatttttaaaaacatatttaataggcatgtaggtgaattaatcatttgagtttctatggacagattagactaaaactaagtggtccggatggtattaaccaccaaaacaatccagttttcaaaaatttagaaataaaccatagattaagtcaacaattcattatgcacccaaaaaagttgaaacaggcgtagagataaagaatatggcaactaaaagcgatcgatagcaataatcttattacattgaattgaaatcatattaacttaaggagagttgtttgactttagcgttttgattgaaaccttttggaaacaagaaagagctgtttttttgtgtcaaattactaatttatgaccggccaatctgctgcatagatcatgcaataacgtctacatctcaacctcatagcctatagtaataatttttgtgtcctttagagcacatccgataagaaagataaacctataataattgaaagcaacattattaggactttacacaagaacttcattttctgatatgattcataagaatatatttattctaaaaaacatgcatgcataactagtttgtttgtacgatgtttgtgtgtgtgaatactaatgagcctctttgtgagcagggaagaggaagatggagctaaagtggtgagagttgaaaatgtggataatccatacaggagacagaccaacttcaacagtagattcaagcttactctaaacaagctctacgcttgggctttgtctgattacgaccgtgtggtcatgctagatgccgataacctctttcttaagaaagccgacgagttgttccagtgtgggcgcttctgtgcggtcttcattaacccttgtatcttccacactggtctcttcgtgttgcagccatcagtggaagtgttcaaggacatgctccatgagctacaagttggaagaaagaatcctgatggagctgatcaaggttttcttgtcagttacttctctgatcttcttgaccaacctctctttagtcctccgagtaacggatctgtacttaatggtcacttgagacttcccttaggctaccaaatggacgcttcttatttctgtaagtagtctcttaattcttctctcaagattttgtctataatgattaatgttggctaatgtattaacttgtactctcagatcttaagctaagatggaacataccctgtggaccaaacagtgtgattacattcccgggagctgtttggttaaagccatggtactggtggtcatggcctgttcttccactaggtttctcatggcacgagcagcgtcgcgccactatagggtaattttaaatttttaaatgatgacaactccctcttaagctctgtatagtggctaataataatgatcttgcaataggtactcagccgaaatgcctttggttataatccaagcaatgttttaccttggaatcatagtggttacacgactagctcgtcctaacataaccaagctatgttatcgccgctctgaccgcaacttaacaacgatccaagctggttttaagttgatcgcgcttctctctgtagttgcagcctacatcttcccattcttcaccatccctcacactatccacccactcatcggctggtcgctctacttgatggcttcttttgctctctcttccatttcaatcaacactctcctcctcccaacgctccctgttctcactccatggctaggaattctcggcactctccttgtcatggccttcccttggtaccctgatggagtggtcagagccttgtcagttttcgcatacgcattttgttgcgcaccctttgtgtgggtttcattccgcaaaatcacatcgcacctccaggttttgattgagaaagaggtgttgttcccgcgattgggagactcaggggtcacttcaggcttcagcaaattgtattagggagtctttatttgacatattgtttctctgtatataaaggattattattgtttcattcacattacatttatatcaactcactctaaccttctttcttttacctagtcaaagtatcaatttcggtagcctgatttcatactcttcattattgtttttaactcactctcttggatttaaagatttgtagcatgaaaagttaaagaacacaaacaattgagcacactctgtttttctctctgttttttatttgtgtccctctttgatttttcctctctagttacaaaagccccctagatccaggtcaagctgtgatgtagctagaataaaattacaagtagagaccatagagattcctttggattattattaacttgcctactagacttgtgatagtatgcttcatatagaaaactcctaatttgatgaaaagtctagtctatattctctagggttagtacattttaagattaataacgaaaccacctttctccatagctccgaaacacacttgtatgcacctactcatcacagaaagatattgaacaaaataatgaatcattcactagaaaaactgtagacgaagaatattaagagcaaattgtttacccatttctccaagtttcacagctttcgaattaggttatcgccgccaagtataataaatagcgacatttattataagacggcgagttttctttgggccacttcacccattgggctacccatcagcgaactagtccaaatttttacaatatacgatccatatattgctaggtttattggtcaatcacgtgttattgcattttaaaattgtaataaagttattgtctaaatcatccgttatatgtttattagactagaataagaatttaatttcatatttgggtgggtaggggggggggggtcctttttcatgtatatagtaaaagcataaaaataagttattaatttttagttgaaaaaaataattattctcttataccttttatgaaccaaataatgaaagtgtgtaggtctgtatataaagtagcttggcctttgtggaaggcaccaatattattattatcagagtagagacatgggcttttgtggtttgttctaatagttatcagaagatacaaattccactttcgtctcgttcgtacaatggcgacagtacggacataacctagcacgtgtgcctcagcccaccatttctaacttcatctgtaggatattctctcaacttttgtacgttccttcttcttttcacgctttttatatatatactattttaatgattttttaccgtaaagggaaacaattcagagggacaatatcttcactccaatttgttctagcgtgtccctttaattccaatttccaaactaatgattacgttagacgtgtaaggatagccttgtagcttagtggttcttttttctttttctttcaggttctaataatcaataaatgatggcaccaattgaaccgtgaagaaacgtcctatgagcgaatggcgcgaatgtgttgtcttcacgaatcatacgagagtaaacattgttcataaccagatttggtatcgggagcgtatgttattaaaccgttacttattaagactgaagagaaactttgacctcttatatcttctcattttattatatgctgaaggcctgaagctgtacacgaacaataacgtgagttttttttcattttttctatatgtggtatataaatgaatgtaagattaaaaagaaaaagtgaatgtaagtttaaataaatgattgtaggcaatcctgtgtttataatgtgtccagtgctaatataaattacaagtttatacatgtctaaaaaaaaaaactaaatatttgtatataaaaatcatttacttgcacttgtacatcattaatatatgggataattgtgtttatctacttatagaatttgaagaaataaagtcaagacacataacacattcgaattaaattcaacccaaacaaatcaagttgaaccaccatctaaatagcttatgtggatgcatttgttgttaattaaataattaccgtttgaaatcattaaattacaaaatatataagaaaaacatttccagtaaattcattaaattttttaaaaggttagaaaaaaaaataagatgaaaaaatgttttacctcacttatctagccaataggtcaaaaacggaaagatgaagatgatctagttttggaaactggagtattaaggatctagtcacctaggattctccagcttgtagacgtcatcgttggatatatcacatcaacgtgtttaatcacatattcatccaaacaatacgacagacaggatagctttttttattttctttcttttcatgaaattagattaatacaaacacccttttctattggtgagagatttacatctgtagtcacttattagttcaattcatatttattcatttttcataatccttacaatattaataatatttatatagtacgtgaaattctacttgatctttttttcaaatttaaatattattatatttaataaatatgagttttctttttaataatatgaaaacacggatttaaaccgaactacaaagtacaaacacaacaacaaaatatcataaaccactaaataacatggtttagttaatacatacatggttactttatatttttgtcaataatttgagagacaaattttaattttaataagtaatgttcagaaaaatgatataattcacaactcttaatttgttttacaatcctaatgttattataaacacacataacattaggatggttaaaaacacatactgatatggaagaatgaaacctcaaaaatcttcaaaaaaactgtagccattatttgacaatgatgttgatttggccccatgatgtcgaagcaacatacggctcacatttaaacacataggcaagttcgtaccccctgctatatatagggacaatataagaaaacaaccatttattcttttccaaaaatatcagaatttcggaaactttcatactaataaaaaattcgtaaattatatgctggttttcatattttaaatttctacaaaagattagaaaacaaaacataaaacgttatatatgtatatatattaacatgtaatttgtaatttaacccttttaaaaacttttttttgggtgtatttagtttcaaatctgtacgattttcttaaaatttatcaaaacaattatttaatgagtacgacaattttatttcattctatatattttattttgatcaaatagtaagttttacgggacatttcctacaaatgttttggttaaaaaatggtaaaaaataactatttcttacaaatttcttatgtttttcgccgtaagaaaactcactattgtagactacataaatagaatacggtcaattactgtcagttttcttaccgtatataactacataaatagaataaaaaaaactccactgtaatccacattgtagactggaaagatgatattcgcacgacaaggaactatatcatcaagatgtcattgagtcaattacaacatagttaagaaaccaattcgaaagggaagtaaactttgacatacgtatacatgaaatataaaaatcatcttttggttaatgccatcccgattgctcccagttatcccaattatgagatgatttggaaaaatacattaaatgatttgtttttgtatggttgtaggattaattagcaatatcattcatagcatcatagtccagtagataatcaactcttaatccaaaatacaaatctctttcaggtctcgtggaaggcaacatgacatcattaaactttttaaaaaaacacttcaaagtttgttaaacgcatcctccttctttgcaaggttttgccaacatagaccaaactaacttataacgcttgttttggtggacattaaccgttgttgggaaataattgttagtttatgattactaagttcagttgtaaagttaaatgattagttcttcttaacagaaaattgatttatattatttctctgtctattttcaaataaacatagaaactaaaacatcatttacataaaatgaagaaaataataactttctgtatcgcttaatagaaacctaaacaaccaacatacaatagtcaaatggctcaaatatttaccatgtggattgaaaaattatgatttatattctttatcatagataagaaaaatatctagtgttttcataaatattaaaaattagtctctttttaattagtccaaaatcatgcagataaaataaatagagacaaatagaagcaacaaaaaaacagcatttcaatgaaaaattgaaaatcagtcccaacaaaaagcacaataaatacagcacactcattaaataaaatggaccaacgggtcatttcatttccaactttataagggccaataagctcacggcaaaaaggagaatagccatgaattaggaaactagaaaacgacagaaaaaatacatcaaacacaaattcaacagaaggttaataaaatttgtctctcgtgctgtttttcccttttttctttctttctctctcattttattgtatcatctctaacgcaacaaatctgaggccattcatatttttttctgaatgaaacacggtcgaggttgtttgttacataatatgatcgaccttaattttatataattgagataaaataacgtctacataaatgttacagatctccaaaaaaaactatctatctatctattatatgccagccttattggacaaaaggatatcaatgtcagacctaaaagtaaatgtaggggtcagaaacataaatctgaaaaactttaggggaaataaacagttgtctgaaaaaaaaaacagggctagctacaaagaaacatgggactttgtcacttgtcatcgactcactgacgttcatatttctacaaaaacaaagtaccttttacttacgtataacgtatcacacattttttttattttttttttgaacttttgattacgtatcatacacattgttccacacaaagaaaatcatcaaccattaataaatcatacaatttggattatccgggtgattttcgacgtcaaaaaatggtcacatgacaaaaatacatacaaaaacgacatagttttgagtttctagtaactttgagagaggaagggttcttcatagggaaaagagtcccagaagccatcgatgttatggttcacgttgagcaagagatcaggaagatcggagaacgcgtcgtcggagagtgctatcatagccggagatgacgtttccgtaactgtgggagatggcgacggcgaagacgtctctacatccatgtcaatggccacagcggctgcagctgcggcggcggcagcttggatgtctttagggtcggcactagctggtctagggaggtgataagcgagctccgggaagttgagatgtgcagaaccgcctttgatggctaaagctgccacgtcgtgagcacgcgccgccatctccgccgtggagaaagtaccgagccagattcttgatttcttttttggctctctgatttcggacacccattttccccattgtctcattctgacacctcgaaaatttggatgcttcgaaacaactttctcatcatcatcatctttggctcttttcttctttggtttatatttcactcttctctccgtcgtctgcgccggcgagtcctgaaatctccggcagtcgtcacgttccattaattgggatattttcttttaaaagggacttagtgtgaacgaaagagttaatttttggtgggaagatttgagagaaggaaataaaattggtttttgttcttttgggttgagaagaagaagaggtcggtgtcttgttattatatacatccaaaaattagaaagcagattttttcttttgtaggctatacctaaaatatatgtataagtattaactacctactataccatatatagccagatgacttttgaatgtattatactcgatctctctctctctcgttgtgaaaaatacaaaaactactcgggacttttatgaattcatatgtttgaagatattctaatattttggtttacaaaaaagaagaagatatttaatattttatgtaaataacaattacgtggcaaattgataattttgaattaatttaagaaatgggttcaattgattacgcataacaaggtaaaaaacagtgatgaaatatgaatacaattagaaatggtaaaagatgttagtacggtaaaatatagcggttagattacatcatgactcgtgaaaggtgagagtatttagataaaactaaagtatttgtagattagattcgtgcactggctacatgtatatatatctacacacttctttctgtaaatgtggagaaatcagtatgtgtataatatcttcattaaaaaaatgaatagcatattgatacaaaataagataaatcctagtatgagaaaaggatgaattcaagccatcgtttctggtaactccattcaagaaatgattaacctcctcacaactcggcgtttacatttattgggcaccaaatatatggattttaaaaaaataatgcatttagcctcgttttatgagtgagtacctaattggttcactaaatattaagtataaagcattcgtgtttggggtatattactttatcggactttctcgagtttctacagtcgagccactcttttgtagtatacatcgatggtgaatataatagtgaatacatagcttaagaattagtgaattactaaggtgtttcttttagctatagctactttagtaaaaaaagtagggtttgaaaaaatagtagaagatttccaattttccattgatccacaccgagaaacaaaaaaatagagcatataaaactatactttaaacggtaaatattcatctacttgatttacctatcacataattgttgggaagcatagaaaacaaaaaagccaaaaaaaatgttggtgttgattcgcaaatgataaaagttttccatttggataaatcttctgaaagccgttatacgtatctagcatataaagaactagcatataaagaaatgatcgaagtttagtgagttaggtttgcaaatgtgcaatcccattaagaatttgaagaaaggtgtgtttaagtgaacaatttgaatacaccattgatcatagagacgcacatgtaagaaaccgcattagcacacgttagtacaaggtacttaaaatgtactatacaaattaacaatcaaagacagttgacgataagacacgacactacaaaggaaaggacaacctacatgagatgttacataagccaattatatgatctcataggcttcgtacacacatatacatacatctatagtcatatagatcatactcatatatacatgcacatatagatatgtgatatagtgtacatgcatatatcggaagagtcagtcaaacttggttttcgtctttaatttagactcttgggttaaacaagattaaagacataagctgtcaaaattaatttaaggatggtgtcgtaactaccttcactactaaccaactaacaagttttcttttttaatacgaatgtattatttgttttagtttgtttttttcaatgttggaggatttagatagacgacaacagttggctaatagcaatagtacaaccacaaattgtatgataaatacatattcaactaactaattcggttattaattgctcaattaataactaaaaacgtaaggaaactttatggatcgaaaaaagccaattaatagaaggtaaagcaaaagggcacataaaactaaatgtgatcgtaaaatctgctgacatgcaaatgcaatagtacaaccacaaaattgtatatgcaattaatctgttttatttcttcatagataaataaatgtgatattttacaaatattaatttatcacccatataacttaagatatttgtagtttacttcacatttgttaaaaacatgaataaaatataacataaataaaacagtgttgccccttttagccgcacaaagaaagagttagagtttggcagagcggaagcgttgcttaatcaacggtcggatgtactcacggtagccgtcaggaaccaccgagtcattgagtggatccttcaacgcttcctcgaaaagctttggataaacgtttccgtcatagcggcctaagacagagccaagatactggtccgtgtagtcgaaggcgtccactagggccactgcgtttggtcgaacctgagagtagagtgatcgaagctgctggttcgcaagtgaggcttgttcaggagtaacagagtttgtactgaggaaatcaccaaggtgtttgtgaaggagatagagtgcgtagatgtagcatagattcttgagctgtttcttcactccttttccttcaatatctccctctactttggctataaacctgtgaattttcacgtaagttatgatttgagtctgttgattagtttgtaaaattttagtgaagaagcttatttacttacttagaaacaacaattaactggcaatgagcagtagcagcctcaacaagatcagccaagagttctgagaatccttgttcttgattctcaaacttgcttagattgttagcacaagtaacagccattctcaaagctcttgcttcaaaagcttccaacaccataccagggtttaaccagtccctagctacattctcaaccaagataaattcagaaaacaggtagatataaagagtataaatattatggtagtatccatgaaaaaatcaccatttcgaactccggaactgcattgcaaaaggtgttttgctctgcccatataagcagttgtcccagaaggagcctttccagaacccaactgtgaaactgtcttcatcagaaatctagcaacctgaagatccattgttttaaaacatatataacaaaattttaagaccatttcatttgccattataaagagtaggggcttgaaatgattcttaaaagtgatattcaagaagataagtttaagaatacctgtaactgcaacacaacattgtctccctcgtatgtgcaagcaggaacatatacagcaaacaattcaggaagcccactacaccacaagtatccatgtccaccacataacttacgacattcttcaatcccatccttttaaccaacaacaaaaaaaacacagtttagctgataatattcaacttattttaataagttaagatttgaaagcatacagaggtggctgaggtagtcatagacttcaatccagcagtgcatgcatgagcttcaggcaatgttgcgaaatcactggcctctagtctttttgttacatcagtgtagagccacttcagccattcccctacaaaccgaaatgcatatgcagatgccagcagaggaaacaacctgttctgctgagttttataattaatcacctgccaattataacaacatcaataactggtctctatgtttatggtcatgactgatgaccatattctatctagagattggattcttacttaactaagttacagaaaacatttttgccccatagttatgaatagtgagatttgttgaatacctgtgtctcaatgccaccatcatgtgagccaaactgccttcgaacagcactgtacctagtagcaatgcaaactgcccgagccagcgcggtggaagcatttgacacaatagactgtctcacatacaccatagtaccatacaccaattgccttggaacatctgatgctacatattttccttctcttgtaacttttgacagtctataagaagaaaaatgcacaaccataaatctgtttctcttagggatattaaatgataaaatgcttttattcatagaaagggccaaagagagaggacctcatgagcatttgatctctaggaatgcgaaaatgatcaaacataagaaaaccattgtccattgagttatatgccccgtttccaaacttcattccgatatcaccaacggttatacccggaagaggagaatgatcatccaaactacgcagctgcacgatgaatcctgaaaaacagaaaaatcttgttactcaatactactgatgattattaaaaaaatgaataagaaatcgttctagtgccttaccatgtacaccatggtctttgccattggttattagacgagcataaataacagcatgagtagaaacttttcctaacccaccaggccaccactaatgtttcaaacaaaacaaaatcaagacacaatttaaacactcagagatcaaaatagataactgtctatacttcttccccttactttggatgatgtctgagttggactgtgaatgataaactgatctgtctttggatcaaaagtagcggttgtctcaaggccttgaacattagagccatgaccaagctcagtttgagcataacatccaattatctgcatcttagtagctaaagacaaccacttttgttgttgttgctctgtgccttgtcctttaattgcaggcacaaacattccctatccaccacaaaaccaattcaacaccaaaattctaattaaaccacccaagggaaattgtaaattttgtgttatacccaatgcagatccaagaagcctggttgatccatgaaagatctcaatttgagtccttcctcatctgagagacgaagctcgttaatcaacttccaagcgtgaacacttttcctcaacgtgttcttgaacaactctttcctactcatcacagctcttttgcttttctcaaagaccttaacatggcaaaagtttcgaaattcacatcggaaatgtcgccggaaaaacagagaaaggaggaaggagaaatcttaccggatcattagcgacgaggcgagacatacgatttgaaacatcgaaagcgtggcgggaaccggcccagacgatcttcatatcgtcgacgttgaactctgctttgttcctctcatcggcaaggtgatcaactctctccattgttctctctattgtctcagattctcgagtgtgtgtgaaaaattggataaatcaaagaaagagaagccactaaaaaagctcttacctttgggtgattcaataagaaagaattcgttacagaaaaaacagaggattttgttctatttttaggattacaagtttgaacagaaagagagactaatgtaataaaggtaacaaaaaaattggtaatagaaagttccaagtatttatcatttatatcggattctaatgaaagacgtgataagatttggtttaaaactaatcaagctctctctaatcatctacacatcatagttgccattagcccattagcccattactacactctcgtgggctgtagataatttgctcagctacttttgatttttttttgttgactttagtaaatcactccaatataataaagcctatttgcagtaatttctattttgtagcctagttgtaaattctttttactcgaaagtattacccaggactagttttgtttgttttgaatttaatattttagaggacttagatactttttcttaagctcaaagagaactttatttttggctcaagaagtcttgaattttaacaattaaaaacataattttcttttcatttcaaatatgggtaaattaattgttcttttaaaaaacttaaattaatttgatacttaaaaattaaagaaaggatcttatccaaaacaaaaaaaagagttaaagaaaggataatcctaatattatccgggccttgtgcgacgcatgactctttctccataaatcggcaaaacacgtgtcaacagagcattgactttcacataaaagctacaataagaggtgaaacgcttgtcagtttagcaaaaaccctctcattgaaaacactgagatccttctttttttggttctcctctcttaaagagaaaacctaaaggttgagtagagattaggcaaaaacaaaattctcgatccccaaatttcgaaaacttgttcttagggcgattcttctctttggtcatttggcgaatttgatttatatccatcggtgatcggatttttttcagtcttctccgtctcgtcgttaccggcgtttgatcggatcatcgttttgtttcaggcgaaatatggtggtgatctccctgaagattttgaattcaaaatttcttcggttgcttcctcttgactttatcgcgatttcgattacgtgtagactttcttcttggctttgtcttcgaatcaattaggattgtgaataatcgtgtctgtgtatataagactggtgattgattattagggcatcggttggcaggagaatagattgtttttttttttggtgtgtgttggatctttagatctttgactgaggaatatgtatatcaaagaactgacggaaacggatgaggagaagagggagagatcggttgaggataacgttgatgatggagataaggcggtattggtgagcagaggaaacgtgattgtgttgactacaaagagggcactcgttggtgttggtgctcgtgctttgttttatcctactctggtttacaacgttgttaggaataagctcgaatctgagtttcgctggtgggatcgcgtggctgaggtaaaatcttgattgtcctttgagctgttttagtggaaattgatacattgatcatgtagattgtgctgcttttgatggtttgtgtaaaatcgtcttcatttgttgttgtatctcttgtagatactcctctaagtatgttttctggatttggttctgggtcttttgcttatgcttctctctctctttggtttctgcagtttatattactgggagctgttccatttccatctgatgttccacagctgaaagagctcggtgtttgtggagtgatcactctgaatgagccatatgaaactttggttccatcgtctctctacaaagtgagttatttaatgtggccgttctgtcttttggtttcttctatgtactgacccggcccatttaattttcttactcttatggaagtcttactgcattgaccacctggtgattgctacaagagattattgttttgctccttccatggaagcaatatgccaagctgtagaatttatccatagtaagtgtaccttctcattttattcttttacgttttttgccactgaccattattaaaaagcttactgttgtccgaacccgcgttcatttgatctcaaattctattttgtctccttgaaggaaatgcttcgcttggaaagacgacttatgttcactgcaaagcgggtcggggtcgcagcacaactattgtcatatgctacttggtttgtattgcaataaatcccagaaaaacattttgagcagagacactttttctccttttctctgatcataccttttcaacacaggttcaacacaaaaacatgacacctgaagcagcatattcctacgtgagatcaatcaggcccagggttcttttagcagcagcccaatggaaggtatctgacaggggtcccattcttcatcaccgatgaaccagagtttagtcatttattcttcttcttctgattgttgatgtatttgcaggccgttgttgagtactaccatgtcaaggtgctgaatactcagagttgcttaactgatgcaacttcagctttgatcccgagaaatgtgaagcaggtttgttctgggaatgtagtggtgtttgatgatgggtcaatggttgtagtcacccactcggatctagagggctataatgatgatgactcacggtcacggaggtcagtgaaagttaatgggaatgagctatgggcggcagctgcagatctgagcatggtgtacagggtgaaagtggtggggcaggctgcgatggcgaggatatcgtgtctgtggctgggcttgcgtgaggaccaaaagctttctgggaaaaatctttccatgggaggcataagcgtcgacatttctgtctactgatgatgatggcgaagaatgaatgcaggtgagtctgctggcgagtgagtgaatataccttattcactgtttctccccagtagaaaaaaaaagtctctaaataaaaaaatgggtcaaattaggtatagaagtaagcaagggtttgtaaatttgaaaaaaaaaaaacttggttttgtcgtctgggtattgtaattaaatactaccttgtccctcatttgcctttgatgaggataaacatgaattagtctctccttctcaagtattttaaatttcaagcttaaccttattgatctgaatgtcacagattcacaaactagtaagagggtagacttaaaggttacgacacagtaaatagaaagaaatgtaataaacgagatagagatctcagccttgttgatccctactactaagaaaaagatctcgagatctccatggcgactaaccactgttattcatcaacttccatagattgttgattgttggcattagcagcactgccagaggtgaattgtcctgcttcatccgagttactgaggaggatggtagtgcatttgtggaaggtcttggcgcagatgagaccgttgttccacagtttaatcctaaacattctccaccacctgctcacgaagcacgcaagcatcaaggcaaagtcaaatataaagtgattatccctccaacaagtttcgtatcacatgatgagtatgagttagatattagtttgatgtctatgaaagactattaccaatcgaaagatgaagaattcttcatctcttccttatgaagttttgcaaactcttcacatgcccaaggaacatgtccatccgcgatcaccctgcccccaaagaaccacatttttaacaaagctagctaaaacccgtccaacaatttggcaacttgactttgatcatattgttctaattcatgtatgcaagtaaaatagaaagtaaaaagctacctttgttttcgtacaaatatgttccaaagatacatgtatcgcttttcctctttgctcacacccacaagacgttcaagtctctgtgaatattttcaaaaaaaacaataaaaatccttcagtgaatatgatttttcgtaacaattcaataaaaatcaagaaaaaagcaagaaagaaaagaaaaattaccaggcgttcgctaatatctaaagcataatcatcagtctcattctcgctatcctcgttagacattacttgttcaaaagtaattggcttcaccgtgcagcttttggttagtgaaataaaatagatacaaaacattgttacataaatcaaagacatgaagaaaattaaaccacctgcattgtttgggagtgatagaactgtcgacccttaagacgctccaatctgtagacaagtaataatcttagtagtgattatgtataactttgagcaaataaatcaaaagaaaataaccttttagcctcgcaccgctctgcatgtaactcttttcttctactaacacgagtcaccttaggttcagaaggctcagcttttgctggttgagtcgtagctaaaatgttgctagtcttcttcgaagagcgagtttttggtggcgatggaatattatcatcattcttacgagtagatttattcttctttgaagagtgagctcttggtgtcgatgagacattatcatcattcacatgacgcaccttaggttcagaagactcagctattgttggttgagtcgtagttaatatgtcgctagtcttcttcgaagagcgagtttttggtggcgatgggacattatcaacattcttacgagtagatttattcttctttgaagagtgagctcttggtgtcgatgatacattttcatcattcacatgaggcaccttaggttcagaggactcagctattgctggttgagtcgtggttaaaatgtcgctagccttctccaaagagtgagcttctggtggcgatgagacattttcatcattcacatgcagcacctttggttcagaagactcagctattgctggttgagtctctctagccttgtaccgctttgcatataactgttttcttctactaacacgacgcaccttaggttcagaaggttcaactattgctggttgagttgtggttaaaatgtcgctcgtctccttcgaagagcgagttcttggtggaaatgagacatcttcatcattcatatgagtcgattcattcttcttcgaagagtgagcttttggtggcgatgaaatattatcctcattcacatgagtagattcattcttctccaaagagtgagctctaggtggtgatgagacatcatcatcatcattcacatgagtagattcattcttctcggccgaagagtgagctcttggtggcgatgagacattaccatcattcacatgaggcaccttaggttcagaggattcagctattgctagttgagtcgtggttaaaatgtcgctaatcttctcggaagagtgagctcttggtggcgatgagacattatcatcattcacatgagtagaatcattttctgtgccacgaggtaagtcatctaaatccaactccataaggagtacattaagtttcttaacgttattgctatcatctctttgtcttctttggttacgatttttcgagctgcatagattatggtttggcttttagaagatgatgctgaaacatatcttagcaactagagaaaggcattcgaaattttaccaaaacgtcaaagggctcaattggggatttcctacatcatcctttagaacctgaaaaataaattaaaaaaaataacatcatggtgagttcaacattatgactaacattgcatttatgtatcgagtttactactaaccccaaattttattgtatcacttttcacggagacatcaacttccggtccgtgatctttctctgcccgctaaaatagataaatagtactcttgttacatactatttcatgcaaaaacataaacaaaattagatcactaaaaaattttacttacataaaactcaaatttaaaggcgtcatgtgatgacttcaaatgaagttgcaagccctgtgcacaaacataagacattgtattttagcaaagatagactaaatgagcatgaaacttctgaatacacgttgttaaaaatgaaagatattattagaaagcttgattctaattaattagtgcctacctcgtgacctccacatggaatcaagcaaaatgggcaagaaaaattttccactactgcatttggatacagaaatgtatatgtagatgataaactgtcagaagaaatcacaacgagagaattttttttgaaaggaaacaaccaattaaaggctcaccttcagcttttagtgtcattttgttactcacatccctgtagttgaatcttattttcccacctgaatttgacctaagcaaaatataagtgtggcatgagaagcgaagaagtcgtcatttcatgtattagaaaagagaaaagtaatatcctaattacaataccacaaaacaaatttagttccaaaaaatactagtgaattttaagtttaggaagggtcatttcacatatgcttaattttggtggtgattttagaaaacaaaacataaaagatatggtatttaattttgagaatttttctttgaaatgatatcacttctgaaagcataaaaaaaatgataaacaaaagtgatatagaagagattcatacttcttttttttctttgcttggattatgtacttcaaagaccttcgtaggaaatatggctgaataaacaaagaaaaaactaattaataatgaaaaaaactatagatacaaatacaacaacacatttcctccaattagtctattctctaattagtaaaaccgaaccagttttcataccaaaaaaaaaaaaaaaacggaaccaactaattaatacatgataatgaagaacaattgttaagtcaatatactaaaatggtttctgagctagaaataataaaaagtgtttgatgaagaaattaaacacaatgcacatattaccaaacaaacaaaaaagagaatgcatacgttgttttttgagcgagtttcaagtttcttgtatactgcaacaggtttgatatatttgatgatgttttcatcaacatcaacatcatcatcatcatcatcatcattatcatcagaatccgttggagtttcaagattcttgtatactgtaagaggtttgacacatttgatgatatttttatcatcatcaacatcatcatcatcatcatcatcatcatcagaaaccattaccacttccttcccccgtatggacttcctagccatctgcttgattaatctataagctgtcacgccataaacattgaattagactgtgatccacgcaattttaattagcagaaatatcaagaaatcaatgaaacatgtatagatcattggcgaaactccgaatgatcgtctaaccatctttcactgtgcatgaaatagccatttaatgttagctgcccaattgcgatatataaactagtaaggaaggtaaaactgtaacggcagacctttgacccattataaagagtaaagaatagtggactggaaaatgtgcatgtttcccaatatgaaacataatagaatctctacacataacttcataattttttttaaaagaaaaaatagaagagaacgttatctacaagactacaaataagaaatcttcttattgttatatttttttttttgttgaagaatatataaaagctgaatatatttacatttttaaaaatatgactacgaaaagacacaagtaagaaagagtcttatattttgagattgactcttctttgattaggtgtgcttcatcacagaagtagatacaacttcacaaccaaattttgagattaataaaaatctattatgtatatcatttaaaatttgcagacaaaatgctcttaaaaatgaaaatattgaatcatctatattaaaattttgataaacagactaaattttgttaaaaaattttttgatggcagtagagattataagaaaagaaaatagaaaattagaaaaagaaaaagaaatcatggaaacaacaagatatatattgttgaaattcctacattttaataaaatattactgaatctaagcatgcatatttaatctatagagatttcgatttactttatgatttcgcagcggaatgatcgtttttgatttcgcaaatgaatgatcaaacgaagaacaatttatgttgcgccttcaccactttaacacaaaactagtatcagagagattatatcttattagctagaaacttcatttttggtgttggtgcggcgtatttctgagtttccgagaaacctatataacatatttatagagatgaaatacccgaaaccctaaataaatatgcgattggaccttaattattgttgaatttcataattttaaaagttaatatggcccattttaagtccaataaaatcgttttattgtaaatttttcttcttcgggtttggtaatcaactagaaatttattttattttaagtttaagaatgatttaataaaatcagattaaaaaagaagaaggatatctcaaatttgaatactaaagtaaaaccaaagaataagtctacataagataagaatgcaaaagaatcactaatcgaagagaattataaaagagccaaaatgccaaatagcacaatgaggagagtcaacaatctctcaaacacatacttgagatttctgtaggtttgataaacgtcacttggaggtgttgttctaaagaaggtaatgtaacatagtgaaactaatccagtcattgaaaatgttatcaattacttccaagatctcaaaacagtctcactcattctacacaaaggtttaattttacatttttatttgtttttctttatccaattaaaaatttaaaattgataaaaaaaaatccaattttttttttccaatttcttccgagtgttcttggtatgagaacttaggacactcgacactaatttgccgggaagggcgcgtgaagtttgactttcaaaagggtaaaacagtcaattcaaaaaccatattcattctatatatagaagtttctccttgtgaagcgcgtaaaagtagaaagaagaaaaaaagatgcgtcgatcggcgagcgcctccatagtttccgaccaactctcagcgaattctccttcgccatcaccatctccgccgcgaattaaaacctccgcagattcggatgatagccaccttcttttgcctaggtacgatcccaactctcatcccgggaagaagaacaaatcgcgattcagatccgccgagaacgctatccatttcattccgatcgtactcattctctgcgcagtcatactttggatgttttcgaatccaggtaaccaaattcaattcctcggagacaaatcctctgttcatgttcgagaatctctgtaatttttaaggttttggttgtgacttgtatttctattgtctgatttgttcacagtagcaaagatcaaacagtgacaaattgacatggtggaagacagactttgattaggtcaagctttactctgttcttgttgagacaattttctcacaaatgttagcttctagaattacattgtatgattcttttacattcaatcacagagtttatattgttcctatgattatacattgttcaagtctctctattcaatggatctcactatatatacgaaattcagcttttagaaacaaagagaggttcacactcaaagtttgtgtgttcaagcattggtccaagcctcagtaactttggtatgacaatattgtttctaatggaacacactagaggattctcccattgcagaagtgcgccaactaggtttgcacgtactgtcaacgggaatgctcgagaccatctctcactcccgtatgattccattgctacttcaattgattcggttcctccatttattgcattggcaagtttatttgccagaactactgaatcttccaaggcacaacaagcaccttgtccaagatttggagtcattgggtgccaagcatctccaacaagaaccactcgtccttttgatgctggaggagcaatgccaggccatagccaccggtctactagaggagttctgctgatagtttcatcaggtgttaaatcgatgaggttttgcagatcttctggccatgtactaaccagttctttggcttgtttttttaggatcgctggatccgtaattttgggccctgcatgtctcaagatttatgatataggaaaatgaaagaaggaattatctttgtgtaatgtctgagaagtgttgaaaactacctagagatgggctgttgaaacagatgaaccagtagacttttgttgtagatacaggtacatatccagctctaatccctttaccgtatatgtagttcacctttttctgaaatggctgtccatttggatagaacccaagaccacggtaagcgcaatggccaacatatttcggctcactgaaccccatccaagttgcaaccttagaccggataccgtcacaaccaataacaatctgtcaaagaaatacatcatcaaatcagccaaggcacatttcttctggtcataatagtttggtgcatcgtgatgtttgataagcaataggtgcttatcacatgtagtgagtatccgtgtagtgagtataaacacataaccataggctcagagcgtgagagaagaatacctgtgcaagcaaccgggttccatctccaagttgaaggagagtgtcaccattggcattgctttgtatactttccagttttgaggaaaaccgaatggtttgtggaggaagctggcttgcaagtgtttccaagagtactcgcctctccacggcccgaacttcttggctatgcaagacatacactttggttagttacacacatgaaccaaatggaatgattttaaccagcaagttattaagcaagctacctttgatcatcgtctttgaatttgaaagaacgaagctctcttccatcttccttcttcactaccatcctgctcagctgatcataccaacacactcagctaaaaccaagaaccaattttctcactttttgatatgggcagaaagaaactctacccttcgatttcaagaaactgcgttcggagttgaggcccgacggaaatggcgtcaagaacgcgccacccattcttgaatagcgtcagtgatgttccaccagtacgaagcgactctgcctgctccaacaccaccgaccggattccaagcctaaccagtcaaccaaagcctccggtttagtggctcttgagtttcaagaaaattcaaagaaccaatttttgtaattcatacttacctgtgaagtgaaacggcagtggcaagtccgccaatcccggcgccaacaatcactactttctcctcttggtcaccaccgtttgtttgagcattggtcagtgctaaacaaaccggttttgatctggttcgaatcggaaacaatctcttgcttctggccaaggattggagaggatacatcggaagcagaacagacatggccacgaccgtgtgtttcaagaacaagacaagtggtggatatgtattcaaataaatttcagccataaatagtgtagactttatagtttacctatttcattctgtagtcaatatgaagccacgaggtcaacaaactaaataagtgttaagtggttttatactgttaaaaaaataatatcgatcacatctgagcttcgttggttacagatactcaagtgttaatacaaatggagagtagtatataggcattgttctcaatatgacatcaaacaaaaaaccttctgaaacatattgagactctatgatctatcctatgctaagtaagaggaagcaggaacatattttcctacaaatccaaaaccaacaacgaagaaggccactgactgaaacagaaggtacacatagagtgtgttcttcccatagacgatgtcgtagattccgcagaataacaggtacgctccaaccaatagctccagcaaatgcaccctgattgcaacacaatggtttaagctcaaactcggttaagtaaaggaggcctaatacgaaatgtctaacttacctctctctgaatctgacgttaggaacttgtggaatcagcttcgtcttgagagtatcacctaacttctccgtcacaacccattcttgtactcttcctgtttcgaacaagcccatgaccagagcctttgctcttagcagggacattgcattctcaaatagaacccagaaagccaaaaggtggattgatcttagtctaccaattgcgattaagagagtgatcaaagaagggagataaaatgcagcccatttcggaactgtgacttctgggaacaatacagttgctggcaagataacacagtagaagcagaatgtgaggatgtgagccacgatcttgcgcatgaagaagaagctgtacaacatataccacttcttccatagagatacattctcgcttcttattatttgtccagccattttccttaaaagattggcagggccgcaagtccatcgatgctgctggctacgcagagctttgaaggaacaaggtaactcactttttacctacagataacgcattaatgattcaaatgcaaaatccaagattccaagaaaagagaggaatcttctatacataccttgagatcatcgatatatagaaacttccagcctctcagtgtagctcgtacagctaaatccatgtcttctactgttgtctggtcattccatcccccggactcattcaatgctgagattctccagacgccagcagttcctgcaatagtttcagagaataagaaaaagctttatggagagaaaagaaaagaaaattgagaatgctataccgttgaacccaaagaaggcaaatgttgaagatccaacttgctgctctattgtaaagtggtaacttagagacatctcctgtaatctcgtcatcatgcattgacccgcgttcactgagattgtttgcaaagaaaaatctcaaagcatgtacaatctataaacttatgatggaaaaagaaaagaaaggtaactaaggaatgttaccaaactcccaccggccttgtacaagtgctaacttgggattgtgaattaagaatggaacagtgcggtggaggaagtcaggatcaggctggaaatcagcatcaaagatagcaacataatcacactgcttcacatagctatgcctcattccttctctcaacgcaccagctttgtatccgttcctgttgtcccttatctcaaacgttatgttgacaccttctttagaccatctgtcacactcctttttcaccaactcctgtttccttccatcattgccacataatcaaatgttaaggaactcactttaacacaacacaatcatgagtctaaaacagagggatttagacgagaaagggacaagtgtctatagaggttaaacaaggaccttactggctggatccgtggaatcatcaagcacttgaattattatacgattcgatggccatgagattttgcaagcagctgcaatagattgctcacaaacctaccacaaacattaacatcccaccaaataagttcaactacaaaccaatcactggaaaaatagttgctggttcagtaactacctctttttcattgtacataggtatctgcacaagaaccatagggtagcttgcactgccacactcaacatcatcctccatggcttcccatttgtaaaatttctctggctttctcttgaacagcttgacatacaaaacaacgattcccatgtacataacctcaacgaagaacatgacagacatgaccaaacatagaagcaccaggaacttgaagacaggtacaactacaacagcccttataagctgccaccatagtccaattcgagcaatgatatcttctgatttgaaggcattgaggaatgccactgatgttttagaacttccagcttgagactacaatgacaagtaaaagagaaaacgattagagaacccagaactagaggacaagaaaaacaccaagttttaatgctcttagaggacaaaaagacaaacacgataaagatttggtattttaacggatttagtgaatcagatctaaaagcaatgtagcacgcaagaacaacaaagaatgggttctctgaaatcaaagtcaaactgaacagtaacccaacaacaaaaaatccatactttagcaagaaaatgttgacgacaagtccaaattgaagaagtattaaagtaatcggaagaaacccaaatggagaaagagaatcaaaagcagtcgtaggtaacaagcaaaatgcaacattcgtcaatggagggaacgaaccagtgagaggagaaaggaagagaacgtggcgtgaggaagacgatggaagattgggagaggagacattgagaaatattctctccaagtctcttccacgaatcgtcttctgcttcgtgttcgataatctctggttctctctctctctctctctctctttctttctctttctagtctatttggagtcaactggatattttctttcaatcggccaagtggggcttatttctttgttgtcatttctattttattttattatttttcaaattctttgttgtcatttaaattattattattataaatgattcgttggtggtatccatcatctaattatggttatggcaaaaaaaaaaaaaaaactgataactacttgacatgaaccacgttagaaactgtagaaacgacatgcactatagatattgacaaaaaataaaataaatacaactgttttttgtaaacatccaaaatatgactatttctcctaaaacatccaaaattaaagcttttgctatcattattttctatgacattcatgcaaaatttaactgtgctcgagaaaaagagaggctatataataggtttaacactatacagtcaatttcttttttttttaaatccataaataaattttacagactgaaattaaagagatagaaaacatagtatatatatagtaagattacaccatgcatgatgtgattgaagtcaagtctctatattctaattctctaaaaatatgtaacacaacaaatttattaatattcatctttggataaatctgcctgcatgatcactagaaagataaatcatctcttaatcatgatacgtatatagagtttccccgattcttttaaatatatagataggccaagaacgagcagaaaacttattaaaccttttgcataaaaaatgtctagtttctaattaataacgccggaaatgagaaagttagattacatctaatatttaaatacatgcatggttatctttttggtttgaagtcatcttcagtttggtttccggttatggtaacggagcgggagcaatagagacattgttcgattcattcacgttctattctagagaaagcctaccctacccaatacccataagggagggtcctccttgtgtgacagatacttttgtattgattgatgcactaaaaggtgagaattgagatgaaaacacacataaacccaccaataatactcttcccttcaatatctctttgaccactctctctttctctccgtcccttaatatgactcaatctgcctcctcccttttactactagcgcgtacacgtccacacgcttcatattccatcatcatcgttaaagacaaatttctaagtgcttgattaatgattcattaattactccatgacaagaacatcttgcatggttttatatgctaacataacgtcactttatatacacatacctacatattaactaagcaactaatcatcaacttaagtattaaagtaacacatctattcaatataggtatcatggtggacctccttgatgattgcgattattatggcaagaagaagaagccaaagcaagaatagagcttgcgagttgattaatggcgtctaccaaaccattcataccttgtctatttatttcagtttttgattcctcaatctttagtctcctctcttgtagcctcaccacttccttatgcctcctctcttgtccctcctcattctctcttatcacttgtgtgatcacagacgtgcatctagacaacgccaccccaaccgcatcctcctctacctccctctctcctccagcggtggtttctcccggcgttgttctccttcgctttgtcgatgatgtacctgaatgtacacactcttatcagtctcttcatcgaccaaaatgcgggtttaattactactttaatcttaatgtactcaagaactttattgtaaagaattgtctatgcacacacaagcaaatttagggttacattttttccttcatagtaattgtataagttttgattttaaatttataattagattgattataattaataacaagttgacttgagggtgtttgttggaatgtcgaaatccactttatagatttaatataaaatctaactttagtggtcatttaattaggctttaagaataagaagagagataaaacggaaggtacctactgtgggcggtataggctcagcgtgaaatgaagacgatggtggaggttgaggcggcgaaggaagtgataagctaagagactgtggcggtggtggcggaagagataacactatagtagtcgggatttgatgcatcggctgagccatcatcggagctacaaatcctaaactttgttggcaaactcttaggatctggccaccgttaccgtttcctacggcggcggcggcggaggaggaggaaggaagagtttttctgtcaacaagctcagacaacacgtcgtatatctgaggcaacatgttactcggcaagttcttctctttcctctcagtcttgtccatcttccagtaagaggaagaagtgacggtgttaaaagacgattctacccttgatctctcgtactctctgatcttcttgtaatccctcatgagattgtcccacttatcgttgcactgattctggttgcggtaacatcctcttctccagcaatactcctctatccatttccaccggagctctgctggtttgtttctgccttcaggttgtttttccgatcgccgtacacgcctctggtcgtccatcttcttggcttctatgagaaccaaagtctcactcactgtccaattcccttttctgcactctctcataactatctgttcaccactcgatggatcagcgtcagccatatatgtgtctctttggatttaccaagaggtagccatacgtgtgtctttgaatcttgaattcatgaactagagagagaaagaaataagtgttggagaaaggggagaagaaagagatgagccaaagaccggtcaaagtcttttgttttctagtactaagattgtcaccaagttcgaaaagacagtgattccaataatgagaaaatatgaaaaacaaagcaagtttttttattctatgtttcctactaaattaaataattgaacacctatcctttttcttttcttatctatgtttcacgtgatgaaaaaaaaaaatctatgtttcatgtctctagttttttttactttatatgggacaactctatgtgaatctaaggatctcactgagtaactggtacaaggatctaacagtgttattataaaactatgccatttggtgactaggagtcaacttttagcaacgtataaccccgagattatcacagaaggccatgctcagcagtggtcttagactcttagtacttgacatggtcgttatatttagtgggaaggcagttgacgccatattcaaggtctctggatagacgaacgagggagtctcggatctagatctcacatgcaatctggacttctctacttaaacgaaatatgaattggtatgtgccagtggaaaactcgttagtcagataacgattcctacctgatacggcactcgataattaactcacaaagtatcatatcagagagactgaaaaatacaagtaatatgatccaaacacacaagcagagcataatattccaatttcccatagcaattttggtgtgtcatgaattccacataaggaggacaatagtgagggaaaagatgtttgttgaaaagcttatttattaagatcagagaagaccacccctaagagcaagaaccaaatgaagaacagagcctccctctatcgcataatctttggccgttttgtcatcagcaagctgttttccggcatatatgagcctgagaattcagagcgtaccacagagttatatactgcaaacaatgttcaggatgggactaacacatgcaataaaaatactgcaaacaatgttcaggatgggactcaattgaggcttaaatgcaccaagacaaacacaaactcgtcaagtcataagagaaaaacgtaagttttgtttttacctttgttgaacaggagggatgccttctttctcttcaacacgttctttgatccgatcaatagtgtcggttggttcgatatcaatctcgatttcttttccagtgagtgtcttcaccttgatcatggttccacctctgagcctgaggacaagatgaagagtagactctttctggatgttgtaatcagctaaggtccggccatcttccaattgcttaccagcaaaaatcagcctctgttgatcaggtggtatgccctctttgtcctgaaaccccaaaatgatttaccaaagattcgaacaaaagcgagctcagataaagatcgttaaacaaactatcaatcctcacaaacactttttagctattctcaagtaaatcaaatccatgttcttcaagattactagagattcctactcgaaacaattcttaattatacaattcaaggtaagaacaagtagagattcagaggaactaaggaatcgtttgaggggataaagaagagaagaaaccctaaattaaacctggattttggctttaacattgtcgatggtgtcgctgctctcaacttctagggttatagttttgccggtgagggttttgacgaagatctgcattatctcttcttctctctcggattcttaggggggtctgtgcgatggggaatagtaattagtctgtttatatatatatatatatataggcactggtaaaggtatgagagggcctctgggtcggcgtttagactacgccaactttttattattctgactttttaaacccaatgtcttcggtcatatattaatatctcttaaaccagttcccggtttaagttaatttctacttcaattggtttgcaaatatacgacctttggttagatggaagaacaaaatattacttccgtttcaacccaaaaattaagaattgttagaaatttgagagtggagggattacacaagatatgccaactacatcagaatcatatctaaacagagtcgagagaatattcaggtttctactagtggttgaaaaaaagatgtaaacaagcatagaaagaataatattttgtctcatattaaaaagaatctggcacactcaccatcagctcccagactctcccaccactatacacactaactccattgaaatctagccgcttcaccataaaatattgctctctcttatatgtttgtatattaaaagaaaagtattttactactacattaattggagagaagtaacaaaaatggcgaatttgcttatgtaacttcagactccaaagcttggggtctctagttctacatatgttccagtgatccacctttgagcctctccattcgggcttgaagaccggacaatgctttctcatccattgggagaaccactgggtgtgtgtggactgtctcttgtcccatttggctcgggggaacgctctgttggttcattgataagttatcgtttgttggcatcagcggtttgcttactggctctgatgaagccagttgcatgttcttcatcctttctctgattgcatctagcgtccctgtcatcactgccaaagatgtttgtttttaacagatatatataaacaccgcaaggaaggacaaagaaggataaggatctaggaaactacctccaggattcatgttactggctcggatgtcgtctgtgtataaatcagatctagggttcatcaaaggcttcacatctaaagaggacaaggaaggaatatcaggagatggaagagctaaggacgaagggggaggagttgacaacggtaggcttgaaggtgttcttcccgcagctgcattcttctcaacctacagaaccgattgcaaaacttcaagacaaaaaacttgagttttatcgaaatcatagtaaaaagctaggagactagttacagacctgtgccagaccatctctgatgtaagtacgaaacgcttcactagcattttgaagttgggaaaatatatcaacctacaagcattaagatgaggttgtaagtacatacaatttggctcgtttgttcatgaagaacaggaaacattgagacttgaaatacatagtcatatctattacctttggatatgactttgtgatgtggtagaggtcgtaaagaccaattgtggaagtttgtttgtcacctattttcttaaaaatagccccaagctcttgcttcaactgaacatcggcagaatttgcaggaggtgaaggattgttggctgttgaatctgtccaatgggtttggcccacaggacctgttgcagttaacattcttgctgcagctaaagtctgcaggtatttaaatagttactaccaatggcgtctaaatttctcaaaacatagtaaaacagcaaatagtttggatgcgctctttgaccaaaccctcagcttcagcaaatttgtcaaaatttctggacatgaagttagacgactaaggaggtctcacctcaaggtttagatcgatgtaagcgagaatgatgggttgtggcctcatgtcaatagggacaagagacaagtggcccttaattgcggctccgcggagcttaacaagttcatgtagaacagttttcaccatcctcagaggtttatcatctgccccagctcttttcattggaaaaaataccaaccgagaatgcattagtattgccaagtacgaaaaatctccacataataaacagacatagatttgcaaaatttctaagagtgcatttaaagagatgtacctcctacgtatctcttccattcccagatcttgcagatatacatggatactctgaagaagtctatcaagatcaacttcatatatggtgctttggaggagcttaacaaggacaagcaattatcagatatacaatactaaacaatttgacactgtgattgtagcaagtaggaaaggcaagtgttgcataatagacagtagggctgtacgtaacaactacttgagttatgtgaacaatgattgtcctaaaatacctttgtaagtttaataaggcatttaactaccaaatcagagaatttctgattccggacagcataaacttcagccgtagcaggtgaaggccatctagatggatctagaggacgtagcaagctaataagcaccacaaacgaagatgtccgatctgcattatcctgaattaaataaaacaagaaataaaaataatgaagtcagagaacttcatagccacatatgatgaaaacctttagcatggaacgaatatctgaccaggatcttaagcatcaaaacattcagagctttaagaagttgactcccatcttccatgcgtggaactctttcatccagaagccaaagcaagagctctgttataaggctttcaagagtcccttctttgactgcatgggcaagctttttattttggaatgtctgcaaaaatacatacttatgagtagtgaacttcacaaacaaatctaagtgggctagccagctaatgaagaagagcagcatcactaattcacacgaagttacctgcataagtgtgttcaaaacatatttacacgacctcgatgaagctcccatcaagctaacatcaaatgttttggcaacctaacagaaaacaaaaataattaagtggtggtcagcaaaaactattattggaagtagttcttcatgacaaatggacaaagaaagtttattcaggcaaaccttatttgctaagcatgaaacaagcccatctgcatccttcacaagttcatcaattgcactctcttcaggatcattagaagcctgtgccaactcatgacacacaactttcatcccttcaacggactgcaacacattaaaacaaaaaaaaaagaaaataaaaaacaaaccaacacttgcaggatcttcaaatatgcatcacctaagttttcaaatgacaaaactgttaagtgataagtatggtcaacgtcccctcacaaccaagtctttgttactgactagataactgaattactataactatatcaagtaaatttctttgttaccttaaaaacagaacaagctattccataacaaacaaaacaaataatatcaagatcggaccacataagccagatacctgctctggagaaccaaacataatgatgtctaaagcctcattccagtctgtagggccattaactccagcaattgtccgaggtaccggggtcctctccagcatttgttcggaaataccatagctttgcctgggagggcaaaaagattgagttgtgtatagaagccacgtgaacaccagaatcttatgtatatgtttaccttggaaataaaggaccagggactgtttgagaaatgtcaccactttgctctgccacctcaggtctggaaacaaacagaaagtcataaattatagacactaaacccatcatagactccttttctgctcctgattactcaaaaaacaacattaaaataattttgtgattctaaaatgcattattaggccttggaatttatgtgattatctttttggcttccactttcagctaattgctaatgctaagtacaaataagtcgctaccaaaacatcttaatgctgtaacctacgcacccgctatctctaacagaacgccttaatgctgctcgtgcctccccaggtttcccttctcttcttttctccatatccttggcctgatgcaggcaaaactatgaaaataaaactcaaaaatacaagacggaagcagaaaaatggttcatattttgagcttactttccacttaaatctatcatcaatcatactcttttgagcatctgtaagcttcccaacatatttccagatgtcagcacctgcaataacaagccaaacaataagaaacgagtgcaaatagttctctcaagggaatggataaccaagtgcgacattcgtttcaaaatcatagttagattccaggtttttatgaaacgttgagaagccaaaattgtgcactaatcactgcgagacatggcagcatgttttgagaaaattccactataacttcgcaatagctcatgaatttcatgtcctaccaagaatctgataaccagtagccatggtgttcaaagcagctttcctgagttcaccatctctttctgctgtcaagcttgcaacgatatttaagtatttaagtagtccacctatctgcttagaaaggcatattagaattcaaacagaacaggagtacaggactatcagataatttgtcaagtcttgctactacctcagttccacaagtctcgagtagatatcctatgagatcagtacactctatcctcgtccggttgtttttggaacgtaaaccttccaaaatatagggatacgtctttcctacagaatatgcctgaatgatctgcttcatcagctcccgcattttttctcttactttttcaatgttatgccccaactgcaccaaggacaaggagttaaatataaagacactgaagcaccaatctttttctaaaacagaaagataaacgggaatgattagaaagaggccaacaccataggaaattggattaatatcagatgcctaaccttctccgctaaacaaggcagaaatattgcagcttctgcttccgtcatgcagtattcctcatccctcaatgtgttgaaaagttctggaagaaactcaagcacctattcttacccagagcaaataaatttcattgttcttgcaagaaaaacagtgtcaaacatgaactacaatagcagaagattcattacaaattacctttagcagacaggttgtgttggatttacagaattgcaacacaaaccacctgagaagtacatctaatacttctataatttccttcgaaacagatggaagtgcctgtggtgagaaggaagaagaatactttaaagaaaattacaaagatctagcagatgaataagattccaacacaagatatccgcattctaacataagatagctgctaccttctgtaggatttccagcccatctacttgtttcttgaagtcgggactcaacaaccgtttttgcaagtcttccctaaaaaatttcatcatatcattctgcaccaacaaccacccaacattggttataacaccaacaaccacccaacattggttaaatgctctagaaaacaaacctcaagatcctgaatctgttctggtcgcagctcctcaaatttaattctacgaaccaccaccctctccctgtcctcctgcagattaaacacacaaaaatcaaccttacatcatcctatacaatacctgtggaaatattttgtaaacctttggaaaactcatcccaccttattggagtccttagtatttagcaaagcctgtgactggatagctatatcatggacagacgtaatttgacttgagccctttgttggtacggctctcttcagaaacacaaaacaagtcagataatataaattgaaaacaaaaaaaatgttaggagacagaaacttactgatctgtttccttgctttaaggtaccattagaagttgattttgaaatctttgtaacaccttttgacactggccccgccatagcttttgatgattcaaatggttctgaaaacaacatcattagcatgaacagaaaaaagcaaacaacgaggagaaaacatgctaatcagacaaccagatcatggagaggtaccttgaacgaatcctggtcttactttttcaagcacaagagctaatgctgggccttggatatctttaagattcttttcaatctgagacaaatacagacatctaatcagatattgaattctagccctgaatagaacaagttaacccaaggatatctaccatttcttgtccactgactctcaagatctcagaaatgcatccttcggctgcttttctcacatctgctgatttgtcctggaaagatacattgaagcataacaaattgaaatcattacaaacagtcgtaatcactgttggaaactgataagacggtataacatttttagatgagtcaccgtcattgcagtgctcgcaggttttagtaaatgtatggcatccacaaagtcacttaatccagtaagttgttttgtcaaccaatcaaaaagatctttacgaccttctgctcccattttcccatctgttagggctattataatgtaaggaatctgcattaacagaataaaaaatatttgaagtcaacgaaattatatcaacaagcgaagacatggctcaaaaagattatcaccaaccattttgtcaagatgcacagcaccaagccacaagtcaagagcagccaaggtacactctctcatgtgcttcttgttgtcaccgaggcatttcagaacatcagacagaattccctgaggtagataactcaagtacttggtaaaaatggcagacagtgatactatgattacagtgtacatactattttcaatgcatgacatgtataaccaaccttgctcgccttctcgacagctggtcccatagctgctgcaacacctccaatagtagtcaatgtttgcataacaagatttttgttactatccaacagacgtcctcgaagaccaccaaataattctcctattgaacaggaagggttcatataaacaataaggaatcgtgacttaacattggtatgataaatctaaaataacagagaatgagagaattatgggggaaatttctgacttcataccagttccagttggttggatacgtttattagcctcttccagaattttattgacagcttcaattgactccaaacgcatctacaaaagtttaaaagactcaattttaactctacagcttcaaataaatttccgcaaagaaattgataggtttagacaacaaaagaagacttccaatttcaagagcaccttccaatcaggactctcaaagcccttaaggagattaggtgtaatcttggtactgatatcttctctaggtaagctatccaaccctccagaagatgttgatgttgaaactgacgtcttaacaactctctttggagccgcagtcccctgatgaacataatataagtacagcaagaaaaacaagaactagacaaatcaaggcaatccacacaactgtacctcgaaagggtttttctcatattcggtgtcaagtgcacttagtagtgcaggtttgacatcattaagaaaccctttaatgtctgaaaacagaaaaacataagtttgattcagtgttaagataagttattctaccaaacagaatttagacaaagctgaaccagcttaaaggaattcgtagccacctggaccaacaaacttgtgtaaagcacccaagagtttaattgtagcatttctggtggcagctgtactagattgcagcccaacatccttacaaaaatctatcaaatcctgccaaatgaacacaaaagtctcctgggtcataatattaataacctagatactgcagttacataaacagggaaatcaggatatgggaatttccaagtagaaaaatcttcaaaaccttaagtttcaaaagtgagacaccaaagtcatcaactgccgaaaccatccataacaagccttcactaagaaccttgggattcttgtgctctttcatgattttgaaaagctacaaacaaaagccatatgtcattatgatcagaataaaatgaaagtcaaagaaagttgaccgaaccagcacataccctctcgaaaacaaatccaggaccaactgcttcacagaaagcagtaaggcacttcatagcagaggctcttgtttttatatctgcaactcgttcactagtgcctaatgaattaatagaaaaatcaggcaaattagaaaagaaataattctcaaaagagaacaactgaggtcagaaaatagcattcatcaactgaaactaggtatttcttcatatgatactaaccggtaatacaaagtacgacacatttcttaggaaacttcgctgcagtcgaagatatataagtgatgatttcaatgacctgttgctgaacctgcattttcaagtaatatgctcatgtacttctttaaatattttgggggaaatcaattcttaaaactacaaataagaagattttagatagaattagagcatacctgcacatttttctcattccaaccaggaacagcacacagcaaccggaccaagatttccaccgacttgtctagttcttgtagaccttctatctcttctttcaaagccaaagttgctgcacggcaatataatgcaaaaaatcaccaaactgataaatactttttttttaaagagctagcaaagagattctgtgacatgtgctaatgcagctttgatctgaagcaataagaggcaacatgaaatagagctttaatatcaattcaggaaccttgcgcaacagatttatcctatgtgtggtaaaatttgatgatgaaccacttaaaatgagattaaccacccaagcaaaacgcaaaaagaaatgaacaaagaaggaagtaagaactaatgatgaagataacagtatttgagaataaaagagtcctcaaggcctttaacaaaccttcaagtctttctttccaaacagagctctttaactgagatacagtttctggtttcacaagagaacctaatctgttttcaatctcttcaagacccatctcggcaggctaaaatgcaaagaagaataagatattaataccatcaaagtctgaagaaggacatagtaaatcacataaccatttataattatatttctatgtacctcgacatcttcaggtggttcaacagattttgaaccttcattccttacagatccatcttttttgcctccacccggtttgccagtcccaaccttcttgctcgcctgctataaaatgttaacatacaatgtgacgtccaagtcatagtggaattgagaacaaaagagaaaaggaaaaggcgtgcaagtgtcatgaaaccccaaatgattgcaggattcaacagccacaaaagaaaaagtatgaaaaaactcacagccgaaggagcgggtcttttgccgctcaacatgcttgcagctgatttccttacaaaggaagcgtctgagttctgcataaattttgaagtggtataacgattgtggagacactaatgttataagagcgactaggcaaatagatacaagacataaaacccattcaaactcttagacaacacgatgggaaaagacaaggcatctaataccagctacatctccacatcccagatgccctacccttatcccatcaaaaggggaagagaaaacgttttatagaactaaatattatttgaccctgaagatatagatagaagcgtacccctgtggctgtgctcccaactgaagactgaactgtcactttaatatgaaaagagcatccaattagaatgggaaaacccccgcaaacaaaacttgatgtttagctaacgagtacgaaaagtccacaaacctgagcttgtaccagcttggtcaccaccaccagagcctgcaatcatttctgaaagtttcttttttctaacatcatcaagtttttccaacgacctttccaaaggtctcatacctacagactaaaataaccaaaagataataaacaaacgggaatagtaaaacatgaagtaaacgatactcatttatccacatattctaacatgtgtacaacattaatgtaccacagacaacaacgcaaaaaggttgctgttacaaagcacaatataaaattaataccttagctattgcagccaaagccgaaaatgctgcatccctcacatcaggagttccatcgttgagacactacatcattacaaatttcaggcatccaattaagttataagttcaaaccattgattaatttcaaacttagaaggggtaactgcaatcaaaactccaggctttcgctacaccaactaatcataatactgcaacatgacatacgttgtctgtctttttagcactaacttgttgcatatagctaatctaacagtgccatgctttaaagttcagtcaaagtattattaggagccatttggcgcaagaaaactaacctccatacataaagggacatattctttgtgagcctttagaataagagctttgttacttgtttcaaggcagaatgtcaaccaggtcaaagttgaagaacgcacaagtggaactttgtttttcactgctgtcttcacatctgcaaaagagagtaaagttgattggaaactgatgaaagacagatgcttaagcaaaattggtcgccatctaaaaaagataatcataagcaaatcagtagagcttcataaaataaaatccaagataaactgactcttgccttctataacgtcaacaagattcaaacacccggctttgtacattgtttgtagcgtttgtgtaagtgggtctgtgactgattgctttttctctttcaatttttcctgttcaaggaacaaacagacagcaattttgtatcaattcctggactaaaaccaagtcagctacttaagcccattaatatctaagaaatagtattaacactcataagactggaagcgtcttcctccaattatacttttcgatcaaagatgctacatgactcacaagtaaaacaggcagcataaaccgtgaactagcagagaaatgtgttcttaaaccacatgcaagatttccaatggcttgaatagcttcaactgcaacggccaagttcacatccgtgataagctgcaattggaaatatttacaaatattatcaaaacgaaagcaaaattagttatgcagtattgaatcctgaacaatagcagcatccacaaactatgattgcgaccagaaaacattttgaaacgcatgaacttcgaacttcagattaatcaataagcacagatgtttgcaggctgcatcatcaccaattagataatattccacttacggaataaaacataacaaggattataacatatacatataatcaatgctgcctaaacttcttatcatggaaagttaactaccttctttaaagtccgacaaatttctgaaaaatcaccaggagctatctttttagtcgaagcaagctttgttagctctgcaacagcttctttacgttcggaccactttgtagctttctataagggatacatcgttagttagtgtaatgtgccacatgcaatcaacatgagaagtaagtggtatagtataaaaaagttctttcagtgaaagacaaccacaagaaataaaacatagtaaaatgtgcattaagcatcaaaactcaccactccgtcccagaacccagacttctccaaaggtgtcaaaatgtccacaggatccataagatcatactcatctatttcttgaggcgctgatagtacgggtagataaaagaaaaaacaatgtaagcagacttctcattattacttgatgaagaacaattcattgaggtacaagctacttaccgtcagcaacagcttcttcactgggcccatcacccacaacatcagaactagcttctgcctctggttccttgtcttgctcagatcttgaaagccaaatacagaaataatctcattgcagctttactttttcaactttaaaattcacacaggctagaaaaaggtcttgaaaccaaaaagaaatactcatgcatatcaattcaattattcagaaatttgacagaggcacattgagtattcacaaagcataggctgaattacggtgaaactggatctggttttaccttaccaataaatgtcaaaatatattagatgtatgtgccaatgaataattaggaaaattaaacaattattatcgtatgtggtagtaaccttatctttcgagtaggcttggcacccgctgtaacattggcaagctcagcctccagctcttttttcttacatagtaacaatgaaacggaatattagggtttgcaacaaagcacaagagaataaataaaaattcaagtgtaacttcttccactgattaaagaaaaacgcaaatcatgggcagaatttacaggtaaggtgtggttcttatccgcaatgggatctatcatctatctatctgttatgactagaaacccctgtttcagttttccaattccaagaaaaatcaagaggatttaatccagttcatatcaacttggcagcatagctaagttgcaaatgtgcggctcaacataaatcttaccatcgtatccctcattttttcaaacaatatagactttacagggtcttttccaatccaacggcatagctcaagagtcactcctttggcagatgcacggacattctgatcttgatggtcgaaaagttcaggaagcatctttaaaatccttttaggtggaataacttttgatccaaattcactaaggtagaaataaagtagcgtcgatatttcagataaaagatttcatgaaccaatggagaaaactaacaaggagttgaaaacagaccttagagcttgaaacataacgtctactgcaggtaccacagcctttgcaactttattctttatagctttctccatcgtatcctacaatcatgccaaatctgttagcatgtataaaaacgatgttatcctataaactatacaactcccagtctcccaatatatatcttgttggcagttgaaaattgaaatgactgaaacaatgcatatcaagtagagttattgcaactttatacttgggaagtgaattaaaacttctgaaggaaatgatgttttgaacaaaacactatggtagatatcttgaaaacaacaataaagaaggtatctagattcctttctccttcagaaataagtattattcatagcagaagtccaacagcttgagacacggtgacaacaactcaaaactggaaatgttggttactgaagagggtgattataggaacagaccccagaaagttgattctgtttcttgaccttgaacacaggatgctcaggacatctgtcagtcatcgttatttaaattgctcttttcctatgccacactagatacctagcataacacagaactggacaaagagccacaatgctatattctacgtcactccttctaagatcagtatatggttgaattctgggttataaagcactttcatttctatgtcagctcacctatctagtttcagataccagtatcagcaatctagcaagtaactctatggctagatggtgaacctatacatcagagtgcaagggttaaccgtatgtgtctagataaccctagcagtgttgcaaaaacatagaatgaatgacataccagaaaaacatcgacggcctctaattctacccaaagcaagaaagcagcctgcgccttgtccacagtattcttccgacccgtaaggcatttgagcgcaatagcatcgcaaacttcctttgcataccttcaaaagcagaaacaaactaattattcacatgcaaacgaacactccactctgcccatttctaaagcaataaaaataaacaacaccataccttccagcatctgaatcggctgctcgcaaaaacgcaatcaatgcatcaagcgctttctcttgcaccggcgcattagaatctgccaccgtcttcctaaacaagtgacctgcgaataaaaaataataatcagaaattcaatcaaaagtaaagcaaaatggaaccctagaccaatcacattcccactcaacaatccaaattcaaaacagatccacaccgatataaaccaccctaatcagatctgagcttcaaaaacaaaaaccctaacataataataataaaaaaacgaggtagagaaactcaccaaaatcgcgaagacgagggtccttaggatcagtaatcgaatcaaaaacagaagctaaatcgacgttagcttcgttcctaactttccaattcttatgcccaagccgatcctcccaaggaagttttttcgcctccttcaataacttctcatcctccgtcgacattactccacgaaattatctctccgacggtatcgatcttatcgatctataccaagttttttttttcttcgtacggtctcttggaaactttctctctcttttcaaaaaaatttcttcgtgttgttagtgccggcaagagagagagagagaaggacaaaaaagaagagtagggtggagcgtaatgagagagagagagtgggggaattttggtttctacgtttaaatcggtggtgtaatttttttgttaaaaacccttcacgcgcgttttgattggaaatgtttacacgcgcgattatttcaaatcttaaaacgagcgtttttcttttgctttctccacgtggagagatcggcattttcaaactattttaggaaatgattaacagtactgaattttcctattgttggttctgtaaatattttcaaaatatatttacattaacaatctattaatttctaagaaaataaagtaatattttgaaatgaataactcatttttagttataaaaatatttattttaaaaaatcaacaaaatcatgagttattattacttacttattggattatcttttcttctataaaatacaaataaatagtcattttctataaaactagacacgtaaaccaaaatggatttattagtttgattatggaagttcaaaaacattgtgtattttatgatttaaaaactagttaaaatttattattttaatatcctaaatatttatgctaggatctgatttcgctttggattttaatatatttgaaatatctaattcaaattcagaatacaaatactcaaatttcaaacaaactttgattgataattagtacaagaatatttaagccacaccacaccttacaccttttccatctccatcctcatgtcttaggtgatgtaactctctatctccagatatcttttcttgtctactgctaacacatgaaacaacaactcaaatttaagccatatttttacaatggtaccaaatttataagaatcatagatgaaattaccaaaacaagaagttacgtggaaagattgaatccaatattaatattttgatttctattataaaagcaaatgaaataatgattatcagtccattgtttgttccatttttaagtacacttgtttgtttgatttaggtgaataagatccgctaaagctgaaaatacaagaattgtccctaaagatagtaaagtacagtacgcttccaaataaataacaatgggctttagtaggcccacgcaataacgatgttttaactgacccaacaagcccttgtccagttctggcattatacaatgcgtcggtcgacacgtgtaataagtcatgatcggcacgtgtggtctccacttctcctctctcattggtcgtaaactcgtaactagccgattccttctccaaagtatctcacatttccactgcacactctactttctctctcttcactctctcataaatcacaacaacaacaaaaaaaaaaaagttgttagttaagacattgctttacagctcaattgcgtcttcttcctctgtcttattcttcatcttcatcttcctcctcgcggatccattttgaggttcgtgtaaattcccattctctttcgccatttttttgggggaagtgagattttggtctgagttatcggcgaatcgatttcgtttttttagattattgaatggttttgttgactcttcagttcttcttgtgctgtgattgcaatgatgtcctccgaatttcgtgatttaagttcgattttagctatccgagctcctctttaaataatgagttggggttttattctgaaggttcgatttctgattttgcaaatttgggaggtggatttgatccgattagataatctcactgttctgggtgctgtaattgttaatgagaccatgcaaatgttgtgcatcgatgttgtggaacgcttgatttgtaattgaggatttggttgtctgattattggaagatcgaggcttgatagagtttcaaatgagggtcagctgttattgttgtacggtctaatgacattattttatttaacttcaggagtctctttttgtttcttgaagatagactgggcgtcacggagcagctgagtatatgctacgagtgttgcattccggaggctgttctttcagatgattggcagtagctatattatgcttgaacggtgccataatgggcatctgtctaatgaagcgctgctgctcatggtttcttttgatctcgtttctctctgcactaacgaatgaaaatgaagcaattagtcctgatggtatacagcgatatgtgtctttaatctcttctatattttgtctttgacaagtcatgatcaccatttactccgcccagattgctgaagggattaaatcctttttttctccaggtgaggcgcttttgagttttagaaatggagttttggcttctgatggtgttattggtctgtggagaccagaggatcctgatccatgtaactggaaaggagtgacctgtgatgcaaaaacaaaaagagttatagccttgtaagtttaaaatttctttagtttaaattctttttttttcttcagtatgtggtgcatcttttgtcggttcctgaagtttcttgtgtgcaggagtcttacttatcacaaattaaggggacctttaccccctgagcttggaaagctggatcagttaaggcttttgtatgtgctcctaaccttttaattaatattattgatgtctagcatatgctctactactcattgtatgtgtattcccatgtcattgcagaatgcttcacaacaatgcgttatatcaatcaatacctgcctcattgggaaattgcacggcattagagggaatgtaagggctttcccaaatacttatgctgattagtgtgattacacttcattgctgatcgaattctcgttttgtttttccaaattttatattatttcctaacaattactagtgtttttctttatttgcttctatatagttggtgcataatattgatgcgtcttgtgagtgatgataaactcagtcacaagtttagctagttgacaagaatcgttgtgaatcttttataatttattgtccttttattccttgcagatacttgcagaataattacatcactgggacaatcccaagtgaaataggaaacctgtccgggctgaaaaacctgtacgtggtttttttcctcgttcttccaagtggatttgttttcttagcctctctaggatctgctatttgttgttctgctatctactctcaccatttagtatcctctataattatattgtgaactacaagaggttcttctgatcttccatgcagcaacaacataatgttttcgaaagtacttatttctacagtcgtggtgaaccctaaaaattatagggagtttgacataacttatatttaatcacgtattgtgttattttttccgggtgaaaaactctcaaatatgatgatgagaattgtaaatctatgctaggcttctttcatattaaatgggcatatcatctacattcttctgaactactatgatttttgactctcatttatgaagggacctctcaaacaacaatctcaatggagctatccctgcttcacttgggcagttgaaaaggcttactaaattgtgagttgctaatctctaacttgcgtattttattttgcagtcctgtagatatatgagtgtcaatgttactaactatgttgatcttcttttgaagcaatgtctcaaacaatttcctggtgggaaaaataccttctgacggcctactcgctagactctcgagggactcgtaagtataatttatatatacccatttccccaaccaaatttttgtaaattatggttgataaatctttctacggttgatctggcaaagcagttataattttttttgtgacgttgtgtacgatagcaccctgttactagctttgcagcagtgtagctgaaaataaccaagtcgtaaactgttgaatcactcttgcagcttcaacggaaatcgtaacttgtgtggaaaacaaatcgatattgtgtgcaatgacagtggaaattctacagcttctgggtctccaacaggtaaagcaactgtgttttaatcaatttcttgtcaggatatatggattataacttaatttttgagaaatctgtagtatttggcgtgaaatgagtttgctttttggtttctcccgtgttataggccaaggaggtaataaccctaaaaggctgcttataagtgcttcagctactgtgggtgggctgctcctagtggcgctcatgtgtttctggggatgctttctctataaaaagcttggtagagttgagagtaaaagccttgtgatagatgtcggtggaggtgagccatgctgactcatattgtagatattctctctaagagttatatttttctctcaaaacttgacaccataagagacgattttttctatccaggtgcgtctatagtgatgttccatggagatttgccctacgcttccaaagacattatcaagaaactggaatctcttaatgaagagcacataataggctgtggaggctttggcacagtgtacaagctgtctatggacgatggcaatgtttttgcgctgaaaagaattgttaagttaaatgaaggttttgatcggttttttgaaagggagcttgagattcttgggagcatcaaacatcgttaccttgtgaatctacgtggatactgcaattcacccacatcaaagcttctgctatatgattaccttcctggtggtagccttgatgaagctctacatagtaaaccctcaacttcatatttacgggtttccttaacggagaattatgattctattaagtgaaatttttgaatgtgtagagagaggcgagcagctggattgggattcgcgagttaatatcataataggagcggcaaaagggttggcatacttgcatcatgattgttctcctaggattatacaccgtgatataaaatcaagcaacatcttactggatggaaatctggaggctcgggtatcagactttgggcttgccaagttgttagaggacgaagaatctcatattacaaccattgttgcaggcacattcggttacttggctccaggtactcaattacacagtaataacaatgcttattacttgttgttactatctgttaggacctaaatccgtgaactcataatgagtgttttttgcagagtatatgcaaagcggtagagcgactgagaaaaccgatgtttacagcttcggggttttggttcttgaagtcttgagtggtaaacttcccacggatgcctcattcatcgagaaaggctttaacattgttggttgggtaagcataacgagatccagcttagataataatattgactagtaaaagcttaaattttgttttttataatcttgcagctaaacttcttaatcagcgaaaaccgggcaaaggagattgttgatctaagctgtgaaggagtggagagagagagtctcgacgcacttctatcaatagcaacaaagtgtgtgtcgtcaagtccagatgagcggccaacaatgcacagagtcgtccagttacttgaatccgaagttatgactccttgccccagcgacttctacgactccagctccgattgatctcacgttcacaaagtctgtctgccttctcttttcagagttccttttcagttttacagtacaaagttctcgagccattcatagtcggtacctttttttttttttttttttactttgaattggtagattggtgacacgcctcaattgatctgatcatgagattaaaatgtatatgaccatccattgtagaaacactgttcctaagaatctgaataatttctctatcataatactttcttgtttgctttcttaagttttattatacatgttgtgtacttcggaactagttgaaaccaatcatataatatcgatgagaagatcaatatagaaagaaggtaattatttttactagcaaggataatttttaagctttgattctgattttacatctccataacaaacaaatgattatcatggacaatataaaataagctcgatacgacgccgtcaaatcacaaattcgcagagcaatccatgtgttgaaacgacaccgtcctcgtctccaagtcatacccaactaggaaatccatctgagcaaagttcccatagatggcaacctcggtggtcggaaccatactcaagcaaaccatgtcttcactcagtttcacgaatgcgttgatcggactcagcctcacatctgcacccgtgaaatgcaccgttatctccggcaaaccgatctctgcacttccggatttgaaacagtgagacaaaagcccttgtggatcactcacgcgcttggctccggtcactgattcctccaccgccgagctaaatttgtcaaagaaaccagcttcgaggagggtcagtgtcgttccagagtcgatgatgatgtttccagatgtctccgagagtattccgtcgtcgtttgggttatacgagcttccggtgtaaggaatctttttcttcccgacggagatggcttcaagcgtcaagtagtagtaagtaagaggctctttatcgaccaacggagttgataccacgccggagtctttgcttagacttgaaggaatcgagttagtgcctaggtttatgacgcttgtgccattcgtggtagctgacttgtgagacaagcaataagaaaatttcttcgaaatcgacgaaccgagctgggagattagtgataaatgaccaccacctagaccgataatcccagaaccagtctcgtcgaaggtaccaccgttattgtagccacaaccgaagacagtaccaggaaaagaaacaggggaccctgaagcagagtcaatagagacagtttccgtggcaacgtctcctttgctgaacgactgatcaccgtaagagtaacggtacttgcatatattgttggattcatcgcatccccgttccgtactggacaaggcctggcagttacgtgagtcacaaggctcgctcttataagtagaggatttcttcttgtcgaagattggaccgttttctttgtaacattgttgacaaggcttacattggacccaagttaggtcacttcctgtgtcagcgatcgcaaaaacctttattggtggagtaccgatggtgatactcatgaaaaactcgccgtctgctccgattaaaccggattggagatcggtttgggatagttggtggttgaagcggcgggaacgagagactgagcggaggaaagcagcgttgaggcgatcagtgacggtgatttgtgggttgtagattggggaaaggggagagtcacggtggatcagctcaacactgaagttttttgggtgacccgatgaagagagagtcaccgagaagaagaggaagaaacagagaagaatttgggttgccattgttgattagttttagaaagtttgtggtggaaagagtgaagtggagaagaggtttttatacacaacaaaattggggaagtgaagagatttgaaacggtaaggagttatagctacgtgagtggggaggtgaaagtctgaaatgcaattcattagctatcttttaatttcacactaaggctgctaatttaatttgaggctagtggggttgaggggaaattaatatcaacgttttcaaaattgggacttggaagattagacatttatcatcttaagagcatatcttgtgtgagtatatgttatacaccacactataataccagatataatcattttggttttgtgtttcctaattttacaataggcagaggaactcatgttatgtcatataggaccaggatttgccatgttgctcgataacttcaaaagttcaaagtttaaatcatttgttgtggtaatcatgtaacactgagagtacttttggccgtgaggaaaacatgtgattaagttgagggaaaataattcaaattcagttggcacggagaaaagggaaatgtgatatgcttatattagtaatgcaatggcttggtcacatggtaatagattcacttaattcgaaggtgcatgctaaatcagaacgttaatcacaatgggaagatggacactaattcaacccctatggctatatgactgaaagactggtcaagctgcgtactgaacttgaagcttctgagactctttccaggtactgtcatgaggatggtcagattcccattgttgctgtccccagttcagtctttagaggggtcttccacactgtgcaggctgtataaagcaaataagtcaaatctcaacctctcatttaatgagtatattgtgaaagagacgatgtcatacaattaggaggctggccctgtctctcaataggatgttcaacgatccacgaatccaacgctctgcatatgtttgtaatttttattgacaggcaccaataacgaaaattaaacaatttctatggagataaattgaaagccactcacgaaacaaaaggtgccaccatgtccaatttgagaccatcatgtatcatctcatttggttcaagatgactaatgagttgccatgacatttcctacaaggattccacaatacctaagaggacaagatcacaccacaaggttaatagttagatacatacactgatttggttccttgtacgtggttcaaaatctgtattctctgcaggctactaccccagcagctatgtatagtcgtactcttttctgtctcgatgcaaactcaagatatctttctttcttgagtagatttgagacatcaaacccagtttctttttaagacctgtgttaagcatcgaacagtatgtgagacaaaacgagtgaagaaatatcagtgtttaacccatccatattccaagtttatacaaacaaactgcagaagaattacagcgcctgaaatgctagtttaaacctgttgggctttgacagtttctataccaatagtaaaaaggaccagtgagcctagagcactattctcatttccaaaagatcttcttctgaaatgggctttcatgactatcatttacttataataattggcccattgtgtagactcttttctctctttttattttcctgatttcctccgaccactgtttttgtaacttacggttaacaaaattaatatagttgctttgtataagcacatgagattctatatttatctcataaaatatatcagtttaacccaaattaattatatacaaaaaccaataaaccatttcgaaaatgtttgaatacgttacacaatgcaagttttccaactaaaaaagataggtaagaatattacttttgttattctttgctttccataacgtgtgaaataaacttaattaaggtttgattgcgaaggattaaagagaatacacttactgactgattatgtaagattcgaaattaaatatataagtagtcttttcatggaataaaaagtacatgaaacgaataaatggtcgatatgtcttgcgactaagttcttagctttttttttttaattatgttgatgattccttgaatagacccatttgaggtaagggtttccttaaacgaaaaagtattaatcttagtgatggtgactggtggaactcctttatattctgactggttggaattcaaagttcgcatgatgttgtcctttttttatataattaatctgcctttaatttaattattttcgcctttttctttatagagagtatactaccagaaaaaaaaaaaaaaaaaactttcatatctcaaagtaaagtatataatagcctgtgtacaactctatacatatttgacaaaaaaaatatgtgattcttggaaaactatctattcgaatatttgtggtgaaactaatttactataggatgcgcttggtcaatttatccaaagtttattcgatggtgatcgagtttatatatagataaataagttaaacgccgaatttcagaagtatctgcatgcatatatatgtaagtatgcaacacatatacagagtccgcgataatgaaagtccaaatgaatagaagtgaatttcgtgcatcacgcaggcagcacatttgcaactttgagcaaacaaacaaatttaatcaagatgagctagtttgcaaatttgttttggtgtttgacaagattcaaaatcagccgaacttcattccgcagataaatattttagatcaatgactccatatcaaaagtgttttatatctcaagatctttggtttctacactatattgtgtttcctataaataacatacacgagaagttagttatatcaaaaaatgcttaattgataggtttagcggagaaatagagcttttaattgattaaagaaatataaacaaatataggtaacacaagaacctaatacaagaaaagatattatagggctgtcttatcaagaacaatgcctgcgtttctttcagtgagtggctaagaaaagatgtatcgaggagcatagaatcttccatttttggtaaatattcgagggcaaattaaatacactgtacatttcaagccaaaaactaaagcatacaatacaaagtatataatacgacggccaacgttccatgtgtaaatattaaataatacagaggatcagctagtttgattacactaggggatatttattttgataaatattagaggttctttacctagctcaatcttaaatgacatacaacataaaattatattgttctacaaatatatatacatataaatttcaagtcgattacgtatatttaaaaccagttttagtgtttcacgcttcttttttggtaaacaatagatgcatgtcttctttttgtagctttcctaaccctatgtagacactcgacaataaatatgagggtcaagtcataattacatttacacctctcacacaccttcaaaagaggtccttaacttatgtgtgcactcttattttatgaattacctaatacagaaaccatgtgctagtaatttagtggtttccattttagaaagagtacttggagtcattttggtttaggtctagacatcgatttcttacaagcgcaaattttttagttacttccatttgattaggcgaaacgatactatgttctaatcctgctaaaagggggctattcgacggctacaccaacccataaaacgagaaagctaattattaaaaaaaaaactacctagtgtcgatattcaaacattagtcttcagcatcgagtcatatggttttgtggggtcctctaccattcgatccttcttaaattgcacacttctctcttgtttttaagagaagaaagacatacgcttttaaaggaagatcctcacaaaaacagaaagttgtcaagtgatggtgtctcgcggttgttcaatcacagttttgtttcgctttcttatagttcttttggtgatacaagtacactttgagaatacaaaagcagctcgacatgcaccagttgtttcgtggtcaccacctgagccgcctaaggatgattttgtgtggtaccacaagatcaaccgcttcaaaaacatagaacaagatgcattccgaccaacccaccaaggtcctagtcaaggtattggacacaaaaaccctccaggtgctccttaaaataccatttgatgcggagaaatttactgctttatcgcacacagttcttctgtttttcaatctcttgtgcgcggtcgttttataagaaagaaaaaaaagaagaagaagagaagaagttgcataacaaaatcttgtggagcggacatgcgatctagaaaatgatttcagctttgctttttaccagagtgatatatcgtcctttacgaaaggccatgaagacatctcttgggttgcttatatatagttttttgttgttttgttttgttttttgaattgtacgttgagacttgagttcttcattcttttttattagacgttgtttttttctatgttataaataaagttaatgagtgatgggctgatggcatagttttttttcatcatctaatttatttatcttagtattcgacttttagtatacagctagaaaaaaatgaattttctcggtcaatgtatagcaataaaagtttcgcttgctagaacgagttgatagtttatttgttgtaatgcatctaaaatattttgtaaataaacaacggtttcgttttgagtaaaacactttttctatattgaataaatgttaaatctttgttttatatatcatcataatcctaagtttctctatttaaatttagtgagttttcttttcaatgttattcgattgagtttaaagttaacagaggttgtcttgatgacaaaaaaaaatgaggttgtcttgaataagttcttaattaccagaacatgtgttttttttgtgtggtaaaaggtaatattctcgacaaaaagtgagctgtatatatatatatatatatatatatatacactatacacatatagtatttgtgtaaatgtttattagctacttgtataaacattaatatcatgattatacaacaagcatatagaaaatatataaacgatgcataaatgcgaatgtaccataaacaaaaagcaagaacaaaaaaaacacaactagtctggttaactaataaaaaaaacatcaccttttttctttttctcatgatatttaaagagtgataacttcttagtaacatttggtaccttctgttcgaatacaggaaatataaaatataatttggattaacgaccgtggaggtggacgttaggtctaacgatatatttttttttttgaaatcggatttaggaaagggtattgtaatgatgatgtgacacaaatatgaaacttgtactaggttaacaagttggtaccaaactatatatataatattttaattagcagtaaaacaactacatgaatatcaaattattaagattccgacaaactttttaggttaaatattcgagttgtgaaaagattaatatcacttgtgcgctggttctttattatttgcagacatgtggggatgtgttttcggcttttcaatggaagagactaatattcaagaataaacggtttcgttaacaaagtttgtgtggttttaggtttcgaaggtggagactctcttgatctcttcagtcttcagcaaattaaagagtcaatgatatacttaaaagagttgttgaagattagcaaatatcaatctcagttttatgttgctcttggatttctaaatcggttaaagggtcttttccaagggaagagaaatgctatcggagtatatgtatatagttttcatgggtttttgttattaggctttatttcttgaggccctatttggtgtttttgggctcattttccatatctccagactccagtggtcaatataacttgcaaacacatactacttgtacgaagaagtttaattttcccataaccaatcattaaatatattttcaaatttcttaattgctgtatctttctttctaccattgtctcatgttaagaatatcttggtcgttgattcagtgtttagaggaatttgtcaacaagtttatatactttcaaagcttctcgttctgcaatgttttcattgccttttcaactaaagaacgttttccgggatattaagtaggagtcaaattagagttgaggaccggtttgattccatcatggtatgaccatctgcgaataaatattagtttgtggacttttgataaatgatctcatcatttataatcatcacaaactgcgtattcacttgctaattgatatcttaagattctaagttttcggcaaaaatgtatattttaatatttagtgtagattctgttctaattttgatttatgattcctaaactatatttgaaatctatactgtaaggagaaaaaaagaaaagaaaaagagaagataattctaccgaattctgtaataagtcgcctaactctactaaaatgtacattatctgtttgatggtgattaaacttcagtttggattaaatgtacaatgcaaatttttgggaaaaatgtcaattaatcccccaactttcaaaaaatggtcattttatacatcaacttcgtatgcggccgtttaaaacatgaactaaacgttgactaacttttaaaacataattattcgttgaccaggccaaaatagacatgccgttatcagtcattaacggaacttctaacgtccgttatcatccgttaacgactttattagtcaagttttaaattgtggccattttaaacatcgactttatatgtgaccattttaaacataaactaagcgttgactaccatttaaaacatgaaaaattcgttgaccaagccaaaataaacatgttgtcatcattcactaaaagaacttataacattcattatcacttgttaacgactctattagtatccctagttccccaaatttatttctacaaccgctcaaacaagacgaacaattttataatgagtcttcaatttgcttccatgattccttttaaaatttaaaacaaatatataaacgaaaacacctttatttgcttccaattactggcactgcgattatctctttatcaaactatgttcttgggttctgcttaaaactttttgatatgaagatttcatatgggaaaaatctttatgttctttcgattattctcaaacgacgttgttttggacagattaacagtcattaacggggttttaggttctattgataaagacatgtctattttggcctggtcaacgaatttttcatgttttaaatggtagttaacgtttagttcatgttttaaatggccacataagaagttgatgtttaaaatggccacaatttgaaacttgactaataaagttaacggatgataacggacgttagaagttccgttaatgactgataacgacatgtctattttggcctggtcaacgaaagatcatgttttaaaaattagtcaacgtttatttcatgttttaaacgaccacgtacgaagttgatgtataaaataaccattttttgaaagttaggagattaaatgacatttttcccgtaaatttttggacatattatatcaacaaaataatttcctcaaaagtatggagagttgacatgttcggacatcgtgggattggggaaaccggaaaacaaagtcaaagcaaccagagcattgcattaagatctctctgtctttttgtgtctttgcgtatttaatttttgtttttccaaattcattcaataaatatacatctaaatttacttaactagattaacaaacagatataaaaatattactacctttattcttaatatcttatccatttttttcttaagtgtaattataagtcttccaattgtgatttcaattcatgatctcctctttctacaaagtcttaaaagaaaaaaaaattgctatgaattgatatacacaacaacatgtccaaacttagctaaccatttgctaacaagaacattgttttataatgattttaaatgccactattttgcattacttgagagagttggggaatcaaacaaatgttgaataaagaaacaaattaataatgtaacccaaatacaatcgttaatgagcgaagctgctgaaagagaagacgccgaaaacgaagttgaccagaacctaccaaacgatcaaatcgatcggacaaagaggaagaagaagaagacaaaacccgaacaaaagagaaaaggcaccaaagaataaaacttttttgttaatggagatttgaggaagacgaagaagagattgaaacattgagaataatggtggagggttggcgaaatgggtttcgcgatgctacgaattcgaaacctctcttcgtgacgatctacgcgactgtgatcattggcgttctcgtctcttccttctatgtattctccgccatttactctcccaccaatggctcctcctcctttctctcttttcctcctctttccagtaacctctctctctatctcactcacactctttgcttatatctgcttcacattgctttagagattagatttgcgttctgagtttgatttcgtaaacgaattaatgtctaatcattaggtgagattttgggaggttaggctctttaattcattggttctgattctaatccgagctcaccgttgaccttaaatctcagtattcgttagaaaaatcacttctttattgtttaaaactttggatttgctataatctgagatgggttttgactttcgatcactttagttgatctgaagctcagcttttgaatctgatcaagtgataaactaatgtatttggatctgcttgaggtgtctgaaagttttgatttttcataagtctagtgttactctcccacactacaaaacagttcagtcaattggattttacgtttcatggtatttattagttgagcttgcttgagtatacattaatcttataaacagtggaagcttaaatgttgtttcttttctaattgtagcttctggccgaattcatagtctcccacaagaaaatgcaaccttagagttaccagttgctccaccaccaccaccacaagcactgccaccgccagttctggaggaggctcaaggcaattccttgggtaaaatttgggtgtctcctcctagagataagaagatgccaccgcttgagacctttaaactgaccaaagaattgtttggggaaagagtgaaggacaatgttattatagtgacctttgggaactatgcttttatggatttcattttgacttgggttaaacacttgactgatttagatctctccaatattcttgttggtgagttgtcacttctaatatctatttctgattgtccatttcactggctttctgtaagttagtaactttatgttatggggctttataggtgcgatggatacaaagttattagaggctttgtactggaaaggcgttccagtttttgacatgggaagccatatgagcacagtggatgtcgggtggggttctccaacattccacaaaatgggaagagaaaaagttattctcatagattctgtcttgccttttggttacgagctacttatgtgtgacactgacatggtgtggcttaaggtgctaattcgacagattattatcactgttattcatcacgttatcttccttaatagactttcttctgataatttatatgtgacagaaccctatgccttatttggctcgattcccagatgctgatgttttgacttcaagcgatcaagttgtgcctaccgtcatagatgacagtttggacatatggcaacaaggtagatgttagctatagatatgcattttcccctgttcccatttgaattcgtttatcactctggcaaaagtgttttgagtttattattatcagcagctaatctgttcacatggctactaactgttttctctaccgttcttttcttggactttgaaagttggtgctgcctacaacataggaatttttcattggcggccgacagaatctgcgaaaaagttggcaaaagaatggaaagaaattctcttagctgacgataaggtttgggatcaaaatgggttcaatgagattgttaggagacagctaggtccatctgtggaaggggatagtggacttttctatgcttatgatggaaatctcaaggttggaattttgccagctagcatattttgcagtggtcatacttattttgttcaggtacctttcttcatgcttcctgtttttgtgttttattatcatcctcttttcttttgtgttcagaaatgacctaacaggtaacttctattttcgatggaaggctatgtatcaacaactcaggctagaaccatatgccgtgcatacaacattccagtatgcaggtaccgaaggaaaacgccacaggcttcgagaggggatggttttctatgacccaccagaatattatgattcaccaggtaatattctttctgttaagattcttcaacattaatcttgttaatggggaaagccaaaatcaacattgtaaactccaacacaatgcaggaggtttcattgcgtttaaaccatcgattccaaaaagcttgttacttgacgggaagcataccattgaatcgcattttatcctcgttaatcaccaagtaacaactactaacctaacatgatccctcagaactatatgctaacttgaccacctttctaattttacatccacctttggtccactttacagatgaaacagatcagatcagctctagccattgcatctcttcttaatcgtacactggtgagtccattcaacagcttaatgcatatttcctggtgataatgattgattcttatatatagctggttggtctctacaatgttatcaggtgatgccaccaatatggtgcaggttagataggctttggtttgggcatcctggtactcttcagggatctatgacccgacaacctttcatctgcccacttgatcatgtctttgaggtagtatttgtaatgatgttgtaacatgtcaatatctgattcttcctctgcaaatgactcataacagctgaataatttcaattacaggtcaatatcatgcttaaggagctaccagaggaagagtttggccctgggattggtatcagagagtattcttttctagataacccattgctgccaaaacaagtaatatagccgcccagatatatttttctaattaatcatttcatagaaaaaatgtcaggagtgaaaatatttttcaggtgaaagagtcatggcttgatgttcagctttgtcaagaaggaaaagaaggatgcgaggcatcaaataacactagcccctctcgggttcttaagttcccaaagcggagcaatgaagatacggtaactaagatttcattagctatctatcactctttgttatatttcaaaatcgctggcttagccttatcgccttgttttgtgctcaccgcagtttaaggcgatattctcttccttcgacgatgtcaaagtgatcaagttttcttcaattgaagatgctttcatcggattctctgacaaggcaagtagatatttaaaccgtgaaaacatttagacatgttgatacaccatgtaaatctgacctgaccgaatcgggtttgcaagcaggagcgagaagaaagatttagaagacgggtaaagagatatgtgggaatatggtgttgtgaggagaacaagactccaggacacatttactacgatatgtattgggacgagaaacctggttggaaaccggttccaccacagacaccagaagaagatcatcctcctctctgataacattactggcaagaagactccaagaagcttacactcgatttcttgggtcacaaggagacagacttagggagttttttttttccttctatacggcctttttatactactgtggaactgtatctttcttttctctgtctcactcaatgtatcatgttataaccataggtttggacacagaaacttgtttcttcttttcatataatttctctgtagatttttatattaataaatggcttatttagttgtttcactttcatacttcaaaaaccacgcagtcgtgttctgttgaattggtatatttggaaataagaattatcctgctgagagataatgagatgtgaaggagtccatgccatattgagatggaagaagattatagtagagataaaaaagttccaagacacaaaccaccattagctaaattgactttgaaccatcatccatacataaaccgtctaagacagatgggaactggctggtagtctatatataaccaataaagatcacccataaaaagatacaaaaaaagaagaaccgtttcttggatgatatagtaatagaagctaaggaaaatgcaatgtgggaatcaagcagacttaggaaaatgttgagacagaagttttgaaatctcgaggaacccgacagtgtctttcccactgaagatcgtcttgagttgctcatcgcatagtatctcccttttgttcaccggattctacatcaaaaaccaatagtatgtgttggaaaacaagaatctctaaaacatagaaatgtaagaccagctaaggctaacaacacgatcaaagtaacttccattagctcgtaaatttccctaaaagcagtgatttcttcactcaacataagcaagaacatatagctacaaaagttaggctttgaaatgttgactcctgaacaaatcagatatccaaaacatcaagatcataagctgcagtcacaaagataaacttaatcaccgaattaaaggctaatcacaacaccttgttctaccattttgaagaaatcaagttacttcaggacaacacaaagcctcaaaatttctacgaatcttcctacacccagaaaaatgcttaagcagatacagtcaaacaagctctattagatcaatcaatcacccacgtggcataaacaggttattaatttaagtaacgagagcttaattaaaagacaaaatccagtagaactcgcagagagaagacccagaaatgttcgagaagataaagcaaaccctaacctgaagattgttaagcttgatatattcccagattttcttgacggcagttgtgcgagagacttcgttttccccaataaaattagcgagcggcttcgaaacgggaaccaccttaagaatgccagtaccttgtctaccagttttagcgccggtggaagaagcggccttcgccatcagtaccctgcaagctccgaaaaccctcgacattttttcttcttcacacagttttgaaattggaaggagagagagctctgtctaaaaccctagatcaaactcacagactttgaaaactgaaacgtttcccagtctctctctttctctcagccctttaaaaattaatgaaggtctgtggtttagctcttcttagtttgggcctgttttgggcctcctattgcaccaagattctgggcctttttggatttatttgataaacaaaacaacaattcgaagcctataaatgtcaaaagaaagcaatggcattcatcggtctatcatgtcatccaatcaaaagatacaattttccctacataacaaattgaacaaatatttgatagacatgattctatgtttttttgggcaaaacacatgattctatctaaaacaagagaaaacgatttaaagcaaaaactttgataaagagatccaaacaacaactaaaaaacgtttgtgactgatgcgaccgtacccattgggggagttgtatagtgtgtaaaatcatgaccgtaacacgacccgtttgaactaacgtcatccaattaaaagccgccactaggctacttcctgcacacgtaagagaactctctctctctctctctttttatctccgtcaccggcaaacaccaatgggccctccctgccgtctcttatcgagaccaaatttcaaggtttactcaaagagaaagaaaaaaagtatctccgtcaactcacgtcgtaagtaatctaacgccgttaatatctctatattttcctccaccttataaattactcacggtcggtcctccaaatgccttctctctttctctccgtcatacttctctaaacaaaacccggagctccgtaacagttactgggtgacccgactacccggattcttaccccgtgatttatgcttgtatttaaagttcctctccagtcgaagagtatatttcgctgtttcttggagttttcgatcttctccggagtaatttggcttcgacagagcggagattatcttcagattctgatttgaattcgcttcaagaagacgttgcggttcaggtacgactccgaataaccctccatttaaagattttctcgtgaaattttctaagctggtcaaacctttttttgtaaaaaaaaaatttctggaaaccaatcagataatttctctactgttacattctattacttcagtatctacaggctgatttaaatcatcgttctacgtgttttgtttcttatgcttcatttttgatggttaataacaaacacattacccaaatctatcaattttttactaaccagatcattcatggcaatatttattaccacattcaaaagtttccctagtaatatttgactagactactactgtttgctactttacttttgctttttactcgacaaaaaaaagggaagaaattgtgtttctccaatgaaaataaaagccattcatcataataatcaattacgtcgtccttttgcatttacttcatattactactgcgcctgtaacgctgctaaatctctgcagctttgttgggtctattataggaaacaaaaagcaatccttaagtttcagatatacacgcttgacgcttaaccttgcagacttttcgatacaaggtaaaacacactaaacccatacttcaatttaattccattcattacctctgattttttttttatctactgggttttgaatgaaaacaactcattttcttacatactttcgattttattcaattttttcgacatgcattaagattggtccatcatcacttgaacccaactctttctttaattctttctctgttttagctctttcgttttttttatcatacacgtgactgttacagattccattttgttgctaagttctttttctttacttctggctgtaataaattcgagtgtcttcatactttcagttttatagtttaaaacagtatttttggacacgagtgatgagaagaaacaaatttttgtttttgttttttttatagaattgtatatttttattaagctctctaatatttaaatgtcagaaacttcggcttgccggagaaataaatattctttgaaacttttgatttatgtgtgtgacgaggagatggggtctttactttggtattgctgctcaacaaagcatttacacactcagtttcgcttctctattcagacccactttctttgttaaaaaagaaagaacagaaactatataattttaatgtcatcccttgtctctatcatgatcatatttcaaatatttttattgttccaaaggttataatttgatccattcaggtgccatcgacaatcctttgaaaatatattttctctagtggtccttttctctgatccccaagttgtatctttgaacacttttgtctttatcaagattattattgcccctaattatgtacctccatagcttgtttttattttaatactacatataaaacttgtatccctctctactttatttcatgagttccttaatttcatgaaacatttttagggatataattctttaatctttatggcttactgcataaatcatgtgtctcaactcattcttgcatcctaaacatttgcttcatctactactactattctaggaatatatcatccttctcaagaaatttgtttttactcctttaatctttattattggggtttcactaacttattattagttgagttgcttatccaattaattaattaagctctagcatcattaacattttcatagctttgttttttcttttatatagctacctttatttatgagtaatggtttagaagttgtgatgtttaatacactctgtttctgttttatggctcatagggtttaaaaggcagagaacataaaaaagagtgcaaagatgtttacttgcataaattgcactaaaatggcagacagaggtgaggaggatgaagaagatgaagcgcgtgggagcaccactcccaacactaaagaagccgttaaaagcctaactacacaggtctctttctctccctaaagatcaattctttcctttgttgatccttaagactctttttcactttacttttgttgcttttttcctaattgccttggtcttgaaataaacaaagccaaattgagaaaaatggtcctcttaaactgttttaacaattgtagtgaaaagtgaaataaacagttttgaaatttggctgtcaagtacaaaagtatagaggttactgtagttaaggctgcaggttacaaacaatattaggatctttagacaagattttacagtgatgcaacatcacttctctggaatctattacaaatctctctttaataggttatgtcagtgttttattttctgcactctatgtgactagacataaaaaatctagcaaccaatttagtaaaataattaaaatatcaaaattatgtttcacattgaatttaccaatgtagtggctgatgatttgtgtggaaaaggctaatggagtcacgccttgttgaacatgatttttgcttgttattgaagattgatctatatactttcctagaataagtccctagtgggttcttatttagattaggatggtggggcaagtatatagtaaatcaaaagaagcaaaaaaaagaagctatgattatgttctagtcatggagaagacaagatgaactatattatttgtttcaaattatatcagatcttctagctttattcatgctctttatgaatgatgatagtagactctttttttcctagttgggatcaaagaaaaatcatccatttcttgactcttttttttcatgttagtagactttattgcttacttacctgttctgtccaacattattctgtccaatgatcacctagtaaggttgtgttttaagattttactttaatcaacttcttgggcacggatgctatgcagatcaaagatatggcgtcgaaattctcaggttctcataaacaaagcaagccaactccgggctcttcgagcagcaacttgaggaagtttccggattttgacactgcatcagagagtgttccatacccttatcctggtggaagcacgagctccactcctgcttgggacttaccaagatcctcctaccatcaatctggacggccagactcaagattcacatcaatgtatggcggtgaacgtgaatccatctctgctcagtcgtgtgatgtggtactagaggatgacgagccaaaggagtggatggctcaagtagagcctggtgttcatatcacatttgtctcacttcccagtggaggaaatgatcttaaacggatacgtttcaggtatttgaaacccattctctccataacattttcaagaatatgtttcacttaaggacatagaatgattcaatgtgaaatgaagctaacatatacttgtatcgtttttgaagccgggaggttttcgacaagtggcaggctcagaggtggtggggtgagaactatgacagaatagttgagctttacaatgttcaaagatttaaccgacaagctcttcaaactcctggtagatccgaggaccaggtaaaacacatcactctttagatcacaactttaagagaaggtttatgagtaatcttatctttcaacttctgtttgtttcttctaacagtcgcagagagattcaacttacacaagaattgattcagcaagagaaagcagagactggacacaaagagacaacaacttcagaccaccaggaggcagtgtccctcatcatttttatggacctccaatggacgcagcaagaatcaccacctcatcgagggacgaaccgccttcaatgagtaatgctagtgaaatgcaaggtgagtgggttgaagaggacgagcctggtgtctacattaccatcagacagttaccagatggaactagagaactacgccgcgtcaggttcaggtaaaccagagaaccgattttttcagcactatcctaatttatttggcgattaaccgtaaacctttcgaaccgggtttgtacagtcgggaacggtttggggaagtgcatgccaagacatggtgggagcagaacagggacagaatacaaacccaatacctctaagaggacaaaaaacgagatcaatattgtagtcttctttaacacaacaaaggtatacacaaaaatcagaattttgttcatcttctaaaattttgaagaaaatcagaatgtgatatgaaaacaaaatgaaaatttgatttatgtttagagatttgtagttagctacttctcgacgttttgatagctatgtaattttcctgacgacgagatgagctttatgccttcatttattggttcattttttgacatgattctaaaactgtgaaacttataaatagagaggtttatcgatgatggatagatcactaaacaaaacagaacacagtttgttctctaatttgccttggctaactacctaacaaccctagaaaaattatattttaaacaaagttttgatgagatctattaaacggaatcagatcacaaaaaaacacagagagaatggttagcttgaaccaatgaaactaactcaaaatatacaactgaaaatatggaacacaagcaactctaagtctaatcaccaactctttgagcctaaattgtttacttaatttctcaagagcataaaaacaaagaatccgcccaaaaaacaaatctactcgagaagaatcatagtaagaaggagtcactatgaacataaagctcaagcacaaagctaacataacaacatctcatgttccatataacctatacaggcaagcaaatagaaaatagaacttacgatggcactccatgttcgcctatggccggcttctaacaacagaaaacatggagaaaataccattaatgatattgaattcgatacgcaattttctggatcgacaacaaataattcgattacacaagataaataaaaaggtttaaaatcaatgaatagtaaattattaagttagataaaaagaaattggactataaaaaatgaactagaagaaaaggaaaataaaatgaaatagaagttagcatatttgagaatttattaatgtaaattttatttcctagaagaaatgaaataaataacagtattcctttatttaagattcaaatataattatgataactctttgttttgtcaataattatgataactctataaataggttattgtgttaatcgtctaagtctaagagaatccaaagaagtcaaacttaacacgccgtactctcgtaaaagaagatggaccgagaagcagtaaaggatcaatacgacatccttatcgacctggaaggatcagtagggactcaaagcgacattgttctgaggtggactcagaccagattatctctttacttcaggcttcttcaacggatgagcttaacgctgtcttctccaggatcgtcaccaccatcctcgccgacagcaccccgagtggcggcccgacgatattggcagcgaatggcgtttggatcgaaaagactctctctgtggaaccttctttcaaggatctcttgctaacttctatataaatttactagggcttgtactaacattaacatgcttttgatgtatgtaagatagtaacatgcttagacatttagacttagatgtgtgcgtaatcagatttaggcaaggcttttgtgtgaaaatcaaaccacagatgttagtgtaacctaataaacctaattcccttaaaccttctccatatatttccttcagtttcacttatatgaacatattcggtgaataacttagctaaatactagattgtatataggaatactagggattatactaatagtttgtgctttgaagtatacacaaggcttttgtgaaatcaaatcacagatattgatagctagcttctctgtttttgtttgtattgtttttgaaaggctgatgaagtgaataaagaggtgaattcatgggttgaagagcagacaaatggactcatcactgatcttcttccaccaaactctgcttctcctttgactgatctcatatttgctaatgccttgtttttcaacggaagatgggatagtcaattcaatccatcgctaacaaaagaatccgactttcaccttcttgatggaaccaaagtacgtgtgcccttcatgaccggtgcccacgaagacagtcttgatgtttacgaagctttcaaagtcctcaatctaccgtatagagaaggacgcgaagacagtcgtggtttctctatgcaaatctatctccctgatgagaaagatgggttgccttcaatgctggagagcttagcttctactcgtggattcttgaaggacaacaaggttcttcctagccagaaggcgggtgtcaaggaactcaagattccaaggtttaaatttgcttttgatttcgaagcctcgaaagctctcaagggtttgggtttgaaggtgccattgtctacgatcatccacaagtcttgcatcgaggtcgatgaagtgggatcgaaagctgcagctgctgccgcattaagatcatgtggaggttgttattttccgccaaagaagtatgacttcgtggctgatcatccttttctcttcatcgtcaaagagtacataagcggactagttttgtttcttggtcatgtcatggatccttctaagcactaatttgatgtccaaagtctcgggacttaaggaaaatgtttttatgacgttcttgacgtatttgaacttttatgcccactggttttaaatttggaaggaaatttgagttttagagatttgtcgttagctagttctcggtgttttgatatgagctttatgcctttattcattggttcatttttcccatgcctttacttttgaatgattcaagtggttagactcttttcaatttctttgcttatagcatagtaacagcatgcgaattcaactttgttttttttttattattattgtaacaaaacacaacgtatgttgttgccaaaaccatcctgaagccggtaaaccaagactctgctcataattttcctaaaccaaatggggagatcgaaatgtaatcgatgcatggaaaaggaactagaaattgaatgaaacttgtgtggcgtgtgatgcaagctactgtagcagctgtagcatcagcctattgatgaaacgaaacgctagctcttaattgggaaacattggatatacaatgtctcttttatgtttatcggaggatgaagtggatgattttagttagatataataacattcattcactatgagttggttttgttcttacacataaatgtaaaaagagtctagaccatccatgcaggttcttagctagatactaccagatactttgcattcttctagtagattaagcaagtcgtgttccggcgcactaagtgaaggcaagatcggacggttggtattgcattggctagtccgcgatggaattgacgtcacagaaacatcagattcttcatccatcccatcttggacaatagccaaatcacttcgtctcctcatcgaagaagccgacactctctctttccagagtctcccgtcctgtgatcataaaaaatagagtgaagctttctacaaacactcctatctttgcagttttcactatcaaaaaaaactaattttttcttttcttggaactttttcaagaatcttacattgagaatggatggctctgggagtggacattggatcggttgatcgttgtctaagggctccatcgggtgatccaccggtttaaactctgttgctacttcgatcccatgagtttcagtggttgtggtattagttgccggagcaagatcagatcttggagacaatacttccctgccatcctgatcataggagaagatttcatgtcaagtgtagcctgaaaccaatttagggcttttccagataaataaaagggtctcagattcaactatagcttgaaatctattaaaggtaatcagattacaaaagaacagagagaatcttgaaccaatgaaaggaactcaaaagaacagaagaagcactaaacatctcccattctaatcatcaactctttgagcctagttagcatctatgatatgagcaaagaatctgtccaacaattaaacaaatgtactggagaagtgtcatactaaaaaggaatcactatgaacataaagctcaagcacacaactaacagaacaaaatatcatgttccatataacctctactggaatcagacaagcaaatagaaaagagagcttacgatggcactctgtgttcgtctatggctgcctctaacaacagaaaacctggagaaaataccaaccatgctattgaattcgattatacgatttttttggaatagacgaatttcttgatcttcactttgaatttcacaagctaaaacacacaaaataaacagtagaagaaaagaacaaaagcagagccacaaagaaatctccagaatattgcagtggactgatagataataagaaatgctttctcagctttaagctt

SEQ ID NO: 334 - DNA, 120938 bp, Arabidopsis thaliana
gaattcgttcatgtaggttgatttttattctattactaagactttgaatatttggatttcatttaattatgattcatacgtcatatgttattattcaatcgtataaaattatgtgaccttaattaagcggttcaggcattagccaagatcgtcacatgcttagtacttagccaactttttacattgacaacgagatcacctttttaacagtttaatatatttttaaaagcaacaaggaatggacaacttataacaaaaaaaaaaacattaaattaagggttcccttaatcttaactttttaagtcttaagatatcaccgtcgattaggtttatacagcttttgtgttatttaaatttgactattaagtaataaccaaaaagaaaaagttgaatgagaaaaggaaatgccaacaaatataatgatctacatcagcatgatgatttattgaaaataattaataaataacgtcgtcttggctcttcgttaattacaaactaaagtattgaaatataatcatatgtattcaattaaaaggataggaggatatcacatggctataatattgttctcaatttggttatactttattactgctatttatcactaatctatcttaaatttgtgatgaatgatgatattgtttttgcagtaacaggtttgttgtagattacaatcgattttacaataacattaatttgtagaatatatacaactttgaatactgttaaaaccagaaaatatttgttttatcgaaatgaaaatacttgaaatattgcaacaaacacattttattttcatctcgcaaatgatttttttttttttataaataaattttagagtttgattaatattctaatacacacttaataaactaagaaatattattggttgcaattgtgtgatattaaaataagccgacgacattatagtatgtgtgtccggttcctactctcaacctaattttcccctttaatttgacagacaaaatccaactgcatatatgcagttacattttaaattgtatatcttatatagttaagcactgatgtttgcgtatataatatacatctagagttcatgatacaaactgaagatatcattaaaaaaaaaacctaactttttggtatatatagttgtcggacataaactatcttttctatgaaagttttattcaagattgtgaaaactcgaactcgtgagctttagaagattgtacctggtttaaatcatcagccaatgcctggatattttcacaagattgtgcttagagacaggcccaagttagggtccatgtatcaattggatattatagtatcacggaactaggtctgaaagtctcatgctaattatatatgtgcttatatgatgagagtacattacatccatagtctcttgtccatagtatacacttgcattctataatataatttcgtaaagagaagatatataataatagcattcatctgtccatatggagcagattacttttaaactgtcaagtcaattacaaacttaattgcagcatttgtttaagccatctcatttgtgtcagtactcatacattattcttgccataattctctgcattggaaagcaatcttgtgctcaattactgctaagtgcaatgaacttgcacagatgatctcatatctttttcaaaaatctgttttttttagtattaatccaggtgtgtcagatacctactaaatcaaacttggattctttgtctatctttaattattacattaatttcgtaatcacaagtctacaaatatcgtacgtctatatgtacacaaatgtacatgcacagtgcacacatacatagacgtaggtgtacgtagtggcacgtgggtatcctagtctagatacttctatgaaaatgttttttcctttgtctttatatgttttaatttaaattttgatgcttttcgaaatattatactatatataattaacaaaaaaaactaaaaactacaaatgtattacaatctagaatgctgcataagttcactattaattacgtttttggctgttaccatgtttgaaacgacgtgacaaagtattgtttaaacctcaagcaaacaagccatgaaatcaaatttggttgatagtatactgcatcacagcttgcctagccaaaagattaggttcaacgttatagacttttgacacaagattaaaaatatacaatcatattcgttaaaacgtcagatccatgttaatgaatctgttcaattcgattagacaaaatgttcctccaaaaccaactaaaaagatgaccaatctccgattacctcattgttatattatcattcgtatcataactcaaaacactgtgttcacttcgtcccactgctgtgtcaccgccacacaaccctctattagacttgtcgtcttgctattgtgtaacaatagatttacaaatcaattttatttttaatagtgttgatttagaaacaggtatatatataaatcctttgagaaaaactgaatatacatttttctcaacttttcgttataaagttgattggtggaaattattggagaattgttatcaacgtatcagaacaattattccaataactagaacttcggaatttgattttaaaaataaggtttattttagacagaaacaactatagaacatcacaccatatatagttgactgataaggaaaaatggtatttttattttattaaccttggctatggattgtcctagttgatcaggtaaaaacgttgaatcaaattgagatcgactagttcaaaatagtttacatttactattgatctaatcgaatctaatagacttcaacttcataaccagtgtcatttcccattactcgcccgaaccattctttacttatggctgcactgaacccgaattctggaatcgcgattcaaaattaattaacaactttatatatatacttgagaaatataatataggtttacgtcacggcttaacatgagattgtagttgtatacgtcgcgtgtatatgcatcatgtaaatatacctttttttatatgaagagcatcatagatactttatttagtattattgggatcataaacgggaacacaataattgcgaaaagagaatcaaaatgagtacagcaatgctaaatagctataagcgtagagcatatatgacttttgtgcagggtcaagctaattagtctcactcacttgccttacaattaacccataaagtttttttttaatgcatccaaagatctgtcctcaaattttacaatttcttggaatttgtttgtctctcttttatttatatatatgattccatatctttgattattcgctaaggatccatgttccttctctgctgttctcattattgttttctttaatttcatttcttgtagtagtactattttgttattgcaatatttttatgatgaataatatcatcacatccaaatttgaaggaaaaatgtatacaacttacttcaaaccgctagtaatcttacttttgaatataaccaaaattgaattagaaattttcaactcccttcatttcaattttttttttttttttggtgtgcacctactcccttcatttcattgttagaagaactctcttattaactcttgcaaactgattttacacaaggtaaagtgtaattgtggagaaacattgatgtcagtagcagaattgaagaaacagggtttacctgatagaatgaatctacttggaaattgaggaagtttcgcggcggtcgaggatgaggtattatcacttgacctgggttttttttaatagtaatatataaaaatatcacactaacaactttttggtggacgaaaactttttcgaattaaaacgtttcagatctaaacaagttgtcgatataacgtcaccaaaaaaaaaaaaaaaaaagttgtcgatataacgtagatgacgtttttgctatacataaattgttacacttttagctatgtgctgcatttcattatcaccattcaccaacctaagttactttttgtgaagttggatttgaattcatgtcgcacaaatcttaaatattacatacaaattacaaatttaactgaagttaaactacattgcataatatataataactattatatgtatccactggatactccctaacgtatatatacaaaataactttatgggattttagaaaattaatctctcaagatagcataatgacagattgtgataaatttgtcagaaaaatgaaacaaagaggacaaagaagtcggaaagacataaaaaacaaaaagggagtaacaaattagaaaagtttgttctgggtttacgtaatacattttttcgaattatttattcttgttttattatatgtttgttagtgagggaaaaaatgtgaggagaggattgaaacacgactgtagaaagaagacagacaattgaagacagatcttatctctatccctcccacgactactttctttggaaacacaaagctatatatgtgttctcttttataaaaaataaattatcatttcacataaaatagtcagagacaaacaattttcgaaattttatgaacaatacgtagccatttatgagatgtgtcatgcacgtgatgaaaaaactaaataaggaaaggctgtacatagaaatcttcttggttaagagacaaaagatcttttctaggctttggtccatgtatctgcctttcttttcttcttctttttcatatatatgttttttatataatccaataatatctgcaattttatcaaagataaaataggctaccttactatttctggaattatacaatattttctcatgtagaaatatggttttgtgttaatttcacactaaggctgataaatataatgttctaccgtacctgatgaaattgtagggtcacaaagtcaagctgtaacagaaataagtaaatgttattgtaagaaactaaaaactatatatgtatgtcagttaatttgtaatacaaatgtcaatatgtcaaaactaacataattaagattgagataattggatgatttgttgggtggtgaatggagagcacgtgcttgagaagttagtagtaagctatagaaaatgaaggataatgcgataacatgtgccttatcccgacaaaacacatctcacatgtaaatatagatatgtccatacatattatcatagaaagagtaccaaaagtgtgaaatctatacaccctaaaataccactagataacactctttattatttatatagtgatatcaaccacctttcatatgtttctctgttttgcaagtaaactttttacatttatatcaaggatattaaattagttttcatattgttagctttgctgaaacccaaattaatgagtccaatttttaattattctctttacatcaaaattcatatctacaattatattcagaaattactagaaaggcatatcttatacatacttgatgtattatagataaattttctctttcttttgaaacatatatatacagatataaatagaggcagatacatgtaacctagccaaaggagcattggtatctcaaacaatatttgccctttctctatctctctctcatcactatttgccatctctttctctctccctctctttcaaatgtcaataaaccaatactcaagcgatttccactaccattctctcatgtggcaacaacagcagcaacaacaacaacaccaaaacgacgtcgtggaagaaaaagaagctcttttcgagaaacccttaaccccaagtgacgtcggaaaactcaaccgcctcgtcatcccaaaacagcacgccgagagatacttcccactagcggccgccgccgcagacgccgtggagaaaggacttctcctctgctttgaggacgaggaaggtaaaccatggagattcagatactcgtactggaacagtagccagagttatgtcttgaccaaaggctggagcagatacgtcaaggagaagcaccttgacgccggagacgtcgttctcttccatcgacaccgttcagacggcggaagattcttcattggctggagaagacgcggtgactcttcttcctcctccgactcttatcgccatgttcaatccaatgcctcgctccaatattatcctcatgcaggtaccctttttatttaattaaacttttttttgtgtcataaccaaaaaaatttgaacctaaattcagattaatcttgaacaaaaaatgtcgaatatctttgacatttaaaggtgtagtgaaacacaatagtttttccaaccatttagctcgattattaactaagccattgactaattaacacactattaagagttatggaatagcattaaaaccaaaacaaaaaaagagttatagaaattggaagagatgttcattttgtcgtttctatttttgtcaacgtatagttttcattttacatgcatagactggataaataacggaaataaaatttaacgagtcatgcgatgttctttctcaaaaaaaaaaaaaaaacgagtgattcgatatttacttaaagttaaaaaagtgtaaaagtccaaaaaaaaagtggaaaatctatttcatgaaatgtatgaggttacgtgacccaattgaaaactctttatcttgtttgagtttgtaaatgtgcgcgtgaggttagacgcgctttaaagtaagtagagaagtaaaaataaagaaatgatggaagcccatagaaacagaatcggattcgtattatctgctctgcgtgacatttgttgcgtatccttacacctactctttctccatttttcattatacttatagcatcagtgtgaatatatatacacccttatctttaatcgggatcttggaccgtaaccaaaacggcatgcagtagttcctcacatgttccgaatatattcatcagctcaaattcgattcaagacattaacccaagtccaacatagttttaagagtatatacttaattattttcatatatactggtttatgtgatgtggacattttgtagtaccaatgtaattcacatataatataacgtggcgtcccattgtggtaaagcttgtcatctgagtaccacaattggaaattctcttccgattaaagtcttgttcattttggaaaattatgacaaaagtctcggtagttatccattatagattcctcgatttcactatctatgttactggatatataatttttatgttgattaattgtatatggcacataggggctcaagcggtggagagccaaagaggcaactcgaagacattaagactgttcggagtgaacatggagtgccagctagattcggactggtccgagccatccacacctgacggttctaacacatatacaaccaatcacgaccagtttcatttctaccctcaacaacaacactatcctcctccgtactacatggtacgttagttaattttcgttttgttaaagtctacatgtattagctagtgatattaagtagatgtcaatatcattttaaccgacattttacgtttctcattcacgcgttttcaaattcaaagaaagttaattgagttggtttgacccttttttgcatatatagttaccatgcacttaccaagacgttatcttgtccacatccgataaacaaagtatatatagtaaacaaaagtccaaataattcttcaaactgttttgttagcaaattatctccaattctatctatatgttttatagttttatttagaaactaaggataggaacaaatggtccttttctttcttgggttggggaggacattagagagtgaagttgtactgttcatttaacacgccaagtgacctatccaaaaatcttatcccaaagaaaaagtgcggtccattattattgaagttattgttattactactatactataagtgttacattatcagtgtttgttgttgttaggcacgtttctcatttatatttatatcatatgctttttggtcttcaagaacaataattttgacaattccgtcaaacttttcttctatacctaatctttacacatgaataattaagcatataattgatgtgtcgatgttacgtgtgtacgtatacatatagacacttagtcacttatatgtattgttctcacatctattattggattttctaacagatcacacaataaaatctactctttgacaacgaaaatatttggattttggacatattattcttcacgaagtgttgcaccaataatggaatacaaaattactttgggagataatatacatctaacacataatatatctcttaatcttgactacataaatcaagaaaatggaaagtctactttatacttttgcaagggattctaaaaccacatgttttttttatataaagatcttttttttcttttttgcaggacataagtttcacaggagatatgaaccggacgagctagaagcccacaaggattaaaaaaaagcttcacatctggtcctgttatgttgtcatagatgttgattccttaattttacacaagcttcattttgcattatttaaagtaaaatcgtattttgattcttctttaaatctctctcaattttcactctcttcctttttcttcttatgtattagattcttttacatagctaacacttgtatagagaattcaaagttctggctattttcgaaagttatcttttctctttatatattttgttatggaggaaaatataaacaatttatgttaaattacatttcttgtaaaaccgaaccttaatgggcgttactaccttagtagttcaattcgttactactatatgggcctaaatatttacagtatacgagccaaatggcccaaactataactgtctggaacgacaacgtttccaatattcactctcgaaatatacatatccgtgtatccaaacaagtctctaaatggtatcgagagaaacctctctagggctttaacagtttaaggcaaacttctgtcttctgggtttggtttgtttctcaaggaaaaatttcaactttctttcttatttcagtaaacgagagatatgttttcaatctcaatctgattctttctcgcagcggctaattctagtgtcgctaatagggtctctgtttcttcaaatttagttctttaaattcactacgaagatttttgttatggcgagtagaaagctggttcgagatttactgatcacaaagcagcctcttctccagcaattggtgcaccaacgggttcgtttctggtgttgtgtttctattgattgtgattacgagcttaaaaatggggatgattcattttgtgtttgattattagagagtgggcgcaagactaggtcttcttcagggaaatgggtttgcgagtcatcgacggtttagtgttttcagtgagttctcgaagaagattagaggagaagctgataggtaaaatcattttttcaatggaaatattggtgttggaacatgaaagtttaatccttttttgtttacattggtgttgttagcaatcctgaatttcaaaagacagtgaaggagttcaaggaaagagcagaggagttgcaaggtgttaaagaggacttgaaagttaggtaatttacattttgcaattgcattttagggacttatgagttagagatactaagtatgtcaaaagtaagcttatgtatgaaatgggaaatgcagaacgaaacaaactactgagaagttgtataaacaaggtcaaggcgtctggacggaggctgaatctgtggccaaaaaggtattctttagtaattggtggcaccatctgtttaggagtttctctctttttcgagaatgtttgaaaaggcaaagaatttttaagctaggttgtgtcttccttgctagttttgcatttttgattttctttctgaaatcattggcctgatgtatgctatatctcttcttgtttggtaactaaattgttttagttaactgtaactcactttttttttttgagtatgactagttaactctgtatattgtaaaaggctaagaattgtccctaagaaaacagctttgacgatgcaggtctcttcaagtgtgaaagacaagttctcagcagctacagaagaggtcttgctggaatttttcacttttgttgttgttgtcctttcagttgttaattgtggtatagtttttttgttaacttggttatgtatcttttgtggtcaggtcaaggagtcattcaagctcggtaaggaggagagtgcagagtcagcaagttcatcaggcacaggaaccactgaaggagaaaaacagcagcagcaatctggttctacggaggagcaagatacattttttggaaaattcaagtccagcatttcttcaccaaaactatctgaggcgtttcacaagcctcttgactttgcaaagaagggacttgacattgtaaaggatgaattgcgtggaaacccatctaaaaggaagcacctggagtatacacctccgccgccatttacaggtgagagaagtacgagaacggagatggtaattatgccaacaaaacagtctaagtggcaaaaaaaatgggaatccttaagagaaaaggtaaatggccctctctgtcttgtccacttatgcgatttttttcaggcccttgttgagtgttttccttaaacttggtttagatgcaaggctatcctgtatttaaacgtctaagcgggatgagtgagccagttgtcaacaagagccaagaggtaatgaacatcttctttttactcattttgttcaaataccttatcttgcattactgtgttcgctgatactgctttgttattgtaaattgggaatgcatttggaccgtgtagattgcagaagatgtgagggaaaagtgggaaaccagtgataatccgattgttcacaagattcaggagtatgctaattgttctcttactatatctttcttaaaattttacttatttacagcagcttagagacatatgcatgcttttgtttggcagcatgaatgagaggatctttgaggaaacaggttctgcatcgacttacaaggagatccgccgccgagatccgtaagttatagaggctgattattggtatgaagatatgactctggtaatcatatacttatctctttcatggtcagatcattctccttgccggactttgtttcagaaattcaggaagccatcagaccggtcttgaatgcatatagtaaggtatatctcagatttttgaatagatcatctcctcccattctcgtttttgttgcctctaattagttcccatccttgtacagggagatgctaagaccttgaagaagtattgcagcaaggaattgattgaacggtgtacggcagagcacagagctttcacgagtcaaggttattttttcgatcacaaggtaaagtctttattattggttcacccacgggatcctggttcttatgaaatcatgtaagtcactgagtaacttgcttcgttttgtggtgagtaaaatcgttttggctgtgatgtgcagcttctgcatgtatctgaagttgatattcaagagacaaagatgatgggaactactccagtaatcatcgtcagggtaatgatctttgttttccttctgaggtcatcctttagctaagaattgtgtctgatggatttatcgtttttgatgtgatgtcagttccaaacgcaagaaatcttctgcgtccgtgatcaggatggaaaaatcaaagaaggaggccaggtaaaaaagggaatattgaatcaagatcataaacatatgggcaatgccacaattttttaaagaatttgttgttgtgtgttggatataggacacaatacacacagtgtactacgactgggctatgcaacaagtggatgcagcagagttaggggaagatgcgatttatcccatttggaggctcagagagatgttgagagcgggtgttcaagctctcatttaattcttcatcatcttttaacttataataagctaagccctctctctttgcaatgtaccatgcaatgtaccattatttactcaaaatcttgttcactcgagattttttttttttcgttttcttctctctggaaggagtgggttcccatgtttcaggggaataagttttgacaaatatataaatacatctcaagtctttttcaagtttagcgaagtttgttgttttgtttgtatcccttaaaggttaatgactcctttcgttagaaaataagagaactagatttggtaatgaatttgtaaatcacagttctcaattcaaatattttgctcatgttctgacagattagtaccctgagcctttccatagatattgttcagtaagttactgttctaaatcatgttgttgaaaagttttgaggaacaaacatctccttggtctagtagaatagtttgagaatccttttcctcgaccaccatgccttccattactatacactgatatgacgacccaccattgtaatcatatgaacatcaaagtgtctctctgtaacacagtgggttcacagacacactcatttggtctacactttttaacgttcaagtgcttggagttgagatacaatgtacattaatgaggacgatactttgtagtatgaaccaaatcatagccttcaccaagtccctctaagaggaagaaaaccttcatatatctccttaagctcacacaagtgttgtgatcaaacactctgccatgttttgccagaggacatggggttcttccataaaccagactcctcttggcccatcaacatatccatggcccatacagagccttatcatgtgaatgataaaataggtttggggttattcttgaaaatatcttaaattcatggaaatatatgagagaaaacaaaaatatgggtagcggaaaataaatagtagcccactccaattctcgtcgcaccaatagagtaattcaactgccccaaattgctctcgactttttattctcggattagcgtttgtgctttcgcatcagagaatctctcagttcttctcaatttaggtcatcagatctcacaatcaatcgactcgaactcaaatctcacttcatcaatcaaatcatgactcttggctcaggatcgagtgttgtcggtaaattttcgatttttttttttttggttcctctttaagtttcctagggtttttgatttgacacgaaacgcagcttgggtttatcttagataatttcaaccgataattttcgtgatttgtttctggatttttctgcatatgagccatacttgatatttatgtatctttaactctgaaatgttcgtcttttgattgatatgaacaattggtattatatagattctcagacttgtgtgttctgttgtggtgatagattgttttcaagctcagtgctttgcttagaatatagagcttatttgtgttagtttccttcactaaaaattgagctgtttgatgttgttaatgtaaagttccgaggaatttccggttgctggaggagcttgaacgtggagagaaaggtattggagatggaactgtgagctatggaatggatgatggagatgacatttatatgcgctcttggactggcactatcatcggtcctcacaacgtagttatatctctgtttttttttcttcacttgctatgaatgataggactttgtgtcttcttcttgaatggtgttggaatgatattgtgatgtgatttgatctgactggtaattttgtttgtgcagactgtacatgagggtcggatttatcagttgaagctcttctgtgacaaagattaccctgagaaacctccgactgttcggttccattcgcgtatcaacatgacttgtgtcaaccatgataccggcgtggtaagagtgtgaattttttgagatttgttgcttttgaattaggtgactgaaatgtgaatttgcatatacgtaggtggattcaaagaagtttggggttcttgcaaactggcaaagacagtacacaatggaggacatactgactcaattgaagaaggagatggctgcatcgcataaccggaagcttgttcaacctcccgaaggaactttcttctaatactctcaaagcctacctttgaggggcttctccattgttggtcttcaagcttttctttcgtaccttaaagtaaaaacaatggtgtctgtcgatgaatgatgatgttcgattgatcatctggagtttaaatccttgtgtgcaaatatatctagacaacgctgtctcacgacttcatcttctcagtttagatataatatgggaaacaaccttctagaatcaaaaacagcgttgtttggctttacatgttagcgaatcgtttaaatgtttgatttttacttcgcttttattcgacctgaactctcctattgtgttcacatttgaacgcaattcatgcaagaaatgtcaaaagattaccctgtagtttggtatttgaaagtgagcccgagataaggtatacgccattcttcagttattcgagtggcgttacttgaagagtggttagaattacgatcttcacataggcactttaggaggcaatgaggattatcttgttcttggaatagttagaccgctcaaaccttacatgtttcaacttgagggagttgttaggattgatatagtaaggtagattgtatttagtttgaatatagatgcgcctctaaagaaaatctcaaatgctaactcatcttcgtctctatcaatttcgagtctgatttgggacaaaagagtgaaggctgtaatgtctagtattattagaatcatgtcggtgtatgtctgtttcttcatgtcctaggcttgggaagtgtgtcatatttctccttcaccttaagcttgattattaacgacaggatccattacctctcatcaagcttttttgaattcttttttccacgtgactttttgtttttccttcacaaacattgactactatttttgtgggcatctttcaaaaaaggtagttcccttttttggttctcaaggaattatctttatcttcggtagattgtcacacatatcattcaaataatacttttttgttttgatatccattatattatcagtaatgacttttacattcacaacgcggatctaattctctgtaaatctgtagcaaggcgaatgctttcataaacaacttcaatacggatagttttactcgcatcatcacacaaatctacaatatatccgttcaccgttgttagactcgattgcaacatcaaagtgtatggtagttaattaacatgacatccaaattaatcagcaaatggtaacggttcaattaacaacgttagaatcaatatatgttttagccaaaatatgttagtcaacactcaacagctataaacaaccacttacatcgaaatcaacaatatacaatttgtgaacttttaattttttcatccatatttcatatttgagttactatttcactaactacaccacaataaaatggacagagcgtttaatatgtcttctattaaacgcaacaatttgtgtttagaaccatacacattaagtttaaaacttgaaatgactttcaaggtctatgcaaatatacctaaccacacggttcatgaatcgcgccacctccttttatatcatacgaccaaatcattagcacccaatgaatcaatgatacatgattttctgaaagtataaattataacaaaaagtgtaatatagggcctgactggtttaaacgcagcggatgcggttgcggttgcgggagtttacggaaacaggcggttgcggtttcaagcgttatcaaatgttttgaacgactggttgagcgtttgataatgggtgcgtttgcgggagttctatgactggtaaaccagcgagtgcgatagtaattaaataaaaaataaccaaaataaatataatatattactattaaaagaaaaaaatataatatattattatgataagttgataatattagaaaaattaaacatgcttaataattaaaaccataaataaaacattaaattcaaaaataaataaattttgtaagaaaaagcttagtactttatgcatttggtacatcaccaaaaattgcatcaagtagtgtaataaactgtaaataacgttgaactcgtgggtttttcggattgcctctatacatatgataaagttctaacaagaaacgggtcatctcgtctgaccaaataattttctaatcgagaaaacaaatcaaaacatgtattcaatcaaaaaactcaaaaaaatacaaaataaaaaaaatgacgatgccataaaatactcagagaattacactacctaatgaatggatgaaaggatagatcatacttacgtttgattcttgattttgattttgattttcgttagtttggatagatgccataattgaaagaatagggtttcaatatattgattagggttttctgataagaataagatatatagggtttgggtggaagacataattattttaattaattaaaaaaaaaaattaatctaaccgctaccgcccgcaaccgcaaacgcttgcgggaaggagcttttaaaatctggcgatttcgagcggtccaaaacggtatctagcggtttctatgattggtgtcaaacgctaacaaccgctaccacccgcaaacgcagcgtttttgcggatgacagagggagaaccaatcaagctcataatgtagagaatacatacatacatacataacgcagaatcgcagatgggtccatccaaaagccatgcacccatgtgctcatcatattcaacggaaggtacggatgattttcgtttgattattgctttgataaagcatcatccgtgttttaatatttgatttttatttggaatgtgctgttgaaatcatctacattgatggtactaagtggtaaccttcttacggataccaggggtggacccacgttatggcttgtgggggcagttgcccccagtaatatatagtactcaaagtttttagtttaagcaatgtaattaaagtagcaaaatggtaggaagtgcccccattaaatgctgaaggtggcaggttcaactctatttgactacattttgcccccatttcattttgttttataacgcataatcatcatcttttgtcttcattctggttaaaatatttgagatttctttcaaatcttaatcttaagttaccataaacatcaagttttttaaatgttttgcatggatggaatcaaaacactcgtatcagtgaaatatagaatatttgtttgggccactagatacaaatcagtaatggtcccaaggattagttagataagattgggcctacattccttgaaaacgataatcttaatatttaatcttcttatatacttaaagatccaaaacagtaacatcacattctccagcttctgagctacacatattatatacatctttcgtattcgtgacaccaacacactgtcccctcttcactactttagtcaggtcgctgcaatttcatggacccaaaaaacactcacgttataaaccttaagatatctcaattattactacatgtgtgtttttctacgttatgaatttgtgtcgggataactttttatgttaaaaccttgttccaattcccaaacaagatatctacatagattttataaataatcatatagggtttttttggttgaaaaaaaaaatcatataatttttttttctttttatcgtcaatcagatggtttagatttcgaaactcgaggaagtacttaataatcgacttttataatcgatttgtagtatttctaaattgtaatttaaactgtggaacgaggtagtaattatttgtttgtaatggattgacaaacgggattcttcaaatgtatccaaaactggtgagctaaaggataatattactatatgaagtttgtaaattagcagaaaggaatcatgattttggtatagctatgaagagaggaggatagatttcgtaggaagaggaccacattctcagctggtgcataccaccaaaatggtccctttcttttgctcttccaccaccgttgaacttccataacttataatatgttatagctaataacaatcttagttgtttattcttaataaacattacttttggaacgggctatgcatggtttcatatgaaaacttcgaaatattgttgatatcgtttgttgagaatctcggattcggatcttgctttatcgacttgaaatttatgaacctaaaaattacaatctatcgcgatttggttgtaaaaatgaatcctgaatcagggtctatcagctttaaccttaatagccaaactatgatctatcagactatcatgacttgatcatgactttcaatagttattaaaagaaaagcgtgagaaaacagagaaaattataaaagtccgtagtatctatcatggtttgtgaaatacatgttgaaatctttagatacatgatccatatattgtttctctgcatgatctaaagtttagaccctgcataaatagtgttaatactcatagttactctatggaccaaaatactattaaaaaaatacaatgattagctaagagggatggatattgttatagaaagaaaatgtgattattcgaatgaaacgtctacgaagcatccatgaagacaatgtctcataataagaatttagaaggcatacagctttcaatcattatcttcgcttttaaaaatccacatgatttgtctaatctctccgctcgtagttctataattatttggaagcttctacttttatatataatatattattatttgtcaattgagatgtttttagctttttaatatttgatatgataatgattttgatatctctcctcccgtgtcgcaatctctccactggcgacgcgtgagaggcacgtgagtgaaagttacgtgcaaaatggaattgtgatttgtgtgagagactcacatggcattgcctttttttataaaatataaatcaccgatacgatctatgattacttatttttttaattatttctatgatctactgcattctacagaaaacaatatacattcacagttcagttatactatttttatgcaagaatcattctcagtgagaaattaaactatctatttcgagcattacatgtagtaatatttctagaattattgacataaaagttaacatgcaatatacattatacgtaatgtattgacagatgcaaacctatagataaatatatgtaaataggtttcaggtgcgagcagtttccatgaaagagaaacacaaaaaatgtttccgatttggggaggaggcgtgtaataacaattagtattaaatacaacattattgcaaagtttggatattgtctgattttacaaaatttcttaaaattgacctcatatcttttgtttgttggtcagttggttggttgattcgttggtttaactggtggttgagtttttcttgttatggagtatataattatctatgtttcattcttttccatttaaatcatttatcttatgtttgacgtctaaattatgattgatatttttggatttcgtttctctttgggttttgctgtattttggtttcaaattcaaagaatagtaactatacaaaaattgaatacaaatagtattgataattctgatacgattttggtttttgatttacatgactatccattatagatgtttacttctgtagacatggattcagaatggaactaaattaattaaaataataaattgaactatcttaatgtgacctaatattttgtctttctttagaaataacgattacgttcctttgccacgtgcaataacatatatgtagtccccaagtacggaagcttcaattatcttttttgaaatcacgatcattgacacttagctaactttcaaaacaattgatattattttttttattcatacaataatgtaacacagtaaacgatgttaggcgaatttttatttttaaatatcagtcggattcaaaaccaataatttgtgatatgctcctacattctaaatgataaaataaaccatgtagaatcctttcaacatactttgtgaattaagtcagattgaagaagctacgatgaatggaaaaacgaaaacaagaaagtatcattcattatataataaatacgtaaacagcttaaccgggaaaaggtactgaattatagtattgaatgaaccccaaccaaacaacattaaattttgaagccaataattaaatacaacaaccaaatacatttaataaagaaatttcatagacgttaaaacaagtaaagaaatagagaccctaccaatcctctctgtccttctccccttcaaacccttaaaatcttccctccctcactccattaactctctcagtttcttatttttgaatccaatccccaaaacatataaacaaaactaaaagaagaaaaccaaatttagtttcttgtcttagttttctcagagaaaacaaaaacaaaaatatgaaactcccatttctaaacaagaaccactcaacatcttcatattcttcaaattcatcatcctcttcatggccatggccttcttgtaaccaaaaccctaaaaccttatctttcagagccaccatcactttcaccaaccctatccacgaccaagacgacgatgagctcgacctgctcgacccaccggagattacagattccgtagagaatgtgataaaagggctaagatcatcagagagactcatcttcgaaagcaaaggagaaaccaactctatacttgaagaagctacgagcaagcgagaagaagaggacgaagaagaaggcttcatgctcttctccttggaatcagacgacccttactctgatttcaagagatccatggaggagatggttgaggcacacgcgcttcaccacgactggaaaagcctcgagaagcttctccttcagttcttgaaagtcaacgccaagaccagccatcgatatatcttcgcggccttcgtcgatctcctcatgaacttagcactagacacgaaaaaagccatcatcaataacgacatttccaaagatgacggcgtctcggcctcacgcgccgccgctgctggagaagcaagcacttcttgttgtaatagtatgactcttggcgaatctccatcgtctcccttgtcgttttacacgtcgtgttcttcatcttcttcctccgatgagacttcctcgatgtccgtacgtttcttgccgctgtcttctttgttagagatggatgagaagactaaagagattttagtttagaacggttttgcattttttcttaattaatttgttttttttagcttaattaaaatttgtgcagaattgtaacattggctaccccgactacacatatggagatgatgaatcgtatgaatattatattggtctgtattgtgctcactttttatatttttcattagtgtggaatttttcgttttaagtaggatgataatagttgaatcacacttaatttttttgtttctttcgtaaaaacaagttttaggccattggatcggttaattaatctcagtttttgacacaacgtgcgttaaaatatttgcaacgttggtttttttccgtctataagaacaaaaataataataataaatagaatacaaaaaaaaaagtttctttcaaaagcttaaatagagtagattgcaaataaatgcttttagctttcagtcaaaacatcaaatatattaaaaggagttaatttgattattgaccattgagttgaattctggagactatgaatctatgatgaacctacaagtacaaacaatttatctacataatattttcacaagaattgttttttggcattatttgaaaagaatcagacaaaagtttgatatattaaaataaaatttgaactttgtttaaacgttggataagctgagaacgggaaaacagtgaagatcttcgcttcaacggcaggtttggctttaagatgagacatgtgggactgtgtgaatcagtgacacaattctacgagattgtctccacaatctatactattttacaaaaataattaatatacaagtatcataagtaattaacatgggatgaatttatgtatgattaatgtctgacatcgtgtttttgattgatcttatctgagccgttgattttgaaatttaatgtcgtttatatagcaggtttttgttttataggagacttggttcatagtagtaaatccaaaaataattgtgactgcaaaaaaagaggaaaaaggctcagaaattcagatattacaaaatattagataagatatacctgcatctgcccttttaaattagccatgatatccctgcctcttatgataaatcttcaaagcaactagattttaacccgcggtataccgcggtgataatttattttttaattaaaattactatatataaaagtttgcaaattatatttatttataaaatatttttattttatagtttacgattgttattaagtaacgtcctgtcaaacccgtcccgtcaatctgtcccgtaaaaaaaactcactgatcttatttatgatatgtttatgaatcattgtctaaatattttttaattttgtagtaattaaatgctatcaaatatctctgcggtttgatgattataattgaattgttatagtcatgtagaaaaacaatatcaaaaatgataattttataataattaaatgatattaaatattttggaagttttattttagtaactaatcgtgtaattaatgtggagagattttggaaagattatcaaatattaaattcaaagattttctttctaattatcgaaaataattattaaataccagtggcagccactgtaaataaatctcaattcaagaatttatttcacaaagtgagtgcaaaaatgtatatgtagatacaacgattactattgccaaaacagaatgtaatttacgttttaactatatggttttgggtgtttgatatgtatttttctagtccttgttgatgatagacaactacaaaattaacattagtcacaagttttattgattacaacgaaacgaacataatcatgtttagtcgctattgttaacaaatctggaagtaataagactacgcttaagagccaacaaaagaaaaaaaagaatacacttaaaggattgatgattgaacttctaaaaaacttccttaataattatataaattttatataacaacacgtatgtatgctagttaagtagttgcatagcttaacggttatcaacgctatttaagataaagacaaatgcgtatattgattttataaaatttgttaaaactgatgtaaaaacaaaataattgtcaactctctaccttcgagattaaactttctgctgtaacgattattaaaattttaagaagcttcgaacttttgtatcaatgtccatttaaataatctcaccctccagtttgataaaaatatgtgttcatagctttcactttacttgacttcttcttttttgttacaatttcctagcatgtgttaacatagaaacaaatttcagttttagatgcaatatagtctttttaacagtgattctcgatgtttgggcatgcatacaaaataccatcacaagtataaataaaagtcattaaaaaggaataatagaagttattaatatgagcattataaatagatgagattgggtccaaagttttaggccgtgttttgctctcttgaaattcaaagttcacatttattagaaagagcaaatctcaagtaagatatcaactttaagctcacataatgcagataacataaaaatattttacaagttaactgtgacaatgatacatatgtcacagtcgtatttattttggggacttcgtggcattaatttgttacaagttacggtggtgacctgttcttttcacctatcagtaaatgttgcttacctgctatggatcgtggttgattttgtctaacctatttcattaaccctgttcgtaatcaaagataaccactttagtctctattgaaaatcttcgtatactaagctctcagtttttataccgtttcaaacactcaattcgacacgatatatttaaccaataaaatattatcttaatctaatataaaatgggttcattagcataagttaaatttctaggaaaatggagatacgattaatgggttttgtaatttcaaattaaattgttttgtgaggaattatgtattgggtttctctaaaactttggacaacaagtaaaagcctgcaggtgtgtctgttactttgtctaaggtccaataatcatatacaatcgacctatatttctaacggtggactcgtaccgtttgactgacgcatcgccgtcaatttagttgacttttgattaacaccgttgatgacgaggacaaaagtagtggactattcacttgaaataaatgttagtgtagagatacgtctggtctaaagcaacagcccatcttgatcaagcccttaatcatatgtgggccgattccattttgcaattgtaaggtttcaattttaaaacatgtattagtagtactaacgtatatttgacacacaaaaaagcttcgacagtatacgatcattattcattagagtattataatttctcgctaactccccaactgtaacacattaatcttcaaaatcctacctctaattgctaatttctaatttcttgccaaatgcacaatagttttcaaacacctaaatccaaattgtgagaaagtttctataacagataaaaaaaacttttaataaagaacatagtgacccggtgtttaaaagatttattatggaattactcagccatttcatatacgatagagattagtctcgatttctgtttaatctctcagttttgggtttttaagaactctttaactcgttagatttggtaacaatacaagtatacgctcaaaatttcaaaaaaaaatgagaatttttgcttctgaagccattaatggaggagcacgagaatctcacagtatcgttattgctatttttattgctaatcgttaatgctccttttagactttttagtcacagatttctgagcttataattattactagctagctatagttgctggttagtctaatctgaaatttacttcaatattgattaccatatttacttttggtagttgggtcatatatttatagcacccattgattattctttcaacatttatttgaatgcgtgtatttgtagtcataaatattatatacgagtcttgttggatgaacttgaagttatgtattttagttatgggattttgtgatgaaaaaccattgtttctaaaagagaaccgaaccacccggtcatatcgctctaactctgattttaaagaatatataggttggttcaattctaatcacacaatttgtttagccaacacacgaacaccggtgtaaatactaaatagtgtcgatcagtgattacacacataaaaaaaagaagagtttctattttgatgtaagttttttggattttgtagtggtaccaagtaccaattggtaccacccatccgatggtccaagcgtggcttttgaaaaaataaaacagcaactttgttaattttgtacgttaacaaaaaaaaaagtttgataagttttgtacgttaagtagactgaaaacaaatttaagcaaattattttgttgaagcggaatgaaaataaatacatcttgtagtttgcatgcaaataaaaaactactcaatagcatgtttcagtctcgttttacctacagaaaacaaatacagtagatgaaaaaacaaaaattatcattaaacgatcataaaaaaaaacgaaactctgtacactaaatttccaaacaatatttttaaccataataccccatttgtttattattctatttacgaagtttatatattttaaaagagtttcaataatgacaaaaataaataatttataataaagtaaaagaaaattataattttgatgcatatatgtacaatgaatgagatgaaatgaattatagtattttattattattattattttataaaacaagtgtctcttctagagaaattaatagttttggcttaacttttttatttattaacgattaaaaaaaatacttatgtattgtgaacaaagacaaacaaatatgttatactgaattaaaatatattgttttgttgttgttattaaaatatatactatacatacacgagttctctcttgtcttctctcttgtcttctcttttgtcttttctcttgtcgattcttagcaactgatctctctaattttttagcagcaaaactcttccaagatcatggatgcatcagattccaacatgaaggacggatttaacgtggaggaagagttccagaaagtggaggagcaggtaagcaagacttatgaagagaagaagacattcaaggtgaggagtattgatggggataaattaggttttgcattgtccgaaagttcgagatctgaatcagacgaagaatgaagatggcgatagcgacatgatggtcatagcaaaattacatctccatgctatttattatttattttatgttattgaattgtaatacttgtatattattttatgttattgaattattgttattgaatttatgtcaaaaaaaaatgtaaagtttgtacacaattgatttttgaggttttcttacaatttaaatattttttaaaaaaattgaattaattttatatataaacagacagaatgtatgttttattttaaataaatatgtaattttaataaaaattgatttagtaagctatacaatacttattgatttgtgaccacaaacttcactctttcgatggctggtttgatttaaatattttacctatttctggctgagtttttcaccttgttaaatgttttcactaggtaaagttcttcgctttaatttcttgtacctgataggctgatagcatttacgagttaaaaagacaaaaataagaatagtttctaaccaattcaatgatgaactagaaattacagggtcagtaaagaattacattgtttggggaccaatgttaaatcttgtacgacaaaacttttataagaaaaatgtaatttcttgaaatgtctgtagaactgagtgggccactagacaaaaactaataattacaattttcatttctttggcaacaataattacaactattttaaaggatggatcgtatcgtatcggaaactgtaagaagggttcgtccaaagtatcatcatcaattacacaacataggaagaagtaatgctgtaataaaattgtacatttaagtgtctgcgtcgctatttatttatgtaattaatattacaccctctttctaataattacgagtatcaaatcccgatgctccctcatgtcttttaccgcccaaatccacaggttcgctacttttctatgactgttgtatattcattatgggtagtaaagaatcattgtggggaaaaaaatattactagttcaagtagtgtatttttttgtcgcactataattgtagtcctttgtttgaattagtttgtctcactgaattagttttgtcacttacaactagcatgtataatgattgatttgaagatggattgtgatattaatataaataacaaactaataaaacgccataataataaactatttaccattaaaaaacacacatgtctaagtggctcgcagatttggagataatacatgaaatggttgccatatctatcaacatgcttttaggtgtctaaacacttgcaatcaaaatagtactgtggtatacacatgatccacacatccataagacatccatttttcatttgatatctgacatagtgacatgtgcgaatcaagtcttgtcttatctggcgtctttccacaatcataactaatgattaacacttgccgtactgaatcatctttacacacgatgatccattcttccataacacgatcatgatcataccgtaccattgatcatatatatttcctaatctgaccgtgcataattattgattaattacacatattaaccacgaattaattacacatattattatgaattcgaataataaatcttgtggcatattgctagagtttctctttatgtggttataattctcaatgaatgaatgtaatattctattggtatgccccatggtagattgctattttggatttgccacactaaacacaccgacatacttaatgttccttactaatatactagcacacttccaaagtatacagcatagagtccgaaattggcaataaaggattatattaccagactgatatacatcccgagattggtactcaagatactagcacgtggcgaaagtctcggtgtgaacctagtaacaagctgaattaggctagtcctcaacatgctattatattgctaatacatctttagctagcacatgaggttaaagacacaaacttaaagtcacatatttgaagatctgtacatacttcaagacatatattcaagtccaaaataagcattcttctaatggttggtccccataaactaccaaaacatttgttacatatcgctttctaattcgtcattgcaaaagtttttgtaccccaaaaattaatgcacaacggccaaacgaaaagaagttatctattggaaaaatatgtatgcaatatagtctataaatactgtccagtgtccacaaatattattatcaaagacctgtacagttcatatataaatatatatatatatatatatgaaaatattatatacctaacgttctataaagttttcggctatgaaaatattttcgtcgacggggtaaataatatgatttaaatgcccttttcgtacattttatatgtctatgaccacatattacttgcttcttttttttctttttcttaaaacacatattacttgctaaaatgcataatatgtgaatgtatatttgttaaatatcttaaaatccgcactgtgatcatgaattcatgataataaataaataaaaagatttcacgtggacttgtttccggaaccttcacgtcatcatcctaatgagagtcacgagtgtcacaagatctttaaaacttctattcttatcgattttggccgaatattactacaaaaatcaacattgaaacaagtagcaaccatattataattattctaccattgtcgttacacttggttaaaagacaaagaagaaaatcccaaagctaagataagaagttaaaaagcacaaacccaataatatattgacacgtcagtagtagtaaaatggatagttaacgtgtcaatacattattggtgacgtggcataattcgtagttaaaaaaggttacttcgagcggtggtagtggttacggtgtgacgcacgtgagccatgacggtggacgagtggagactcttggacgtctccacggcgtttggcagcggagaaaactccgtcccagatttcggagaaagcgcggatgatgatgccgtggtggtatggctcgttaagggagaggaagcagtggagaagctctctgagatcgtttttggagtaaatctcgttctcgagaatcatctgaagcatggactgtcggaaatctaggtaaggatcgtctgagtctttctcgacggcgacagcggcggcggagggtgttgccgaggaggaagaggtgtcagagaaccagtgggaggtggagggaacggcggaggaagaggaggccgtggtgggggtggaggagtggcagtggccgtaattagaggagtagaggcggggctttttgggggaagggttgaaaaaagaagacaagcttgggaacttacagttgccacagccgatgtctacgacagagactgccttaaggaccatcttcttcttcttgcttttgcctgtcgtcattgctttgctctttctttgtctctctgtctcttactccaagatgaaatagattttagagagagagtgtgtgagggagagtgagtctacttggattggtattaaagggtgcatgtggtgactgaggtggattaatgagaagtaaactcttagcaacaatatttaatttgatgttcaatgacagtttataatttcttttaaatttttgtgagcttttaaaaatatgttagtaaatgtctacattcatgagcattaatgtgacatatacttactccactgatctatgaaaattatgagatgtgaatataggattattatttaagttgactataatgaactataatggtatttcatatataattaagccttcccattacgatttaggttctagttggacgatctatatttttctttttgtcaaatctaaccttttttttcttcaaaaagtcagatgatctttagtatgtcatttgcattcaatagttatactatacggtcgttaattcatttcatacacaattattttaaactacgttttaaattttaattcgaatatattatttttttaggatttacacatggtgttaacaaatattacaagagaagttgtagaagtactcaataagagtttgttttacatggatttgtgttgggccttcatgagctttgtacagcgcctttacaacactcaaataaattgtcactcaagggatataaacccaaaggccgtagctcctccaacacaaatccagaccactctttgtttccagtattactattattcctctaagtacattagaaaggtgtataaactttgttttacaacatataatagaaaaataaacattactgttaaacaatacaaaactttacagaaaacgtacagtatgtttaattattgatagattaatatttagaggccgatgaaaggtggaagtttttttatgggaacctggtagacatagaatgttgtaataatattgtccatcaatctgattttcgatttgagattacctagtgtaaaatataagtaacataagtaacaactcacttatgatcactgcactattaagtacttcttcctcaattccttattactccaaattctacaaaaaaaagtttgttgcaaaaagatacaaattttaatttttctatacaaattttaagtgtggaaattgttaatcacaaaaaataatacatttaggatcaatttttttcatgtgtgaaaaacttagaatttggattaataaggaacggaattattttgagtttatgtttgtttggaaaaaaaaaagactaggtttgcttcaaattatccattgaataaaggatgtttagatgagattttaatggatttcaaaagatattctagtagtttatagaatttcgtatttagtattttttttgaaggacagcagaagaatatatatttattagtgtaaaatcagtcaaacttaattaatttgattcttcaaggactttttttgtaaattcatatgaagcgtcgaacaatgttaaataacgaggataatgagacaacggtcaaacggtcaaacggtaaacccgttcctcttacccccaaattcaagtagcttttgtggcaagaaaccgtttactttttgtaatttttttgtttgtttattgacgtttatatatttctaaaaaaactaaaccctgatgtattccaattttagaacttacgcgtcttcataatcttcctctttttttctttgtctttgatattcaaagtttttgtttattttttctttgcttaacccggagagacaccctctccataaatttaggtttgtttataacaacttatacatatttttttctcttctaataataaaactctgtaaccattaaacatggttttgatctcatttgcagttttgatccctctgggttccttgaagaaaaaaacaccaattccattcatattcttcttcatacgttcaataattcttacgaggacgagatcttcctaacgtctttgatcttcttcattaggttcatttgcatttgttaaacgcttaaaaatggatctattcgtctgatatatatatgattgttgaatcggttttgttatgattgtaacaggagataagtctaaactggtcgaagatgttgggagatttcatcatcagactccttgtgtatgtcctaaccatatctctttttttcttttgattaattaatcatgtatattgatgtatatatataattgaaatggtgagaatggcagattgatattagggtacacatacccagcattcgaatgctttaaaacggtggagaagaacaaagttgatatcgaggaactcagattttggtgccaatactggtattgaattatttatatatgatccccttttttctatcctcgatacttttaaacattcatatataatgtgtagtgtatgtagtagatttgtagtgataggcaaatcgattttagttcgatcatagtgatatacttttctctgttatgggtttttgtttgattttaaaagagaaaaaaaatcaaaattccgttaagttgatgtcttctgctagaaaaaccatttatgaatacacctcatcttttgtacaagtctttggtttcgaacgttgattatatacctagtctggggattactgggacaattgtattaggtttattttaaagatatctcaatatatgtgatgcacgtaattctaatatgatagtttattgtcaatatgtactcgaaaatattaatttgttaaacatttgtatttgaataattaggatacttttggcgctaatttcatcattcgagagggttggcgatttttttatctcatggtaagtaagttttattattagttaattcatgccttaatccatctctgtcttaaaaaatattaacaatcatcaaataattaattgatatatgcaattattatttgcaggttaccgttatacggagagatgaaagtagtcttcttcgtatatctctggtaccctaaaacaaaggtaatataatttttccttttaaaaagtgattagttggatcataattaattagtggtttatggtgatgtacaaataataataacgaaataaataatgaatgaagggaacgagacatgtgtatgaaacattgttgaagccatacatggctcaacacgagacagagattgacagaaagatcatggagttgcgagctcgagcttgggactttttcatcttttacttcaacaacttcgcccaggtccttttttaaattatctttctattacttatatatacaaattgttctttttaaaggtttgactaaattattataagattaacaacatacatataatgttgatgcacaggccggtcaatccaccttgatccagggttttcagtacgtactcgcccaatcggtccggttctctgccgctgcagctaaccaaccggtacttttctatcgcttttgattttcgttttatgtactaatgcaaacacaatcttgtgtttattacctcccttttgcacttttgaatttttgtgtttgtgctaaagccaacggagaggaacgtgaacatgaacgcgcagtcaccggtggagatggacaatgatcctccatcaccgcgcgctccaagaccgctgaacaaatcactatctgcgttgcgatcgctagagaagcaaacaagcagagggaggaagtggccgccaccaacaccaccaccaacaccaggccgagactccgccggaacatttaacggtgatgatggagtcaacattcctgatacaattccgggatcacccctcactgatgctcgagctaagctgcgacgttctaactccagaactcagccagcggcatagtaacgcaaacgtacatatacgtgactcgacaaagaaacccttttcgtttgtttaaagatatatagggaaagaaaagtgaatgaaagttttgaattgaaacaaaacagatttttttttttttttcatgttttctgtaaattgaagcagtaagtattaatacagcgagaatatttgtgtttgttttcgtttaaacttcccgctttaatccggatattgatttgagtttggatttcttcatatagctgattataaagatgcatttgagtggtcaaaaatattataatcaaatagtgtaccaatgcagccgatgaagtacattctctgttaaacttacattagtttctcggtgctcctctacaacatcactctaggcgataaatgaatcataatctaatggtacattgtatggaacgcacctgccattggttcatacacgttctgtagttgctccctccttgtatatgattttagggagtgttgtgaggtaacacatttgggatcagaagttgagaagtgtgcttggtattcgatcatctcggggttgagtcaacagctgttggtgctatttcgcccattcctggtggtggagtactcacgtcggctattccataatcccaatcgataccagcttttgctagagttaaggattgcgtatttatatcttatgcagatagatatagttaactataagagagaaacaaattgcatatatgcaaaggatacagtcagttttccaaatatccgtcatgctaatctcagcatttgagagaagccagtagtccgactcatcattctgcaaaatacaagaccaatatcaaacaacaattatgagggtagattttgagtcaggttaattagtttctctgcacaacttcctatttctatgttcattataaaaataagcaggaagatggcttacttcaacatcagagggagtaatcttaagcattcctcctacttgctcttgcaaataattaagatcagaggtatcgccgggttgaggatgaggatgatcatgagacacaatagcagtttctgggttgtcaacagttaaggcttcgatgtcatggtgtcctgtagatcctgagctagaagcaataggcaagcatgctggtggtgctgcaccactcccatttgtgtcttcgaatttcccttcaaattcgctgaacatgaagacaaagtaaaagcatgtaaacgggacaatgaatgttccaaatcatagaaatctttgttttgatacgttcaattatatgtataccatcatcagtagagtatatgaagtcacggaaaatgccaataacaatgtttctattatttgaagccaacgcataaatacctgacgaggtatacgtcaataggtcccattgtacttctaagaatgatcctgtatctcctttgtgggtggtcagccgcctgtcaagtaaagaagaaacattataataacgttttggaatctaacaaagaatggcagatgtcatccaaggtcgctgaaaaagactaacttcatctggatcaggcacttccaaagttgtgccatgaggagctttgacggctatcagagtctggttctgcagaaacagcaaagagagagttaagatataagtgaacaagaaagtcttgggatcgacatacatacaatcaattgatcaaattcctaggattaaacatatgaaataggaaagacagacctggaaacctggtaaactcttgatatcctcttcagttacaaaaagccatctggacaatgtgaacggattggttaagtgtccatcatataaatagcaccatctcatagccagaacaaactagccatacgaaaagatagatagacagagatttatacttctgattcttttcattttcgctcaggtctcttaatctttcctctgtttgtctgaataaaagttgttaaagcgtcagcattggttaaatagattaatcacaataacccaaaactctttaaatgaatgcttacctgatttggttgtctaatgcttgctcttcgagggcgaggttttcaatttctgcctgcagctacaaaacaagaacattaatcaaaggaagcgagaactacatgatattttaagatttacatgcacaatgacttttgagtgtatgctgtttcactacacctgtaatacagatacgtcagcatcctcatcgccaggacacgcatcaactcccctaatcaagtttattgatcatcaagtgagtttacatgtagttaaatgctttcagtaatatcccaatgaagcaggatatgctttcagtacaaaatacataagcatactatatcataaaaatcctcacttccaaagtattcgattcttgaaaggcttttcaatgagatctatcccctccaaaacgtttgtaatatcatatatacgtcgtttctgcacctccaatgtttctgcagctttgtttaggtccagcattccatctttggcttgtttaattagattgacgaacttttttgtaaggagacctgaacagcttttatgtcagcatcttcatatacactataacatgtatcgaatattaaatatatatgtgaaaagttgttaattacctaaagaactgtcataacgacaacttcctgatggagtaagtgtgataggagaacctgcaagttgaccaggaaagtaatcagctcttcgacttacttgttactctagacatgaaagatatttcataaaaggatctaactatatagaaaggccaaaaggggtagagagtcaagaatacaattcttcttaccagcgtttgtcgagatgggtgtttgaggagttgacttgtttcctttggcctttgacttgatgttgactctgcccccttttctaggagtttgacagggactgctaggtatgttagtgaaaccagaactcgtgaatccattattagatggagcaacaaccatatccattgtcgcctttctctttcgtgactgcatataaacaagttgttattagcttaaagaagttggtcaaagaaatatcatccaaaaggttttaaagcatccacacacaaattatctatatcattcctcataaactttcacaacattgggatctacttgaaacattatacattaacaaacaatgtcaagcttcatacaccaatactttgatatcaataagctaatgctcaacactatgtgaacattcaacacctcacgcaacaatcagagccaatttggcatggcaattggagaaattgatgtctgatttgcgtcaattgggtgtaattgaaacgcagtgttatgagcaaaatgtaccatcgcgaagctaaacaaacgacaaaaattgacacgaatcgacgataatctaacgctgcgaagcttttgaatcagacttagaagcaacaagtagcaatcgaaatccccaaaacatcctcgaatttctaaaccaatctcactggggaaaatctctaaatcgaagaatcaaaagcacccaaaactcacaggagatctaacaacgacagcatcttcctcccgatctacaacaccacaaccatgaacgaagctcctgtcgttattattactgagcgaagaagggttaaatcgatggtaatcatcggaaggatgaaacggaggttttgttgaggcgaaagctaagtgacgacgtataggtggtataaccggcgtagatgtaaccggaaccggagatgacggtggatggtgcggcggcggcggtggcggctgagaagaaccgggagaagatcgtacgacaccggacatggatcgtagtgaagcgagagtcgaatttgaagattccgatgacgggaaaagcgacggcgagtgaaggaaacaagggttttagtgagagaaagaggaagaagaaaagaaaaggagagagcagaaaacgagggaaggagggaattttatgttgggatagatgtggagggaagcctatagcaataataaataaaatgttaaggaaataaatatatacttttttttctttctatttgtgccccgggattttgtatttagttttagattgaccctacttactttagggaaattactttttgtgccttttagtaacgggaatattgagattcttttctgttctttataatggtgaagaagaggagatcatgcatatatatttttgatctagaacttgttttttgaatctgaaatttttatttaaatgtgtgtagtcggtaaacagatttctgcaaatagattgggatagagtttgtttatagtacatgtgctgctgtttccgttatgatatgtgtaataatatttttatttttattttttatccttttgtattgattagtggttgttgtatcatgtatggcagtggaaaaactgatgcgaagtgtagattaagtctaaagtcacttgatgaaggattcataattcaattcagtatttggaggactataatattgcacatgattgatgtcattaattagtattaacgacaaatgagtgatagaaaatagttagaaagggtaaatagaaattggtaaagacctagattggcaaagttttcgtaccgcttttttcttgtcctgcgccgttagcttattacaggtcacaagaaaaatggttcacttagagagtgtgaggcattgttgtattgtagtaccttaagttcattcatgttcattacgagtgtaccccatttgagccgagagaatgtaaagtcgttatcaagttgaagcccaataaaaacggatttaaggcccaaaaaaagaaggagaacggaaacagagaatccgatcatagaccactggcatttcacgaaccatcaaagggactaaaagctctagaaccaattctccctgttaagacttaagaccaataactaaaccgttacgctaatcagttcacacattcatcatcttgcctccaattgtagaatcacaattctctgcaaatcgcaactctacacggtttctggacttacatacacttgatttctcgttcactaacaataactagaccgaaatacatcggaatcgtgaattgtaaatgaacattctttctcttatcaagatttaactcaccatccctgtgtgtgtctcaaaatgtaggcagaggctggtttcttcattcattgagttcttcatcatcattcattacaaaaatgtacctaaaaacaaagcaaaccccatcaattctcaccaattctccaactccattaaacaaaaaaacaacaacaaaaagcaagaaactctcactcacttgcttccatgttctcctagcacacaaaactctataaatcaagaatctttttgtacagtaacaaggcgagaggtcttcaatggcggagaagaatcacaacatacctccaatgtatctctaaaaccagcttcattagtcttcaacatcaccggcaatggaaacctcacacctttcgcagcacaagcttcatgtctcggtttaatccgattctccaaactaaacgagaaatactgaggaaactcaagaacctctctaacatctctccccatctccaccatcaaatacttcaacttcggctcataattctcagcaatactgtaattaaacagctgcgggaatctcttaaacatcgcggtggcgctccgccgcgagaatcctaacttctcgaagtaatcaatccgtggtacgagtttattgtcaacgctacaagagagaagatacgtatgtttatgcggatctaagattccgattctctggagaaagtaaagcgttggtctaagctggtgatcgacgctacaagcgagaagacgaggacgacgtcgtaaagcttgacggaggtcaaagatagagtcaacgccgacttcacggaggaggaaagtgatgactgggattgtgtgtgaggttaaaggtgaagtgagaagctctggacacattgagacgaggcggcgaaagtcttgtaaagtgaagtttattggtggagtggtcatgtaatcgacgactgattcaacggcggagagagcggtggagaggagaggtggatgacggttgattagggttaggaaatcgattccgagtgaatcgaggtaaatgagtttctcgtggattgaggattctagggtttcggtggttgttgttgttgttgtggtggaggagagagagggtatatctggggatttgaagaatgatgaagatgatgatgaagtgtttggtttgaaggaaagtgcgggaaaattgttgaagcggaggcgagaaagagagggaaaattgtggtgaagggaagggagagaggacgagaggaaagagagagcttcttgttgcattgttcaagagacatctcacattacatatgatgatgaagctctctctctgtgaagaaggtaagtgatgatgatgatgaaaggataagacttggaacagagttgtgatttttggagaaggagaaggggattaccatatcttgattgatccggtttaaattgggatttaaccggtttatttcaattgaaaacttgacaaaattgtaaaattgtcttcttcttttttttgtttaactttcttgccaagcccattgggcctcatattcttattttaagaatggaagtctcaatgcttggaaaatgattggttttttcttagcttataattagttgtcgatactttacggacttggttttgtgttatttttttatccattatgtaatcatgtggcttgtaagtaatttgattttggcaagttccattgttatataagctcaatacatggtatacaaaaatcaaaaatttgaaatggccaataaaaaacgagatttttaataataaaataaaagtagactaagatacaaatgaactatatctaaaacgagtcgccttccaaagtgaaagcatccgtggtattgtcccacaccattttggatacaaaatcgtcgtgttttggaacatactcctgcgattacaaattaatttaattatcctattttgggattcgttcatttagtctatagtattaaatagaataatcaaaaagtaatgaaaggcaaataaaaaaacctcaagaagttgaagtaattgaggagcgtttggagccgagacaatgatacggcgagcggtggaggagacgaagccttcgtccactgccttatctataaacgtcaatagtgaatcgtagaatccatccacgttcaatagtcccacctgcattttttaacttcgcattatgttatatacttaattcatattctcaggtttcgcatttttttgaccatgtattatgtatacaaagtcttcgtgtgtgtatattacatgttttaatctaatcttttttatatgcattaattagtgtacgatatgattttagagtagttttcacaaccttaactatgattctctttatttttttgatcttaggtaggagtgtttttttttgggacaaaatcttaggtaagagttaagacatttttttgttgttgttgttgtcaagaggtaagagttaagacattattccatgtgaatatagacttcaacccatgccacatgcccacatatatagccaacaaagaaatttgcttcttcttatttgtgtaagttcatcaggaaaatctctatttctccataaaatacatagtatatgacaacatctctattttttattttttttaatggtttgccgagataaccgtatttttactgactcgagtctcaacgtatgtgtactcataagtcatatctaaacgatatttttttttttggggttcaccaacgaatttaattaattaccggtttagtgtgaatcccaagctgagaccaggtgatgacttccaacaactcttcaaatgtcccatatccacctattttgtttgtccaataacaccaaacaaattaattttattaaccttcatgatcatatatagacatcttttttattctttacaaaatacatagattgaaaaagaataataaaaacaaacaaaccaggaagtgcgatgaaggcatccgcttggcgacccatttcagccttcctttggtgcatagtcgatactgttataacttctcctattgattcaccggttatctaaaccccacattcatcataattaaaatgtttcaattcacatatattttactgaatatatatttggacgatacagaataaactatacatttgttaagctcttcacactgctagttagaatgtatggtagatttgtaaatacctctcttggtgctagagacttcggaatgatcctgcgcataatatcaacatctaatgtaaataattatcacttataaatagtatatggaatcaataatttcgagtcatcttaatttgtaatggtcaaagattcttatcctttctttcgaaactaaagtctatgtttaagtagaactaaagacagctgccttgttccccttaggccttagattttggcaaagaaactaacaaattgaaaagcgagtccagagcattgtttcaaatattgattttccaagaaatatttgataaaagtattttatcttattcatttacaagtatatattttgaagcagtccaattgctatttatgataatgttactcatttgaaagacaggacaagaacatgggaagaacaaaaaaagaatgatgcattgtcgctttgaatgtatagataaattaacacctctagtttgtttattgtttaataatttttaataataaaaaatgtatagagatagatagatacccaagaacatgacgaccaccatcatgaacagcttgagaaatgagacccattagccccacgcttcctcctccatacaccaaatcgatgtttctctccacctttcacatttatgtgtgttactagtgaccaaacaagtacagtttatttttatttctgctaaataacaagtacaatttattctatagacttttattatatacatgttaaattgttaattagaggagttcattgatttattcatattatttatcacaacattaagcatggtgggcttctgttacattgagaaagtaaattactaaatttcaaccttaatagatatgatatgatatgatacttaattatacatatatgctcgttattactatggacatacgttttatgtatatatgagctgtatatatagttcctacttctatacatatcacacaaaaaccttgtatagcccttttttagctaatggtgaaatgcattgcaaaaaacatagaaaagacttagcatataatactaaatactagtaaaccgaaatctgctaacataatagtgcactaattttaattagttagttatttaaataaggactaaatgtggaaataaagagaaaccagttggtgggcgagttggagagcagcgtcgtgataagtggttttgttgccggaactgcttccgcagaagacacagatcctcctgaatcttgattttgtctcttccattatctctctctctttctgtctttttccttcttttctttcttttttggttctgtcactttctcaactttttatttatatatagatagatatgggaagtgaagaagaagtatacaaattaaaaaaaaaaatgtatacagatttgtttggctacacaatccaggtaaggctggctatggctatatataaatttgcattagtttacctttataattggatcccgtagattgtgacagcttttttctttacaatctatgttagaatatatatatatatactaaattcaaacaaaaaaaataaaattaattaagaatatagtaaattactttaaccaacgaacataataaagatttcttagttaaaagatgatatttggtttaatgtttttatattataatttgacaaaaaaaaagttttaaaattctactttgctaacagagaactcttgatggatattaatattttccatgggaatgacattttttttatttcttgatggatattaatattttccaaatctatacataactccatataacaattgctctacagatactattttaaaaaagaaaatttataactatatattataacagcaaatatgtatgttttaaaatgaatttttgttaatttttattttggtatataaatgtgagtatttatttttcttttttgttaatatatatcaaactgtttttgaaaaattgttgtgcatatcacttttacaaagatgaggacacacgatgacaacataagcatcggacagaaaataagtataatcaacttgcttcagtacgctagatttagcagaagcagaaaataccataaccaaatagtactgaggaaggttttttttcgttttgagaggttctagtttggtccatgcccttgcgagtttctttgaaaaagtttgctggatgttgcgaatgcgaaatataaccaaaactagtttggattttctgttggtatttttccacaaaatataaatattgagaaataaaatgaaattcatatgtcgcaacttaatctcttaagaacactatattttagtcgatcgagtccttttttatgtagtggaaaaagatctatacaaatcccacgggtaaattacgtttaaaacatatatcaaaggttacattaaaaaattaggttcaacatgtccacaagcaagttcaatatccaaaaagatcataatcattctcctataaccttaactcaatctatttttttaatttataataattaattatacgattagaattgtgacattgatattgcaatttgactatgaccagactcaccagacaataatcgacaagtgtccacctcacagattcgattctgttaattctttcttatgatcctttaattaaatgtatgaagaactaaaccatatctttgattgaagaattggtcactatgcgtatcagatatgttacatcttattagtcaccaaatctctagaatcttttgctttcatacctgtagctaaaatatcaatggcaatgacaattaattaagcttacaactggatcgtgttaaaaaaaaaaacatagaagctcgcaattggattccctctaaactatcgtaagtttttgacatgataaagcttaccgttaacttctcaagagtagtttttgattgatttccgaaaactgagcagaggatatggactttgcgtttggaaacttctttctagcttcatccgattcttcagtctagtaacaaagttagttagaagatgattgtaactgtatagtatctctgtttctcaactttacttgaaacccacggcttactacaattgttgacgaactggagctaaatttcttggacaagagcttgatgactttggtgaagcaacatggctaagattttgtgcacagataagtttcctaaacgtacttaaaaccgaattagtagcttcagtttctttaggcgagataactcttccttgacagtataagaaaaaccattagcagtttattccaacatggctttagccaacttccatagaaagaatatttttatacaaatcagcagctcttgaagtgtactcaacttcggttttgctgctgaagaccaccttagagcggttgttgccaccaaaaatcatcgtcctgatctgcttagggctccatgcttcgaggacaatgatataactacgaagacagaacttatacctatcctgttcttagaaagaatcgaagctgaattggaaaacgattttttgagttaagattctacatatattcttgatacatttcccttttcagatgattataatctatttatctatttctcgctgtgtatattcctttatcaaaattaaaagaagaaaaatgaattagaagtggatggaacttactcgcaaaagtatctatttttttttaattctactatcattattaccaaacatttttaattgcaaatactatttatcttattttcttaaaactattttccaaacactcataaaaaatttaatatgtaaattttatattttaataaaattaaattatataagatttatccgctgattcttacttagttgatctttatgataaccattaaaagatgtgggatgtggatgttctaaatatcaattacataaaagactgttttatttatatatatggacaaatgtatccaataggctctttagaagataagtcgtagggatgcaattagaaaacaaaactaaaataaacgaaccaatatatgatggaatgggacaggataaaattctaagactcagaagtcgaagtcgcacttgatcgggaaaacagtggaggtagttgtagttccgtttgaggtacttaaaggaagccttagatcatcgcaatcaaccttaggcttaatcctcctaaacttcaagtccccaagcttaaacctaaccctaagcctgaacttgatctctatattgtatacaccggatatcctctccgcgtttaaagtcctagactgtccggcgttaaaaataacaaggttttggccttggaacgttggtgtgagaacggttgtgtttttgtgtccttgatagaaaggagttaacgtgatggtactaaaccgctttccctcgtagtaggcatgagcttcgatcctatcgtagtagagtccgatcctcttgtttgggttacggacaggaacagtgagggctaggttataccttaaaatgttgtccggggaagtgtggtcaaagcgggtaagggacgcatcggtcacgtgaaacttgatggcacgaggtcggacgatgagccagaagatgagagcggctacgccgaggatgacaataagggatatgattactttgacgaataagctgaggaggcagcagccacagccacgaccgtgcccacgtcggtagtagcctttgggagctggtggtgggactgatggaccgtagaaggcgccattgagaggttgttcagcagccatgatagtaattttgtggagaattatattggaatgaatggatatatggctaagaggtttatgtaagtcatctttatatacactttcatttatgcgttggtcaacttattagattaaggtaaggtcacgttacgcggtgatttgattgaataattgaccaaagaatattatgcaattgtaggcttgtgatgttgccccaaacttccaataatgagtactttttgtaagatcgtatatgttaatattactttttggtctctcgtcgtacgttggtttctcgttataccgttctagaacctagggccgcctgtgtcagaccaactccaacgggagtttctcataaaatctctcaccaataaaataagaaaagaaatgtccaaaggaggagagaggtaagggaaagtttctctttagagaaaccaagagaaacttatcgacaacgtttctcacagttgtcattcaatcattggtttaattaaaatacttttcaattaaatattaataatatttgtgttcacacttttatttatgtttacacatatattgagaaacggaagttgagaaattaccgttgctgatgctctcaacataattatgtctggttttttaaaatttattaaatttgaaggtttacgtaaatataaatttgaagaatttatctttcttttttaggcctgcggccatgttggggtttttaaccttgtaatcctctttattttaatttaagtggaaatttaaagttaaaaaaataaataaaaaagattgaagaatgttttacaagaaaattctgtatcggtttttatttggcaagttcttttaacatgaatttatcatattaaattttttgattttatgtatgttatatgatcagcagaaaaaggtagaaaattaaacgatatagaagcaaaaacattatccgagtagaagaaaaatgaaaagaagaagaaagagtaaaagcaaacattgacggcgtcaaagttgtgtccttttacctcctaaaaattgacactgcacttattgatcaacgtgtacttaacggtgttttcgccgacatgaactccggctgctttatcagcctggtttatgaacgcctgacaacgaacatggagatgataattccctatagtaagagtcccgaccttccacctcacgcgtccatcaacgcatatagtcaacgtgaaaaccccactattctgctcgtccccgagagccacggcgttgaaaggagcgatagggacttggtttccatataataaaggagaccaaacgctattttctttgtgtctttggtacgtcggaggaaggtcgctagctagagtgatttgctggttccggtaagaagcgtaggcgtgaagatggtcgtagtagattccgatgttggagtttcggttgcgtgaagcgattgttatctgaaactttgaggtgaggaggttaggctgcgagaggttaaaggcgtagacggtggtgtcttggaggatgaattctggttttttcggttggaggattatcgaaacgaggaagattgtcatcaagacgatgatgatgaagccgatgattgctccacagattctacaggcggttccgcctcctccaccgccaccaccgtggtttccgcactctttggtcgtcattggtattatgttagtacggctttgtgttgggatttctctgtttctatgattgaactctaacacaagcaacctaatttatagagttatcattctaacacaaaaatagtaacttgctaattcacattgtgacaatttccccttttccttgtttgccttgccttttcttcatgattttctttttggtcaatcctcttggttgcttgattttcttcttttcttgaatttcctttttcttgattaggaaacaaatctatttcaacactttgccattatgcttcgttgtgtgatggatggagaagatgtatgagtgatggagagagtgaaactatgattagtatttatactgatgattataagtgatacagttttgtgcctttgtccgcctttttatttcaaaattacacttagctagttagctaggcggtagaaaaaattgaatcagtactttacaaaaaagtgattttctaatgttcatctgagaaaatgacttccatctgttggaattaacgattgtttttatgttttttgcgacaacgcttattgcagatttcatcaagattttgtctgaagggatagtattagtgggcagctcaagtatgtcgaggacgttgctcaaactcaaatgctaaaaactaaaaaggtcacataggaagttaggagtgtcattgatggatgaatttgtgacttgtgagctttattttgtatatctaatccattgtgggccgcggaatttaagcccatattaaacgtatctagttattctcgattcacatgtgatccttactttaaaaatgtgccgacctcccaggatcattaaatgacaaccgatattaaaacattataagaaaagaaaacatagaacatctataaagctattttaattgtcccctccaataatatatagtattttattttcgaatccgatattactttaaaagttgaaacctctcctccaatcattttcctcctcacattctacttttgaattaatttcttataatttcagaactacgtcaactaacaaacatatatattccaggaatttatatgacatgtagttatagcagattcaaacaaaaaattataatttacgagaagatcaacaggaaaaaaaacgtagacaaattaaacgatattgaagcaaaaacattatccaagtagaagaaaaatgaaaagaagaagaatgcaaacattgacggcgtcaaagttgtgtcattttacctactaaacattgacactgcacttattgatcaacatgtacttgacggcgttttcgccgacatgaactccggcggctttatcagccagatttatgaacgcctgacaacgaacatggagatgatacttccctgtaataagagtcccgaccttccacctcacgcgtccatcggcgcgtataatcaacgtgacaaacccacgattctgctcgtcgccgagagccacggcgttgaaaggagcgatagggacggagtttccataaacgaaaggagaccaaacgttgtcttctttatggccttggtacgtcggaggaattgctgtacgtagagtgatttgttggttccggtaagtagcgtagacgtgaagacggtcgtagtagattccgattcttgagtttcggttacgtgaagcgatcgtgatctgaaagtttgaggtgaggaggttaggctgcgagagattaaaggcgtagacggtggcgtcttggaggatgaatcttggttttgtcggttggaggattatccaaacgaggaatattgttatcaagacgatgatgatgaagccgatgattactccgcagattcgactggcggttcctcctcctccgccgccgccgtggtttccgcaatctttggtcgtcattggtattatgtatttacgggtttgccactatgcttcgttgtgtaatggatggagaagatgtatgtgtgatggagaaagtgagagtgagactatgattagtatttatattgataattagaagtggtatagttttgtgcctttgtccacctttttatttctaaattacagttagcttaggcgtaagaaaataatgaatcaatacttcacaaatatgtgattttctaatttgattgttgatcaatttctaatttgatagtttgcattcaaaaagttacatggagaaagtaaatgtatacggatgaatgagtttttaacttttcactcaattatgtaacaaatgtagcatacattatgtatggatatgatttgtaggggaaacaaaggagtggacataaatcagtattcttaaagtttatgctatttaacatctagtgtggtttgctcaaaaaaaaaaaaaaaaaaaaaaatctagtgtggcttcatctaccctaccatttttgttaatatggtgcaagattcccccataattgtatcaccttgtaattgataaagagaaaacgaattttagattagagacgttcgttgattttcatttcgactaaatgacttgtctttgtatcttactttagagttaggaatattaaaattttaacttaaaaaagattagcacattttcaatatttagtattggtgggtccataatcagcattggacgtacgtctacgctcaaaacgatattataatgtccaaacgataatcgcttacataggttgcacttgtatgattgatagatattcaaacattttctcatatttggctcttaaaacaacagtattaaatgtatattaatatgtatttttaaatcaatctcttagaatgtaatttatagtccatggtcaaggaaatttgttttgtgaccatgaaaatagaaaagaaaatcaactccaattcttttggatataggaacatatatggcccaataggaacagagatgtgatttttggatttagcccaccaccataatatgatgctagattgctagtatgggaattttggatttagcccaccattataggataacaacaatactgaaacttaagtacaattcggaaattgagataagagacaagctgtttgaccaaaaaactagttcatactaaaaaggtatctagaccttgaaatcaagcttaatccacttggtcatcttcaaactttgtccctaattattatttacctcctagttaatacttaatacccaaaagatctaataattagtaactacttgaacttgttccatcagaaagtccagtccttggagaaatccatgtctgaaggcaaatgataatgacactcctctttctgttgctgctcctgcgttgtagaagtcatcactcctcttttttctttggtcataaactccttctcactttgattccgattcctttgatctgctttcgacaagtaaacaaaaaaaggtcagattttttttccattttgtgtactaacctaaaacatgcaaagagctagtctcagtaactaaagagaatttcaagagaagaaaacaaaaccaaaccaaaccttattttaaacataaaagaaggttttggaagaagacaagtgaagtagcttactatgcttcttcacagggtcaaaagtcttgaaagttggacgctgaagagggtgaaaaacgccggttcctacagattccttcaaaacgttaccgtttcggtgaaccaaacctctcttctgtagccgtgcctcttgtctctgtaaaaccttagctctatcttgctgtgactgcaatcaccaactcaaaataaaaaacatcaaacggtgcataaaggagagacaaaagagagtagtaagaaaagtttgcattttgactacctctttgcggatccttgaaagatgaagttcataaaaaggttcaagcttgagcctttctcggtacaatctctgataagctttaacaccattaggccttaaagaagactgcataagacacaccaaaacaaaaacatgaaacttgtgaagaaaatgtgaaaacagagtaatgaaacagaggaaaaaaggaaatgacctggagactcgaaggcaaagtaggaaccagtctgggtttaggatggagaagagacatcgaagagaactgttcagagagtgtatccacaacgtcggaaacgtacagatgatcacggtggttacggctgagcaagttgaatcttccggcagacgtttcgaactcgttgaggaacagatgagaacgagaacgaaaccccatttcttccaaatccacacggaactgatgattcctcgccatggaaatcgagagattgaaccactttctttgagagtaagcaaaaacaaacacaaaaagcagagcttttaaagtgggtttgacgttacagatgttcatgaaacattagagaaagacaaacatatccattttttattattaattttttcagttatgaagcgagttgtgtctgcgaatgtcacgtgatacactatcccactcgcccattatctccatcgtaagagtgaaattggcgcgtgtgatgagacgctcttagtggtggagtgtttatcgttactgcaaccgccgcagggacgtagccaccaattattatgcctacacgtgtcagaaactattacctattagtgttagttatattgtgttcgcttgtgtatgtttcttttcgtgcatctttttcgactcttgatcagcaagtaaaatgacaaaatagaaatattgtttcttacaaataaatttaattttggatccaaaatgggctttaggtggagacgctttgtggatgacaatggtacatggattagctttgttttatgggctttagatgtccaaccttatctttattatttcaagtcgttgccttccattccatctatatttctattcaaattgggaaataaaatttctaagaagaaagattttctgaaatggttgttgtttgggaaaaaaaactgaggaactttgtgcacgaaaacatgtcaaagtatagaaacaaaatatcagaactactcgtttcaatatttttgtaaattatataatattatatacaaaacaatacaaatgggtttactttagactttttagacctaagaaaaaatcatcggccttgttgtttcttttatttatttttaaaaataaaaagctcagttcaagtttagcccaataaagcccagtacacacattccatctgagtttgcttttatcatgaaatgtgagctagatgatatccagatcggtatattggtaatggggctggacaaaaacatgtgtacactttttcttctttctatatactgattgtttcacctaaaagatacgactggataacttaacatgtcaatataacggtatatacaaaggaaaacaacgaagtcttatgtcaaagagcaaaattctcttttggcagagcaaacttccaagcaaaattcttttttggtacaatacattagaatttatgattcgtacgacatgtaaacttttctctggaactgacttaaaagaaatttgactttttacagatttatgaatattggaagcacaagttacatcaatgtgaatacaactttagttttcatatatagtttattttagtacatgctactcactttattatgacacatgttgttttctatgaaccttaatcccaatcaattgaaaagatagaagaaagaggataagtttgtttcttccaacaaatatgattggcattgcattttattttaatgtgaatttatacacaaaaatttgtaaaaatgaaaataaaataaataagaagagacatgtaggataccacactatggtgtagtaatgtgaaagttggaatctcataattgaacaagaataattaaaaaaaaaaagcttacaacttgctcttgaaaaaagttattgctaaggccccatatccctactattccccattcatgttttcatttttctagttttcttactttaaatttattttaattatttctatgtgaaagaacattatcatataattcttttgttacacaagtttggaactactcatatataatatattttttgttatgatacgatggttagatcacgcctagatcctctttagtcttcaaagataaatttggtaaactccatatattcctcatgggatcgaacaattgcttcctaaatggattcttctttatcgttattatatttatcttacctaaagatatagtagaaccgatcttaagtatactgagaataatctcagcctcaggattacacataaaatatctaaacaggttggttctatatgttttatattttgtttaaaaagattaatttttaggagttccaaatgtaaaatgcaggaactctaaatacataggatggactctatttaaaagtaatttcactgcttcaatatagtccactattaagaatacgcgtgaaaaacaccatgagtactatactttttttttattttacgaaatctatgtattagaaatatcagataagttgtcttttgctcattagatattatttattgagttctctccttctaatcatatggaaaagttcattttcaatatttcatagctttatgaattttaagtattattttttgtgttgtgcttgacaaaatgaaacacaacaaaagattgacatgagttgtgtataacaatgattctgatagtgaagtgaatatttcatattttatatgcagacactgacacacatgcattgatacaactatatacacatgcagtttatacgcacatatatatacacccataagtatatatatatatatacggctttattattagggtcccaaacttcctttgatctctatagaaccagattcgatgcttcatatatatatgtgtgtttttactaaaatttgccgactaagattctaatataagaccatagacaaacaagaacgatctaacttctttttaccaaatgtatgtaggtatgtgaatctttctctctctctctgaatcttgtgattatatcatcatatataactaatatctatgaaatattgaagacttaataaaccttagtagttattcatacaattttattttaaatatgcatgttttgttttcaaataacaacccgtttcttctcccaaaatttttgaacatatatcagcatacatacgcatcataacaaactttaatatcggcaaactagactttggcaattattgtggtgtagcctttttgagtattgacctatttattgaatggccagtggtagccttgtctttcatccaaatttctgtttcttaaaattcagtgttgtacctatgaaactatatatatatatatatatatttaaacatggaactttcgcaaggtcgcaagcatatcttcaactacaatatttgaaagtgcatgagagtatgggacaagaataaaaaaacattagttttattagcttatacataataaatcaatatcatatatataactataaaccgacttctcatatataggagctttttgatgtaaccggtaccaaagagtcgattcgaatacaaaaaattatacacaacaacaacaacaacaaaaactatatattccaggaaacttgcaccgagtaattcggtacgatatagctcgacctccatagtgtcctagtaagtgccaaacttaatttaccgaagtattttgagaaatagttttagtgtcgtcatctcaaggactattttgaaaaaaaaaaaaaaaaaagacatttacttatgactttggtatagaacggctatgtttttttcttgttgggttttcagaatagggttggatatccaattatccatgcgctcaactttttttgttcctaacactgttgttcttcattttcgacatctccaaagaatcattatttcacagtcactttcaaatagcctaggcagtttctttttctttaactttcatacattaccccaatgcgggtaggcctcgtaataccgatcggattgcattaaaatggaagtcaataatcaaaagtcaggctttgcccaccctttgaccgcacaattatacaaatgtgatcatatctctttgtttctttttttacttttgaaccaaagcgtctttaccatatatagccgccgaaataataaccactgcttcttcataattaacccttccactttgtgacaagatataagttgatagagatgatcatatatatataggtgtaggacatagtcacaaagtattgcttttttaacagctagaaatttatcctcgatacgctaggttttaaagtataaatgatcacttttgtctaattttttttttcattagaactgtagctcttaaattttatatataaatttttagtttggtcatttttaagtctaaaaattatacaataaatttcataatggacatagactatttgaacttactctaaaatttctacgcctttacattttttaggcatgcgaattcacaatctactgaacttactctaataatatcgaagctctaacaaaacaaattggaagatctcacgacctaaaatatctaaccactcttgttggttttatattattaaaaaacatactattataaaaaaaaattatggttcgcggatagacctaccagcatattaaatcctttaatgctaaatctaataaatctggagaggtagccacttgctcgtacaccctcaaagctcctcccatctctatgattggggttttcacaacattatatcaccatggttcatgtgaccttgacgtgtctcattctcattggccacctgttgacagcaaatttggattgttcctgtaatgttttaatagtccactgcctctttggtcgggttatgggcttcttctaattttgcatgtttttggtatacacacgtattatgttgttaggcacacttttgtgaaaagtctttttacaatcttttaaaaaacttatcttcatcattattaatgcagattaaattaaaaaaaaaacttcgtgcgtcgtcgtgatatgcacacgcgagtgagataagcaagcttattgttttttttttggttgttgtcatggcactgtgatgtcacagtgagcactctatgtttttttgtcctctttaaaacaacgtaggtcttacgtcacgcgccacttccctctcctaacacggcaacttttagaaataatattccacgcgctcgtgtcggatcaaatctcagccatccgatcaaaaaccaaaacccaaacgaacggtgcatatcaagggtagaaacgtagttgtaatggagatgggtccaggtgatcttggaaccattggttaagaaaaaatgcgggacaacgtcgagtggtactaagaattgacacgtgtatataaaaaccaaaccgacaatgacaaaaagtcggagatacacgcatatctatcttggcattaaaggaccaaaaactgattgcctaatcaatgttattattatttagaactaattaacgtgactaattaattgatttgtttctaatgaatttttttgtgaagatggagaaaaaggataatacggtgggggatatataattggagttgctggagtaaatggagaaaaataaatgtataaaggcgagagagagagagagagagagagtcgtggaaaattgtaacaattataggattggctgctttcttgacttatgggggacacgtgggacctcgctatttgtggactacacggcccctataaagacgagtttttttttttggttgattggaatgtggggttcacagctcgaagacgaatcttcttcgttttaaaaaaaacacaattaagaaaaaaaaagttttttggaaatattagggcagagaaagagccaacacgagtggggactgtaacactgtacacgcgtcaactccacagtttcttttctttttcttcattagagagagtttttttcttgagtttggcacgtgggaacaatacacgaatgggggcggagtaaataaaataaaatattcggtgcaaacttgttatttttaaaatcgataagagaaaatgtgttatcgatggttatgtggttgttataaatctgttaggttttttatttcataagtactacttttgtgtgatgaaattttgaatgttctccaaggaaattaaatgagctgcgaaagtcttgctgatcatactatttcaactccacttaaacgataaatatagctttataagagagactgcataacttacacaaactaaaaaacgacaaaaagaagctcaatttatcccattaaccaaacaaatgactcaagttaatgttagcttgaccgattagagctaacattaagcagcattaacatttcttaatggagtgcaatttgactaacgccttatataattgtaacatagtttaacacttgatttagaaaaagtttaggttaataagaacatgagataagttggagttatttttgtctaattcatttaagttggttttatttcaaaaactatttattagaaggatatcatttttttattagtgcacatgaattattatccaaaaagtatatatcgaactacattaaaataggttaaacaacaaattataatggtttaaatacttttttatacaattattcgattaaacctctaaatgttttttaactagatcaatatcatatcaaccaacgtttatcgacattttcattgtaatcaaatttcaacagttttaatttattattagcggcaaaattttctcatttaataaaaaactataacatagtagtttattcttaaatattaatataaagcacataaaaagaaaaccaagagtgcaattattgtttatttaggtatcattaaaaggtcatttacttgattgatataacacattatctatttaacaaccccatcaaaccaaagtcttaaagtgtgacaattaggttaaactgactcgtctaattaaaattcaaaatcaaatcaactttttggtcacttaattaattggttgtattaagaaaaattaaaatttaattttcagattaaattgtggtttagcataaatcagacgatagtactcctatgtggtgagttaattccccatggatcttcgaatggttggatttattcttgatggtttttctcacatttgtaaaagttactttaaatatcacgtactaacagtctaattaaaagttacttagtatcacgtactaacagtctaacatataggctccgaatagtgactacgttttgcggtacgggagaagtgcggtgcggttcaaatagtaatgaaaatacatagatacatatgtatatatagagattttgatactgttacaacactgttgcgatgcggttttgggtgcggttttagttaccattcacagccataaacatcatacgttcacatatctggatgactggatgtgactatacagttatgcagtactttgagagacaactaaatataacactataatgacaagtacataaactgaataatttattggagatgatcaatgattaaaacaatgactaattactgtcacacaatcagactaaaatactaaatcatagtcagacacagcaacaacaacaacaaaactgacacacagatccgtcattgtttcgagaccataattaaacaacaataaaagtatatcttttaattagttgcatattttttcctatgatttaaaatgttaagaccgattgtttcgcacagttttgaagaattatagatattggtttattttttgtacgtatctctgtcttcttcggattagtttgataacctcgggttttaatttataaaagtgttgttgacaacacaaaagctaatagaatattactggtcatatatatcactaaactatagttaacttgctaacgtatatatggatgaatatgatagtgcgtttagtagtcaaatgcatatgaagcgtgagtcttagtgattggaataaaaccatccttttcgttaaaaaggttgtacagctttagtttgggaaataagcatttcctttcacagaggatgagctttcacttgcggtacaatttttctgattcgcctacaaaatttaaaggataaaacttatataaaaaaacaaaagatttcgtaaattgttgatcaaaaggaaaagctacatatgcgtagtttttttgtgtggcaatagtctctgtaatgtattaccttggtcttatttattttggtatagttggtaataaaagaaacttttcgcaaatggccaagttttgaaaattattttgacaatttctctttgaccgcaaagataatccgttgcaaacattttcaaattctattcattcatcaagtacttttcgcaaatggctagttatggatttaggcacaagattttaactgtttaattgctggtatcaacgtaaaattctagttgaatatacactcttcaaaacttggcgcaattcgtttatatatacttgtctcaatatgcgacatattatatttagctaattgatttggtggctaagagacgcatcgttattgtatcacaattgatcgcaaatttggattaagaaaaagacgtcttagttagtgatagatggtctgtggttaattctcacaacctgtgagtccgtgacaaagagataattatagcactatagtggcaaaagtaacaacaagacatcactatattctctcataaagtttttgcaaatgacgacaaataaacagtgaaaacaagaaattttgcaataatagttttgagttaattagttaaacttagaagagagtggaaaatattgaaattaagtaaatgaaaatgaagccaattattttcttaaaatttatatttaaaattatatatatttggcattaatgtgaatggatttaccaagtaattatatagatataaactcattttgttcagttacattattggcccataaaaagtaaatattcatatatgacaaatatggttaacataaaaaaatttctaatgttgaactctagtgcttaaagaatccatagaagtggcaatgccatttgcgcttgtaaattttggtaatttttaattctgttttgtttaattttttaacaaatttattatgatgaaaaaaaacaaatttattatgatgatgcaaaagaaaaagaaaaaaaactcagggagtgaagcgttcaatattactacatatatatcttgcatgcttacattcattcaaactgcatggttccagcctccagccgatgacaacaagtaaagaaaattaattaatagattggtgagatatgtataaattatacataatgaccagaagttgaattgaatagagatgagtaacacacttcatttagatagacactttgtgcactgagtcactgacgaataatttatacttatttgaaacgttaaaatggtagggacataattttaagtataaatctatgaaaacaaatgctcgtatagaattgacagctaattttccaccctttttttgcttttactttggtttccatatgatcagacaacaaaataataatttgtacttataatttgacaatgagaacatagttattaattaatgtagaatatagcataactggaaaagattagccaattaatgattgttttggggagtaaatgtatgaaaactcacacatacaaaaaaaaaactcagaaatttcacacagaaaaaaacatgaaatgttcgactagttgttctaataacatattgtaaactgatgaaattgttgaaactatgaaaactcagaaaatacagatttagaagatttttgttgactaatttgtttgatttcttcctctaaaatagttttcttcattatttttgaacaaaaaataacacaagttgatggcgaatattacaaattcgtatgacataaagaaagaaaaaacagtacttagtcaaaggcatataacatgccaaacccgatcgcaatgagaagacaatccagattaatttatattggagtaaaactaattatgcgtaaatgggcttattttaggagtatttaatacacacccgacgaatagtaatgaccactataacaccgtgaatattggcttattgatgataaaatttaaaccaagccacattacgtatgttatgtaacaactgcacgctcaaaatctagctagtttggtgtctaacctgggaaagtgggtcaaaacactcgtacgcataaccaaagtaacggtctctacaaactgcattcgtttaaccaagactagaagctcgacaactgaaatccatcaaagatttcactccaatgagaaaaacataagaaacaagttttttatataaaagcattattttgcacattatgtttgggattttttaattccatttttaggatatagtatttataatgactaaaaatgacaaatgacaaatatttgaaacaaactacaaagaaattaacgttttcctacgtccaaaatcgtaggaaacatggtttttctctcatttttctacgaaaataatttataggaaattttccataaaaaatcaatactgataggaatttggtaatcaccacatgtatatttactcacgcaacaaataaaattataataaatactatttacatcttattagaatttaaaaaaacacgcatcaataaatgtattacaattttttctgagtgttgttgtttgaaatttagtgagactattaaacatgaggccaaccctacaattgttttgatcaacaataagatatgtataaatatgaacatactagtttcaaaaatgcttttgaaaaataacaagataccagtttttatgcgctatggatgatttattttacataactggtagtttgtttatgtggacggtaaacgattcaaaaagataagcaaatttgtccacatatgtttttgttgttctacatacaaattataattatctatatcgtataaataaaataaatacaagttactaaaaaagactttctcatgaacttaaacactctttgcaattaatcaactaaaattatctactatatttctaattatattttaaataaaatacttttagtcaaataccctttaaaaatagacatacgtggtaaactaaaagaatatatgaaataaagaaataaaagtaaatatacatttaacgggacccactctttccccatcatgcttcattatcattatcgttatcatcttctttcttcctctctcctctctttctcaataatttagatttttgtgtgattaaatattttaggtttctgcagaaggagacgtttcctcgtttttgtgctgtttggatcttctgacacaattcacttttccgtataagttttcaatttctctaatcccattatgtatatttaaaatattatactcttaacctatttgagtgtttggaagaaaaatataaactaacggtaggactttcaaaaatgaaatctattcattttctagaataaagtgttgatgcgttttaagtttttatgtgtatgtggtaatataaaactttgtaaataaagtatcttagttaatctgctgaggaaaataatgaaatgaaattaaagaaaaaaacagttgaaaaaagaaaaaatgaaaagaacttggtaacgtaaacattactaattttattacttataaatcataatcagttcaaagttcgttgccatcctcagtgtacactctgaacttgctagatgataaaagtctgcaagaatagtaatccgaagaatactttatgttcaggattgtagttatatcaataaagaaagatttggattgagatgcgtgtgggatttctttttattaaataaatacaaatataatgttttaaaagaaaatgatatgattctaaattggacacgacatacatatcactatgtcttgatgtgataacatttacttcatctatgaaattatatcgtctataaataactaaataaagggtgtttggttgttatgatatgtgggttcattacctggtcaatacatgaaaaggccaaagtcatatcatacaagttcctctgtttttcaagtataccaattctaaatttataataagatacgtatcacatatatattaccaaataatgtatacatatgtctatgaagttgaaatatttcgaatttaatattatctcttgtactggatgtcaaactagaatttcaacaacaaacaattatatgcacattttctcacttagttttatgaattttagctccctatgatatatatgtactttgtaacttatttatcaccatgctatatagtgataataacatgaagtaaaggttttttgaacatgcagtatgaaagaatgctatgtctttttcttaatttattcattaatctttttctatttaaaaaaactgttgaaccaattgctctagagtacactaatttaaatgattacataaagctatatctaagtgtagagtttaatatcaattttgaaaacaaattccaacatggttggaatgtctatttagcatattaaattaaaaagataagtaatattagctggtggtgaacgtaaacacacacacacacacaaattgttttgcggatacaagtatatatcaatatatgaatgtaaaattaagttacattagtgaatatttcatgtcctaaacattggttattgtcccatttaacaaaaaatccactttggttataagatataccgaccacaacactaaaataaaataaaatagaaagaaagtgatgaaaaatggtggcgtactaaggactgtgggaagattaatgagtgaaggaaaagatgggtatcttttatctctcctttctttatcctctctctctttcaatatatattagtcatttttattttgttatatattatttctcagctttttaaatgtattttatatttcccctttgagcaagaaaagagttgcagagatctttgagtctgacacagagaccaaactcacatagcaatcacacacatctccacaaacacaggtatgcatataaatatatatatataagtgtatattcgtgtgtatgtgtgtgtgtctgtctctctctctttctctttgatagaaattctctaatgtaactttccttttgcagcttgagatgatcatgaaacacgtgcatcctcagatctctatcaatccaggttcttcatcttttataatattcattttttctttcaatttctaactctattattttattattttattttcaatcatgattatgtcttaatttccatatccttcaatctctctttctcataatccataattcatcccttcttcttcgtcttcttgatgtgatcacgattctttttttcttcgcttcaactgtatatatatacagatctatattaaacttatagtggttttgtttttgctcctttttcatacttttgtttgtttttctatgatatcaatcagcttggtgaaagaaggtcaagaattgaaagagaatcaaagaaaacgacgtcgtttcattcgtgtgtaacaactactaattatacatagatggctgcttactttcacggaaacccaccggagatctctgccggatccgacggtggtcttcaaacgttgatcctcatgaatccaactacttacgttcagtacacccaacaagacaacgactcgaacaacaacaacaacagcaacaatagcaacaacaacaacacaaacacaaacacaaacaacaacaacagtagtttcgttttcctcgattcccacgcgccgcagccaaacgcgagccagcagttcgtcggaataccactctcaggtcacgaagctgcttccattacagccgccgacaacatctccgtacttcacggttatcctccgcgcgtgcagtacagtctctacggtagccaccaagtggatcccactcaccagcaagccgcgtgtgagacgccacgcgcgcagcaaggcctctctttaaccctctcgtctcaacagcagcagcaacagcaacatcatcaacaacaccagcctattcacgtcggattcgggtccggacatggagaagatatccgggtcgggtctggctctacaggatcgggggtaacaaacggtatagctaatcttgttagctccaagtacttgaaggcagcacaagagcttcttgacgaagtagtcaacgctgattccgatgacatgaacgctaaatcccaactattctcatcgaaaaagggtagttgcggaaatgataaacctgtcggagaatcatcggccggcgctggaggagaaggttccggtggcggagcagaagcagccgggaaacgtccggtggagctaggcacggcagagagacaagaaatacagatgaagaaagcaaaacttagtaacatgcttcatgaggtaacaacaatacgtattatatacaataagcctacatatactgagtgctctcttatatcacacatgaagtggacttaaaagttctgtccctaagattttcagtcattttcacaattcattttatatgtatattaagctatccttttttttttttgctcttccgatttctcaaattgacaacttacaagattgatgaaatctttttttttttgtccctctcttagtaaagactaacaacttttatagattatatttatgtagaccgtacacttatgttcataagactcacgttactttgttggttgaaaaatgaaaaggtggagcagagatatagacagtaccaccagcagatgcagatggtgatctcttcgttcgagcaagcggcagggataggatcagcgaagtcatacacgtcgctagcattgaaaaccatatcaagacagttccgttgcttgaaagaggcgatcgctggtcagataaaagcggccaacaagagtcttggggaggaagattcagtgtctggtgttgggaggtttgaggggtcgaggctcaagttcgtggaccaccacttgagacagcaaagagctcttcaacaactgggaatgattcaacatccttccaataatgcttggagacctcaacgtggtctcccagaacgagccgtctcagttctccgtgcttggctcttcgaacactttcttcatccgtaagtaacccactatacacacatgcactacttttcatcactggaacacaaactcagtctctaagttgtctttcttttaattagataccctaaggattcggacaagcacatgctagctaagcaaacaggactcactcgtagccaggtacgtttcaaaatgattctttcttgtgttattaggttacttaagaaagcgtttttaagtaaatttattttctttaattatttaggtgtcgaactggtttataaacgcgagagttcggttatggaaaccaatggtggaggagatgtacatggaggaaatgaaggagcaggcaaagaacatgggatccatggaaaagactcctttggatcaaagcaacgaagattctgcttcaaagtcaacaagtaaccaagaaaagagcccaatggcggacactaattaccatatgaatcccaatcacaacggtgacctagaaggcgtcactggaatgcaaggaagccccaagagactaagaaccagcgacgagacaatgatgcagccaataaatgcggatttcagctccaacgagaagctcacgatgaagattctagaagaacggcaagggataagatcagatggtggctaccctttcatgggtaatttcgggcaataccaaatggatgagatgtcaagatttgatgtagtctcagaccaggagctcatggcgcaaaggtactcaggaaacaacaatggcgtgtccctcacgttaggtttacctcattgtgatagcttgtcgtccacgcaccatcagggtttcatgcagacccaccatgggattcctatagggagaagagtgaaaataggagaaacagaggaatatggacccgccaccatcaatggtggtagctcgaccacaaccgcacattcatcagcggcagctgccgcggcttacaatgggatgaacatacagaaccagaagagatatgtggctcagttattgcccgacttcgttgcataaacccatctctctagaaggagaaaccgaaacaggttattatatacgtttctagtttttaattagtatatagtttctcataccattgaaccaaaacaaagaacaaaatttaattttagtctttggttatatatggccgacggttgtatatcgattttgtaatttttttttttcgtttctattgggggatggatagggttatatatgtatatggattagttacgtgtaatagcttgcattgggtgtataccaaaatatatttttacttttattacaatgtaataattaataagatagtgaactgatctatcaaatatggaatgatgattacagattagatctaagctgtatagattccgaatatgacatgtatgcttaagcggctggaaacttataatattttttgaggagtgtttatgtgttaaaagcatattaaataaaattctacacattcacaatacaaatataaaaaaaaacaaagaaagcaatctctgaaataagatcttacgaactgttgaattgaattcagatttcaaactttgtgtatagtttttttttttaaatcaattaagattaacgtttataaaacttgttataaattttcttttcaagatatataaaaatgaaaatgttcaaatcattttgtagaatagcgtcacctgctgagagataaacttacaataacagtaacaattttttttttctgttattaaagacattgacagaatatttatatgaagactgcgtgagagtgtgagactaatttcggagaggtttgtaagaaaaaagtttacaaaaacatatgcgaatatttaatatatattttactcattttcggcccataactttttttgggcccaaatacctttctatagatattaataaataatgaaatttagtgaaacacatgaaatatgttgcgactatcggagccaaattcatgagtcaaaagttgaaaaacacaacaaatttgaattcattatttaaaactgaggcccagaatctaataaaatttccgattttgttacccaaattactcattttaagcttcccttcaacatcactttgtttaggcccaacgcaacaacccttttttaaattataaaaaataaaattctattgtccaaaaagaaaaacaataataagaaaaaagttctttacagagaggttttttcatgggtaaactattgattgaatgttaaggtcatgtaaaaacaaaaaggtttggtaggaatataatcaactattaagtcctcgaaatatatgttcagaagttgtccacttcaacaacttccacactgtatttaacgactaccttatttgaatgtgtaacgtttaagcccttcttcttacttacagcaacagtctgtacaagaacaaaccagctctaaccggactggtttgctttttcatacctgaaccagattagttatggtgcttatcagatagataaacggaatactagttagtatacatcatgttgcattctacaatcattttaattgactatattatcgatatgcagaaacggcatgaaatgctttaatttgtgacatttccttgaaatattgaaacacttatgtaatgaaaataaaaaggaagttcttaaactattttaaaattgctagaagagctttagatgcattgtacctagcaattacaattgttagtcgtaaagtaagatcacattgtttaatatatctaaaaagagtgtggtcaaatgaattagtgaattactttgtatgagtatagaataatatattagtttcatacacgcatgctccattcatgcatatatggtggtaatatcttttaaaccgtgttatattttgcgtcggtggcattagttgttgaagctccacactgctgatcacttgcagttttgcacccatgcatatccctgatgtgatacgttttgccattgatcgatctctactaaactaattcctttatcaaaatttcatcccaatgtatgtaacatcatcatacctcattaagtacctcctaaggaaatgactgctcctaagagaaatccgtttcttgtcgattttttcataagtttttttatatgttgatggtatacttctacaaattttctattgatagataattctgaagtagatgttattgacatgttacgttgagaattggaaatttttgagtgggagtcgagtaatatgtatgatttgattaattaatcatacaatttttactaaagcatgagtaaattcctgtcagaaactcaataatacgagacgcgatttaacaatgatcgatacacaaattatatttttacgtcaaatttatatatgaagaagatgtttctcataataatcaaatatattccagtttttaagactttgacttttagatagagagccattgacaattatatcatgcatgattcacgtcgtcaaagtaagtatgaaaaaccacgaaaaacgatttaacgaaatgtcaatattcaaacaattgtagaagagcctagaaaaaagttgaacataattatatagttcgtttgggtccaagaggaccgttaatggcatttaattaggttttgtcggtaacaaaagaagaaataatcaaaagagaacaacgttttttaatttaattagaagtaagaggctacccataacttataactgcgatcgtggaaaatgtaaacgaagtataggatgatgaaattgaaaatttgggtcacccacccatatcgcaggggcaaagaagaagaactttaaaaagatgcttcgtcatcaagtcaaactaataagtttaaccgagaaaaatgtgaagaatcaaatcctgatagccggttgttccgtcgtcggtcgaatgatctaaataatgtaattgtctaacagagattgattttatcgtgtcggcatgctcagttctgcctaaaacacaagagcattaatgcattttattatacgaaacaaaggcaagcaaaataatgtcaaaacaaatattaaagactgttgattataagaatatatccgaataacgacttattttgaagcgttggttccagataactcttactctactctttatatcaattgtcaatacaaagcaatgaaaaaactatttaggcaacgaagcagacgactaaaaacaaaagagttctaatcaaacaaaaaataaactccaaagccaaccagagagagcagtatagcaatgtaaaacataaataaaacaaatatgttactgaaaaatcatgttttctgatacttgaaaaaaagaaagatcaaatcatataaaaatcatttttaactttttattatttatatatagagctgtctccacataattactattattccaaaaataattgttcaaattttatgtaaacaaacgtcatcaaactattccatgaataaaattgttcaaattatgtctattcgcttacgttaaatatgtaacaatatgttacatgtatgatacatcagaaacgaaacgacgacaacaatctcgtggtaacaatgtaaatgatagtgaattagtgatgaggagccaactataaagatttatcatatcgtggaaaatactttaataagaaattgtatgctaatgtttatgtataatttctgaaaataattaacaaaaataaaaggagatatttttttaaataacaaagtgattttgaaaaataaagagaggataataccattttggcaaaattgtatattgtgatattcatgaagaccataaacaaaattatcctcgaacgagatgccatatcatcaaagtcgagaaacgatgggttagagatttgtagttttgttgatcgtgtgatgttgccaaactacgggttcgaaagtcttaaagacctttataaaggaaatgcgtcgagtattttgctcgagagcctcggttgggtcagtgtcaacatgttgagtgataagctcgaggacattagtatctatgaaagtggaaatggttatgaagtacatgtatgagggtattggttacagggatatgaaagacccatgtgcgttatatggttatagtattcatatatcaatagtaaagcgacatcacgtgatattttttcttaatgtatcaaaattccaccaatttctattttcatttttgattaataaatacatttcactttgatagtatttagtaaatattgatgaataatcaacagaaacaaggccgtacgagaaaagttgtatactctcactattatattttattttacgacacaacaaaatggaaaatcttaagtcaaaacgggtggcaaaaatgtgtaaaaagagaggaagaatcaatcaattaaaagacacaaagcagacagtagacactcttgtcttcaccaccgccacgatcgcgaccaaatggctctctttatattttatcacaattttcttatccgtttgttacaatctctctttgaaaagtcaaaccttttcatacgtctcacgtgttcttttttcttcacccaactcatcagcgaaaataaaaggtcaaatctatgttcctcgttcgttccttctatgagtaaataatactaataaactttattaaataggggcagattttttctttttttagcatatagttatagggacagctttacaaagagtgtgtaataactaataatatttgtattttccgtgttttgacttttttaataattgtgaatttttgacatctcctttatatttaaacccaacctcctttctctcttcctcctaacttattcaaaccaattcacatcttcccaaacccaactactacaacttgtattaagaaaaagatatattcccttagcttctttgatcaatatattcgtcagggttctcgtcaaagtcctcagcatcttcatcatatgtccggaggaataatggatgaagagatcgagattcctccgttcttcctttgtcctatctctttggagatcatgaaagatccagtgatagtctctaccggaataacctacgacagagacagcatcgagaaatggctatttgcaggcaagaaaaactcgtgtccggtcaccaaacaagacataaccgacgcggatctcaccccgaatcacactctacgccgtctcatccaatcttggtgcaccctaaacgcctcctacggcgtcgagaggatccctaccccaagacctccgatttgtaaatctgagatcgaaaagctcattagagattcagcctcttcccatgaaaaccaagtcaagtgtctcaaacgacttcgtcagattgtgtcggagaacgcgaccaacaagcggtgtttagaggcagcgggagtaccggagttcttggccaacatcgtaagcaacgactcagaaaatgggagtttgaccgacgaagccctcaacttactttaccacctcgagacctcagagacagtcctcaagaatcttttaaacaacaagaaagataacaatatcgtaaagtcgttgacgaagatcatgcagcgtgggatgtacgagtccagagtctatgccactttgcttctcaagaacattctcgaagtagcggatccaatgcagagtatgactctcaagccagaggttttcactgaggtcgtccagatcttggacgaccggatctcgcagaaggcgaccaaagctgccatgcatatattggtgaacatatgcccatggggaaggaacagacacaaggccgtggaagctggagtaatctctgtgatcatcgagcttctcatggacgagagcttcacatcagagaggagaggtccagagatggcgatggtggttcttgatctgttgtgtcagtgtgcggagggacgagccgagttcttgaaccacggagcagccatagcggtggtgtgcaagaagatacttagggtttcacagacagcaagcgatagagcggttagggttttgttgtcggtgggaaggttctgcgcaacgcctgctttgttgcacgagatgttacagttgggggttgtagcgaagctttgtcttgtgcttcaagtaagctgtggaggtaagaccaaagagaaggcaaaggagttgcttaagttgcacgctagggtctggaaggactcgccttgtctcccaaaaaacatgattcttgcatatccctgctgatgaaaacgaagaaaacaatacaaacaagtccaattctcagtgagagcaatcacatatatgagagatgctgttgaaaaaactaaaggagtattcaattattcatatcattaatccaattttccttaggtttcttatttcgtacttttgatgttctcaatgtagataatagtggaaaatgttcatcaaatatttttttttatgaaaaactgcaaagatatcatatataaaatcacaagttaccaggctattgtcactttcattttcattattttggtaacgcttttatttttaagtttttttcttcaatttatgtatcctcttaatctccactataatccaagtaaaggagtatatatatatatatatcatttaatttcatcatctcttatttgaacgagtaaatgtgtaagttttctcctaaaatatttttctttcttttggtttgtaggattattttgtaacattcaattagacaaaattcttttcttccaagttcttatttaatccgatgcacgttacctcgtattttattgcaagaatctttgtataatttttaacaattggggcacatggtctttatatatatattggcatattgcaaagcaaaaattttatactagcgagggtacccaaaaacaaaataaaaagaaaatctttagtctagatcgcatctagttgaaatttcattcctccaaattacaatattaattgccattcttataaaacacatagagatcagtgtgttatacttttgcatcacatgtaatgactcatattctcattgaccagcgaaattagaaacgtcgaagtactacaggacgcagtcgagagagtgaagacaaatatttatgaaagagatatatagaatacaaagaaagccacctaaaaagaaatataaacaaaaaaagttgacacagaagaaaaattaggagcaggccagtatagaaccacaccacccggaaatatagtttatatcttttaaacaagtaaaagaatgaccattgtttattaatggtaatatataatctgaaggaattagctagtgatagaaaaatagaaaagtagtcatctattgcgagcagctctccaaaatctgatgagtttaaaagtacaaaaggtaggtccagattggaccacaagttgtagctgtagttgaacaatactcataaaattaattcataatacataaataaataaacagaaaagtcttcgactcgataaataaaacagttgtatgtgtactgtttctcaaccatcaaatgaaattatggatggaatactattacttgacacatgcgtacgtgattgcgataaacgaaaaaaatttatatacaatcacgatgaacgattttcagacaaaacaactatttctacgctactagtaattaatacacgagactacgacggacaagtggtatctaaaacacgttggaattttataaactttgcattcataatcttaaattttttgcgttctttgaaatgtgtaaagacattaaacatttgatcgaccattattatttgcatggtagcttattatggttagaattacttgactaatctttgtaatttcttcttttgttaatacacatggatggtccaacaagaaattcaatagtgaattcgaacatcgtcttcttgtttttgaatttcagtgcaccatataaaattcaatgaatacatcatgctctagatgtataagttaatattcatatcgttatttctttccatgggacttggactagtaattgcgaccatcaaatttattgctatattaatgtctaattttcgtatgtgatacattcaggtggataagaagaagccccatatccacatatttatgcatagccatgcttttatgtttttctccatgcatattttgatccaagtacacgcgccgcgccggtatgtatatgttaacgcatgcgttatataagcaaacatatatcataaatatgtggaccgggacgtgaaggaccaaacaattttgacgccgcaatagaagacttcgtttttatttgatcgttgtattatcatttgacgagagcgagagacttgatttcactgcaacgtagggcttaaacttaaaattaaatgaatgacttgtgattttaaaagtattaaatatacaaggacctaaaacagacacgtaaagccccactctacggatatggtgacctgtaattaagctatgattttgagagattgacaattatcaaactatcatacgtaaattacatgacatttgaaaactataagctaacaatgcaatagtcgaaactcaacctctgtaagcaattggcattgagacgagacgaaattgctaaaagcagaaacaaatgtttgttttcatttgaacataaacattataaccacaaagaaagaaagaaagatagatgcaatgggaaataagatgatcaccactacaaaactcgggcctaaccgaaacaaatgggaacagctctaaaattacaacttgtattaccttttataacttaagcagagtttaaagtctattcacctcgttttccaataactaacgtttcttaatccctctacactacgataagactcactggaattttgcttaatacctaatgtttttggctacgtaacaactccaccacagctgagaccactcctttcccctccactgttatgtccaaactcggatcctctatcttcttattcagtagcttgtccacctctcccctcaatctctgcacaatcatattatcctcttcgcatcacaagaacacatgaagaacaagaaagatttgacagagagattccaattttacctgtatcagttctaagatgttcttcgaggctgagaaatggagataccctcccaacatctctataccttccccggttttgcttgggataagattgccaccaaacataaggagtgcatagtctgatatatttgtcgagtctcggatataaacacttgtcgtcttcaccttttcgctgtagaccaagtacggcaaagagaagagattcactcttgcgttgacagatccagggtggatatcaactttacccagctctttagtatagaacgcagtgcgcttccctcttcttttgcattggacaacatttgggtacagccccgcacatagaaccgcacttatcatctccatatcgtagctatattggttgtatgcctgaaaagcaccatttgcaaatgaaaatgatcagtagtttcacattttatcagggttcgaaaatataattgaagtattaggacgggttcctgatgcttacatttggctttgatttgtctacaaaccctatatctgatagaagatcaagaaactggtttctcatatcctccatcatccttagagttacaggggaaagaaagttttgccaacaaaaatctttttcgtttccaccacgctttgcatcccgatatccctcatatgccttaagaagagcaatgtgatcactgcacaacacatatatgccaaatcttttccgtaagaaacagaacacagtgacctggttgactgacggtgtgaaataaacgtaatttgcctatagatgtcatacctgcaggaatcaccagcaaaatatcgtttggcttcatcagcttcctctttcctatttaatggtaagacaaatgggctacgatacgccagagcagcagcgattgtcaaagcaggattgacgcactggaagatagctccaatcagaagcatctttccaatatttgggtccacgggtagagtgcaaagatgccgacctgtaacatgatggttttgagtgtagcatatatttacaaactaaaaaaacaatagtaaagaccagagttgctgctcaccaaggggtgtaagctcttccacgtcatttaaagccccaattgttttgagaagttcaatagcattctcaacagcaagtgcatctggtggctgcagtgcctttgccaagaatgagcctatagatccaacttgcaaacttttgatatgcaggcatagctcttgtaatggagtccgtatgatttctggtaactgatactgtggaaaagcatcatagataacttttggatacaacctataacaaactccagcttgaacacgtccagcacgacctcgtctctgcatttgtaccaaagccacagagaaaagcacgggttttaagtcttacaagcacatctatgatctgggcgcagtacttagatcattgaatgaaagggatcttgattactgatagacaattttatggttagtcgaatacctggtgagctgaagcctttgatatccatgatggcaagagacatgccaccttgttcaaagcatcatagctagtttcctttgctttaccacaatccacaacatatacaacatcatcaattgtaatactactctcggcaatgtttgtagccaaaactattttcctacaaaagcagagcattcgcttagaaaagttgctacaaagcagaatgataaaagaagaaatgacgaatcgatagctcagagggctaaccgtttgttaggaggtggacggtcaaaaatttcacgttgattaaccgtcggcattgaaccatgtaaaggaagaactaagaacttgctcgaatctccaagaaagttgttcatgttaattttttcaagcagttttgaaatctcatcccagccagtaaggaagacaagaatcgccccaccaccttcaagacgacaaatatgttcaattgttgcctccacctacgacagagtttcaaagatcagttcatgatgagattcttcagtaaaagatgatatgggctggaattagctggattaccaagagaataaagtgaaattcataccagatccacatcaatctgtgcaccagaccatgcttcaagagaatttcttgtggccgagctataacttttatagtgagaattgatgtcaatatcctatcaaaaaataaaaaaacttgataaggcagacttctagctttcaaggtaaaacatattctagtaagcttcagtctttgatgatgaaaaaaatgcaaaagatcaagacttatgtgtttttctaaactacaaccgagccgtttttagttactgaaccataaacttaaattcccacgtgaactaagcttggttttgactcttgaggtttaatctttccacgtacatggagactaaatgtctatatcagcgtgaaatataaagagaaaaaacagttcttaggctagatgaatcagaataatgaaccaaacttgaatgcaatactgatgaatttgagaacaggaattattatgcaattccgtatacacattttctgtagcggtatcaaaatgaagcttcatacttcttttactaagaaacaagctctcgagatttgcaagtaacaagggtagcatagcatacctcaaaaagagtagtcagatcatctttcttggattctgattctcttcttctacctctcgaactaccttgataattccccgagtcagacgacttaatattataacgacttttctccaatacatcttctaggaataactctgccacaggaaatgtgaaaccctggcaataagttgaaaagagataagtcacgaatatcagatcataaacaagtcactggatttacaactagacataccgggatgtgcatagtgggagagttcccaaagtatgttgagaacatgtcagcgttaatcgtagcactcatcagaataagacgcaaatctgggcgtcgaggaaggagatcgcgtagtatgattagtagaaaatcttcattcatgcctctttcgtgaatctcatccacgagcaaatggcttacgttagttagattaggatcctcaatctgcatttcaacaattgattcgacatttcaaagtaaagaagcttaaaatatcatacttcaactacatgtgatgagtagttgagtagtagaatagttgtatcttaccagccgccggagtaaaacaccagtagtgcaaaatagcaatcgtgtttgatcagaacgctttgattctagacgaatctgataacccacagattcaccaatggattcacctctttcagcagatatacgagaagcaacagatatggccgatatacgtcgaggttgagtgcaaattatgttgcaatcagcacctcttagggatgatatttcttcttccaatataaattgaggaagctgtgttgttttaccacacccggtctctcctgaaactaccaatacctgaaaaataaacaacggacacaactataagcgcaagatcaacacaacacaagacaactaaaaaaaatagcttgacaatattattggagagaggcagaaataatagctgatggaatacagagaagaaaaacataccaaacaattacctggttttgtgaaacagagttaagaaactcctctttcattttaaaagcaggtagcttttctctgaacgctttaagtgcttttacactctcagttgcctgtgttgaaacggttataaattgatgttatgtccagaatctacatctaccataatgcatacggtttactttagcaatacatgtaccttaagcttttcctgcctttccttgagtgcaaaactgaatttttctttctcaagagaatccggcaatttggaagcagaatcaggtcttttcaagccaagagttgaagtacgatcctgttgatcgttaaaagctgaagcagaggcaccagaggaccctgattcttgtgttgttttcaaaagacttccaagttttctctcagtctctgtggacattttaatctacaagaaaaagagtataagcgtttcagcagccaccactgagtacaaaactttcgtactagcaacatctctattacctctttctgagtggatccatgccgttcatcaagatccgctcgataatctggtaaaggaactttgctaacaacaagagccttccctttattgtacgcatgacttccattccaaaaaacgataagcaaattcatgacatactctcaccatatggacttaaaacgaagttgtcgaagaagatatagagacttacaagtaaagacccatctgcaaagccatatcagaaagtgtttgctgatctccacggctaaaattacgcttaattagcatctcttgttctcctcctgttttccattgctcaatcttgttccaccattcattctcatcaagtacttccatctgagataaattatgactacttcatcatctgattcgaaattatgtatcaatgtctaatcgttaaattgaagtaatgaactcagaatctacaagaacaatgtatcaattacctcagcttgttgctggcgcaaacgctcagctctccacacaggatcccaccatcgctgttccccccggccgccaccaccaccgccacgaccgccgccgccgcgtccaccacgacgaccggaggaatgacctccgcctcgacgaccaccttgagaattaggaccgtgaggaggcatagcggcggtgtgaaagagaggacgaagcggagagagtttggaagaaaatggaaggagaaagcgaagcgtggagaaacaagagagggactgttgcattcgtaatgaatataaagtttgaaacagtttaaagttgaactcgcactgacgactatttttgcttattggaaaattttgtattgaattttgtattacactatacaagataacacacacatatgatatgagtgacttaaacctaatttagcttcaactttcaaccatacatacacattacacatatgagtaaatctaatatcattagccggaagatatgcgctttttgtgaaattactagatcaacagtatttgatacatcaccaaactgatagcaaattagtaatgatggaactaatttgtgacaccaccaaactgagtcaactatgagacttggacaacttattccaagagtgagttaacaataaaaaaacaatgtcaggattataacatttttttctctcttattatttcttccaaactttttatgcctagtagtaagtgtttcctttatatatttggcctaagtagctcaattagtgtttgagtgtaatttcatatgttttgagtatccggcccaaatatatggcttgaaggtcataaattgtttatctaaattcatattgttttagatgacatagactatagaatatatgattgggaatccggagctatgggttttaaaagcccatagttactctactgattggggaaaaaaagaattgaaaaattggaagagcggcggcaataattaagtgttcaataacaatggtgtattcgaatatcaattaaaattcactgaatacattcattcttcaccaaatgaatccgcccctggataatatacgttcatttatctccattcttaattacatgtatatctgtttatatactatcatagctagtgtatattaaaatatacatcatgcgagcatgcaatgacgcattttcttcattaataacaactgtccaacagattgttttccattatcaaagatgccttgtgttagtaacttggccgttaagtgaatgatttttatcctatggtagtttgccaaaatataattttatgtaatacaaatgttaatgcccacgactcaattggttaaatttggatttcctagtatatacaaattatttacctacaattatattttattttattgtcttgccacttttaggagaaaaacaaaactttatattaatcttctaatatggagagatttcaaagttttaaatattctaatactaaaataagataacactgcgactttaaaagcaagtgaaggaaactaaacgttgcttaggtgacatgattggacttaaataagcctgaataaaggagataactaaacgtacataaacaacaagattagtatataagtacaacgttgacttcaaactaattcagcgtaaaccttctctaatcttagccactggcccctccctacattcctaaatcaaatcttaatacatgtcacacgttaaattcattagccctgtatccaattcaattgtgcaactaagtgttttatgtttgaaataaacaacgaattaatgggtcaatatatttatatatgcgttatactattacagtattaccaatacaatattagaaaatttatacattgaatatttttttaaccatccacaagtcacacaattcttgctttgctttgacaagctttcttatcctcattcacatgcatttcctccctttgtctctctctctctcttagcgttgacttttgataaccccaagatgcttcaatttacattgtcttatatcaaatcgctgaccaaaaacctctccattatttctcctcttcctcctcccaaacccattaaacaaaaccatcaaaccaaacccgccatgaacaatttccaaccaccgccaccgtccgagatgccggactacaacggcctcctcggcacggacgacataggaggatttcgatacggaatcggtgtctccatcggggtcctcctcctcatcaccaccatcaccctcacctcatactattgcacacgtaaccagctctcttcttcaccttcacaaaccaaccaagattcaacacgtatccatcaccatcaccaccatgtcatcatcgacgttgtccccggtcttgacgaggacaccattcaaagctatccaaagattctctactcggaagcaaagggaccaacaacggcgtcgtgttgtgccatttgtttaggagactacaagggaaaacatctgctgcggcagctaccagattgcaaccatctcttccaccttaaatgtatcgacacgtggcttagactcaatcctacgtgtcctgtgtgtcggacttcgccgcttccaactcctctgtctactcccctcgccgaggttgtccctttagcctcctccgtggccgccacaagaatgtcctagtgatttgtttattttataaccgaagaaatcgaaatcttgactaatctccggcttaaactcgttattaattcttcttttaattccttgtaaatttgttatttttggtcactaactgatcactgtatatacactcttcgaagccgaagatttgtaagagaaaggaggttaaggatgaatttttcacaattttgttggattagtttttctttaagcaatgtgaacgagtttatctatacatacgtaccaagaaagagtaattaaagtcgttttgaatattggcaaatatgtttcttggcttgtattgaactttgagagatcattttaaatattgagacgtcaaagaaaaaaaaaagagtttgaggacaagttggaacttaagataatgggatcgaatcaattaggcgtttttgatagtcagtctgacaatctttctcaatcatatggtttatttattagcaattttttttttgttaaacaaaaccagatatttaacagcgtatttgtcttattgggtaaaccgttagccaatacatatgatgatatgagaaaaagacttttatgaggaccttaagaaaagatataaaacgttgattaagagatataaatcaagaagaaaaaaaacacttgaaaacgattgtttttgtctccaatctcaagctggctgaaattaagtaggtgagatgataaaaatgagttgaccatgataaaactactcttatcttatttaaagtattcggtaaacaaaaatattactccaaatattaggaaccatgatcgagagagaaaacatggtgaaaagctcaatttctcattaatgattcaaagagtttgttacaatcgtttatagtcaacagactcaataaccagaaataaccaaagatatgctcaaattcatttttacaaacactcaaaagtgatatgctctttctctcggctctgtattcctttcataacaagacaaaccgaggtcgttcaaaccatcatcggtaacgtcgaaggcttcaacttgaagcaatgatgctgatttaagacttattgtgctaggcttcttaatattttggcccatctgccagaattaatgatgaatactttcatattgggccctgagaaattgactaagacccaattgttcacagcaatgtcaaaaaatttacccaaaaaatctttctttcccatcttttaacttcaacttttattactttttatataatctattttccttaataagaaaattaaatactgaataaattctaaatatttgatacattctaaacatttttattatgtaatggtgaatgtctaagtatttctcaaaattttagttacaactctgatctactaagaaagtatctatgaaaaaaaagaataagatacaaggtaataaaatgagtggatcttaaacgcgaatacaataaatcaaacaatttgagacgcatcatacgttaaaaatctattaaccagcggtcttccggttcagattgagaaatttgactactttagtttggtttgatttggttcaaacttttttccgacccgtgaagaaaaagaaaatcctcacgcgccggtaagtcggtttcacgaacaaagaggcctgagtataaaaaaacaaatcggacgcttcgagtttttcttgaggaagaatccacacacacacagaagaagaatctcatcacgaattttagctatgggttggatctggattgacgattcatccgcctctaaagccggtgctgatctcaccgataaaccgctcggagattctgccgccgccgccgaaaattgctccacgaccacggtggtaagatctcagtgcaagacggaggaggtcgagcctggaaagttcgtcaggaaatgcgacaaaacagaagaaatcctccgccactgttttgggaagtgagtgtttcggatattttctcgcttttgatcataaccctaattaagcaaaagataagcttttagattttgaattacatgtggaaaacaaatctccagggtttatagatcaaatagatgaagtgtgtttgttttgagctctgagttaaaaaattttgacgtttttgtggttatgtaaaagctaaaagccaatagttaaagattgactctaaatttgtgtttctgatgctaagcttactaatatgaattgcagaaagatagttgtgtttatgcactggaatggttacattgcttacttcttgtggtttgatgttgttttcttcgaaaggactctctatcactgaaccattatggtaaaaatgtttcattataaaagttcttatgattttatcatctttgtagtgttataacttgcatgttttttttggttaagtaagtggagcaactgctggttagtcttttttgggttaagtaagtggagtattctcatataagaagaagatgcatagagtatcacatcacagtttctgtgtattcggcgagcttcatgtttgtttgtttgctacctgtgatatgagttattccatgttaaatgtaatgctttcctttggaagacaactcttgttttctttctcgccctttcatgtgtgattttgagattgagccattaaaatgttcaagcaccttgattgtttgttacctttcgcgcctctagacaatcactaaatcgatttacccttggttctgtatctgctttaggccctctgaagtcgttcaatccaacacagagcacacagaagaggatgtgacagaccagatggtgggaagatccgctcttccgaatcagtttgaggataaaaacccgctaaacttcccgggactccgcagagatgtagacgccatcgaacgccatttcttgagcggaatgaagagtttctttgatgcggctgaagagatgacaagcagcttatttgatatcatgggagaccatcacccaagcaccaggagaggagggatacccattgaaaaccatcccaaggtagaggagcaccgcaatgacgaaactgcccctacacgaccacactcctctggcgagattgatctctcgggcttggccaaggacgtttgagaaaggtcgtctgcttcttcttcttcttctttttttttttcacaaaggtcgtcttgttctagcttttggcatatataatcttaaaaatgtaatgtgactttctaagaagcgtggggattgtagtctaatgttagcggcttgcacgtttttccgagtgggtgctactactatctatcaatatcatcatactactatattactatgtgttatgcttgtgtcttttattatcactttgtcttaaaagttattttacatttttaaacatgttaccttatacaattcgtacctttcattaaatggtaataaaataataatggtcaaagtagagtgatatgcttgagtggaattaaagatttgaaatctaaccttacgttttttgaaagattggttaccattttgtggcatggagtaatttagaaaataacaagaaatatacttttttggtcttcaattgagtttgaagatttttcttaacaattaattaattacggagtttaaagggaccaaattgttaatcaatgtattcacacagacactaaataatctctaacacaacctcacagagtcatatgttagaggagagaatcaaacaagtttatttaattgagaaaggccaaaaaccctaataaatccccccaaaaaattcagtcacgacgtgagacccaattccttttcgtcaaatcatcttccttctcaattcccattttcttattcttcgtttttcattttgtgcattgtgtgtgtttcttaccaaaggagatgattcgtagcattttgtgagaattgattaaattattcagccgacctcgagatctttctcccttagatcagaattcatttgtgggagatttatctgtctttcttcatggaagtggttatgttgttagataggagagatctttgtctctatgagatcatgttaagggttttttctcttgcgtgaaaaggaaggaaaaaaaggaagaaaagggacttttcctctctatctttttacgattctctgtatacgtttctcgtgtagattattgtatagcatatagttgattgggagatttagattgtagaaatggggaatgtatgtgttcatatggtcaacaattgtgtggatacgaaatcgaattcatgggttcgtcccacagatctcatcatggatcatcccttgaagccacaactccaggacaagcctcctcagccaatgctaatgaacaaggatgatgataaaaccaagcttaatgacactcatggtgaccctaaattacttgaggggaaagagaaacctgcgcagaagcaaacgagtcagggacaaggaggaaggaagtgcagtgacgaagagtataagaagcgagcgattgcgtgtgctaacagtaaaagaaaggctcacaatgtgaggagactgatgagtgcagggctacaagcagagtcagtgttgaagaccaaaacagggcatttgaaggaatattataacttgggtagcaagttaggtcatggacagtttgggactacgtttgtgtgtgttgagaaaggaacaggggaggaatatgcatgcaagtcgattccgaagaggaagctagagaacgaagaagacgtggaggatgtgagaagagagattgagataatgaaacatctcttggggcaaccaaatgtgatctccatcaaaggagcttatgaggactcagtggctgttcacatggtgatggagctgtgtagaggaggtgagctgtttgataggatagtggagagagggcattactctgagagaaaagctgctcatttggctaaagtcatacttggtgtggttcagacttgtcattctttaggtgtgatgcacagagatcttaaacctgagaactttctctttgtcaacgatgacgaggattcgcctcttaaggctattgatttcgggttatctatgtttctcaagcctggtatgtttcttacaaaacagagttttttttttactctcacattagatagatgttatcctgagatatgtgtattgttgtttaaaggagaaaactttacggatgtggttggaagtccctactacattgcgcctgaagttctgaacaagaattacggtccagaagcagatatatggagcgcaggtgtgatgatttacgtgttactgtctggttcagctccgttttggggaggtaagattgttactttgaacacaaactatatatgtttttggaggtgttataatgtgtgtttgttgtatcaagcagaaacggaagaagaaatcttcaatgaggttctggagggtgagcttgatttgacatcagatccttggccacaagtctctgaaagcgcaaaagatttgatcagaaagatgcttgaaagaaatcccatacaaagactcactgctcaacaagtattatgtaagtccctagaatcatgaaactccatagtttaggcagttataaaacttaaatcattttattttcaggccatccatggattagggatgaaggaaatgcaccagatacaccacttgacacaactgtgttgagtcgcttgaagaagttttcagcaacagacaagcttaagaagatggctttaagggtaccacatacaataaaacctttttgatttgttttagatgattttgatgagagaatatctgattattagtgttggacttgcaggtgattgcagaaaggctttccgaagaagagattcacgagctcagagaaacattcaagactatagacagtggaaagagcgggcgagtaacttataaagaactcaaaaacggtcttgaaagatttaacacaaatcttgacaactctgacatcaatagtcttatgcaaataccagtaagtagacactagtactgtcttaatatatatggatttagtaattagtttgattcatagtttttcttacatactgggatcatttttagacggatgtgcacttggaagacacagtagactacaacgaattcatagaggcgattgtaagactgagacaaatacaagaagaggaagcaaatgatcgtttagaatcatcaacaaaagtgtaatgaagttggcgtgaaagatattgttgttgtctgaagaagtgtaatgagtactcaaaactgatgatgacgaatgtaagtaaatgtgatgcattcactcactttagtctcttagagctgttgttataaaagtctcctaatcaaagatctagtgtatttcaacatttcaaaaaacataatctatatataatctttatcttgttacactttagactgtaggaaactacaaaaagagccacaacaaatgactataagagaggaggcagaacaaggagaagatggacacaaagagacctcaagaaagtaagttgatggataagttgatagatggaaagtcaaatgattttgatgtgtaggtttttttttgttttgtttatcatgttcttataaaagttagagcaaaaaaaaaaatgaaagatgtgttttgttgtatatagaagttgtagtagaaaggataaggagacacaataaaacttaggtgatgttgatgctctcaatactttgcctttgtgtattgaccttgagggttatattaggaataagaagagtgattatgtaacccccaaacaaacttaatttagaaatagtagccattatcttaagcatgttatctcaaaacaaccatatagtaaaatgtttggacgaatcctgaatgattgcaacgtgcatgaaaacattggaaagcataaaaatcttggaaagaagggtccaaaaagatctgacggtggagaattcagacacaagcctacgtggacggaacagtcatttctggtcgagacagctcacgcgcggctggcggcgaaaacatgggacccaaacgtgaaaaccaatcatgtggaacggtctcgacacgtcagcaataacggacgaagtaatggggtccacacgcggcgggtatgtcgtggggcttatggttcgctgtaacggagaccctctcctctctctcttcttctctcccacgttctccaaacacttcttcctcaatcatttgctttctatttaccattatacccctttatcactcactcttttgaccacattattgaccctttttttgttgattgcaacataaatttagcaacctaaacattgggagtttagacttttaagtatcttgagtatctgtgattatagggtgggaaatctactgattagttgtcttataattttaattaatttgagttcattagtgagcgagagagtgataaaaaaaaggtcaaagacctaacaaaagaagagggggtgttccggtaatttggtaatggttattgtctacatcttctctcctttgacgttgaaaaagcccatcttttttcctttgctctcattcccacacagagaggtacaacaagactcgtcgctcttcgctttttcttctctctttctttctcttgccagtagtgtgatcttacgaagcttttagtagagaaaaagcatatacgctttgtctttcttaatcgactgataaggtactttttgtggaattttgcttttcttcattcactttgtcttagtttcgacttgtttggttgattctacttgtcttgtttcagatttagattttgactagtgggtttgctttagttgttgtctacaggaacaatggtttggttcaatctgttttcaaaatcagagctttcgaattttaaacattaaaacggttggtttgtttttatgaatatggtgataggtgatgactaggttgatgatcgtagcgttttgttgcaaataataaaagtgattgttgacattgctatgttacaatgtttagtccttaggatcagatggaacaaatgggtggctactcaaaacaacaaggtccatttttagtttgattaagggatttggatctgagcttacttcatcaactttgtcggaatatacatttgctttgtgtggatttggaagttgtccctgaatggcgtccgaggatttgaatattgttgcggaatcaaagaaaggggaagagaatgttattgttgataattccaaggacatgaatagacctgagaatcttgacttatctactgagaaaactgatactgccaatgagaatggtccaaaagatgaagcttctaagctggtaaaggtataatgcttcttacaagactcgttttctgaactgagttttgttagtcttaacattctctcttctgtgtcattctctgtaggaagcagacctccctgagtctggtacttcagtgaagagtaaaacagctaaggataataaacctgttaagagaaagtcagggacgttttctcggagcccgagattcatgtctcagagctcttcatttccaactaaaggagcttatactgatattactagaaagagcattgatgccacaacatcaaagactagtcttaaacccgtcgttgctggtggatccaaaccaaaagccactccatcttcaagcagcggtgtttccgcaaagcgcaccagtttagtatctgcgcctctcaaaaagcaaactatggtaactactgaatctgttttgttagttgtttgaagctttcttgtcaacttactaatcttctttgtgttgtgtcagcctgtgaaaaccatttctaaggatgcagcttcaggccctacttccaagtgagtcacaatatttatcatttcaaatacgtaactgtggaatgacataagcgactaagaaaatatgtgaaagtgatgatctgaatagtcaactaaactgttctcccgcggcattttcagattaggagatgaaggttctaaatccatcaaagaagaaactgcggggaaggatgtcgaggaggctggatcaaccaccgctgtgtaagttctttctttaccttgtttttggcatgtttccgttagtttttaatgtgaaaatgtggctgtagattacagaagtaaaacatatgtaaaagtgtttgcatctgtaattttacagggtggcagataaagtatctaacccgttgaaagctgaaatggcaagcaaggacgacgaagacactcgttcaactaccacttcgtatgcagtttcttcatgatcttccatgtttattaatgatatatgtatctctatatataatgtttggatgttcaacagaacttctacacctcgtgggcggagaagcagtgttggatcggcatctggattttcgttcaggttggaggaacgggctgaaaaacggaaggaggttgctgctaattctcattctctattcttacaacattttcattctaactttttcaagtaagtttttgtttcttcctaacttgtgtctcctttgtcgggtttacctttcagttttatatgaaactagaagagaagatccatgcaaaggaagtagagaagaccaatttgcaggcgaaatcaaaggtaagctttataagactcttctataatggaagaaaactcttattggtctgtgacatttgtcattttttgggttaaatggattgtgtttgtttaggagagccaggaagaagagatcaaaaggttgaggaagagcttgacgttcaaggctggtcccatgcccagtttctacaaagaacccccacctaaggttgaattgaagaaggtttgcttctttctcttcctatgtgatcaaacttgtgctacactatttttcttataccgtgctccatgaaaatgttgcagataccaactactcgtcctaagtctccaaagctaggacgcagaaagagtagcagtgatgcaacaggaggtgaagccgctcctcgcgtgacaaaaccaaaagactcatcatcatctacagtgaagaaaccaataacaaagtctcagccaaagcttgaaactcaagagaaatcagtgaaggccaaagaaaagaaaaagaaagtgaagaaagaagaagcagagaagagaggagaagaagagaaggctactgccgtggctgcgaaacctgaagagcagaaaccaaactccaataacatccaagtgaaggctgagataatggcgagtgaggttgtagtgggaggctgaagcaaagagagcattcagcagcgatgtctaatgtctgcttctttttttctttcttaaagcattaatgtgaatagagttgttgcattgcgtctacttttttaagagtttatacttcattccttcagtttattttttggaaaattaagcctcgattgcttcttaagatggtctcaaatgtgttgaactcaaatatgtatcacgagcatagatatgtgtgaatttgaagtgtataacagtggtgagttgtgcaaataattaatgtctaaggagaggctagtggggtctttatttacagctgaggtttactaaggtcagctacaaatatcgatccttgtggggtattccgtatttgcgacatgttttgtggtgaatatgagatcatgctttagatctacatttcacaaacttgaaatactgtaattccttgattagtttttcaccttttgtaatatcaaaacacatcataacgtttgactttgacttactattagatagttttgtgaaattccagagaaagaatttagtgatacattcatttgcaaaagactagagagaatcaggcttttaatacatgaggacaaaagccacaccacagctcacctgccctcgtggccagtgcccacttactcttgtaatatcttctctcaccgtcttaatagtaacattaaagattcgtgtcctaggctgtgaaatatatcattcatcatctcgctgtaaaacatacatagaaaagttcttttttgttttaaaaagcaaatagttctccaaagagtttaatcatgtgaaatttagctgtttatatgtaatatgcccaattaattactgttgatctgaatacttaattctcctttgtgtttggttggttacacacaagaatattgttataatttttttgcaaagaataaataaatacgctgactttatgaccaaggtgaataaatgtacattatgctaattgatgtataccattatgtacattgcaactaccatttccaatcacacattttatatgcaacaaatatgtgacagacattttctatttacagaattagatatcaataattgataggagagaatggaatagaatagaataggcacacaaatggatccttcctttattatttccatacagattgtataacttgtattacatatttgatttctctaaactcctagaacttttttactcacccccaaataacaaacttaatcaaaatctacgtatatatatatatatatttatgataataaaaaaattacaaatagaacatgcaaataacaacgaacccaaaaatcacatcatttacatattcaactctttcttttttttttccacatgtttacagaattaagaatttggaagcttggaatttttttttgataacgtgtgaaatcactgacacggaataaaccgtgaccccatcattctacaagctacctccatcaatttacctgcatatattatcatatcatcagtaactttaatcaatgattaagtgcaaatgaatatatgattagaaacaaaacccaaaagaccagaaaaaaaagagtttggtttgggttttagtgaaaatttagacaagctgtcgttaacgaaccaatgtgtctcaatcacagcttgtcttttataaagaacaaataaaaatcattttccttaatttaatgataatatgggattattcgtcggtgggttaaagaattaaaaagaataaaagtaagcggaatattaaaaaacaaaatttgttaagagagttttgtcttcattctctcacaagtctctactttattccaaatcccacatgttttcttacttctactctcattatacgaccaaattcatggctgctaagtgctaatctatgtgattaatgtttcattccacacataaagtttagtacagtaataaactaataaatgttagaataagaatttttgacactcaatgacacaaaacaatgatgaatttttgtgtttagatgtcaatgtcaaatatttattgaccgaataattagcgtctaaaaataatcgtaacaaaaagagtaaagaaatggaaaatttatctttacctcttcttgatttagaaactttcttaacgaccggagcagctggtttaatctccgtcgccggcgtttcctccttcgggaacaagactccatcaataccctgaactgaaatccgaccgtccgtgtagatatcaggatcaaacaagtaagctgaaccatcaccgtgtccgaatttgacagatccatcagcttcttgagccaacactttatgtgggaatctcaatgaatcatacttcacttttccgaatctccgaacagcgttgtacatactctcctctgtttgatactccggtatgatgtggtaatacataatttgttcaggagcacctggctcgctaagctggtccgttgtgagcttagccatggcttcgtcgttaggagcaagaacggttaaaacgtagccttctgacacgagtcgacccatctcagtggctaaagaggttaagttgacgagtatatcagccatctcgttgtagccaccgtaatgcaagagagtgtggatgaaatctttaacttgagcatcgccgttgaaatggccacgtggaccaccgggtccgggagctggagcaggagctagggaaggacctggtgacatagcgtcgtagattggaagaaccggaggagctccggcgggaacggcgggagatggtttcttgagacggtgagttctagggtcaacctcaggagctccttctggtataacggcggagattgaacggagactacgacggcggttaaaatcttcttgaacagagcgagggatgagaagacgttcgatgccgtgaatgataccatcgggtctaatgacgtcatcgggtcggataatctcagcggaatctactttaagagtgttgacgtcgacggtgaggtggagatggtcgttggagagagtacggtggtgatgagaaagagaaggccattgaggagaagtgattcgtttaggaagaatgtggaacattaataaagattgtaaagatttgaggtttcttggttcgagcaagaaagatttgaagagtgggtctaagtttcgttccaaggcatcgttgcgtggtgcgaagattgtgatgttgtgtttaccaactgcttcttcgagggtctggagaaggagagctttttcgactagttctgctagctctgtgtagtgagagtccaggagagctacgaggactgagtttgagtttatttgacccggtactggtttgttatcgggtaatgcggtcgcaatggaggtggtgaggaagaggaggagaaggaactttgtggcgccataggaggaatccatggcggtggagagagagagagagaggggaaagaagtgtcggcacaatgaagaaagaaaaatggtttggtgtttttttgcttgtgaagaaggagagagagagaaagagagattctgatgctgatgtgaagtttcttctttctttcattaaaattttaatttttgagtgggtgtgttttttgcatattttattttatatttttggtaagggtaaaaagttgggtctacacgagaagcaaaggttatgtgtcgtgtcaagttgtttggcttatgcctaactcggagcctctctctcagacaaaaggtttttacttgcttctgttgaacaactcagcactatgcctctgtcttcgagcctcgtgtcgtgttctgactcggtcgatatctgaacttcacttgaagttagaactttccatctttgtattttttcttgtaaacaacagatcaaaacgtacgactcaaacaattgtaaatccaattattagctgcaatgtgtgctatttactatgattaactattatacaacatatgttgtcacgttgaaatttgatttgcatttcgaattttaaaatactatggtactacttatgcttcattgatacaacaaaattccattcttcgtggccacttcttttgttaataaattcttgagactttatcttttgtacaaccattgagacacaaaaactacgttaggtgattagttagcaaaatagataaatcaaattcgttttcagaggctcggccaccaacgtacgtggatccaatcatttatattttatatgacggtcgatcggttcattattccaaaaccaaaagattattagtcaaatatttcagtaaattgttaaagatttatcgattggtttgtatgtcataataactctcatgccgtcatcgtctgtgagcttccatatattgtatctttttttcatgggtttcctctttgtcattctttacaaactttttgtttgtttgtccatattctcaagatactaaaaatcatttacttagcttaaaatcattcatttttaaattgctccagtcgaacacatgcgaagttttctctggatgtactagaagaaagcctaataagtgaatcttcggtgataaacatagtcgaatgttatagcattgttaaaagtgtttatgaaatgaagttacattgtaatccattttcgtgggtgaaattatagagaaacccctatccaaatgacttatagtttatactttctagacccatgagtctcatatagcaataaacaacacattttattttactacatattgaaatcattgtaagaaaaccagtgaaggaaggtaagatgtctttagtctaaatgtatcgattaaaacttttgatctaacattgtgtcatttttcaagaatctttgtttaaaagacttaagacaaatacatccaacataaatctaattttatctttttatcctatatatcacacataaatatgtcgtcataatgaataaaacacacatcttgtgatggggatctacatctacttgatcaataaaatgaatatacaagttacaagttttgtgagacagatgtaaaacaagtttttaccttttacgcaaaagtcataacgtatgatttgctaatggtacgtgtggtgaaaaagcgcgtaaaaagtcgtaacgtatgatttgataatataaaaataaatctcgttttggatcaaataaaataatttttttaataaaactcgttttcgacgttaataaatgatctgaaacggcgacgtttctcctgccgttagatttgccatcgccgtcgaaccgacactgtctttggtagttggctttcttctttgattcgaagctccgttcccagtcagtcccaccaacattatatagagaagaaaaacatttattggtattcattttaatattttcaatttcttgatattaaatttggccatagagctcctcctcactcgtaacagaaacggaattcttcactattaagtttttcttaatcattttaatttattaggtgtcaatatatatgattccattatttcgaaaagaaaagtcaattggtgatttaaaaggtttttttctattagagaaagaatataaatttgacaataattgagaaaaagcatgcattgtatataaacttttagggtagatgcgagatgcatggccattcgagatattatgaagatcttgtaatatgacattattaatcaaagtatccctgcaattaatttaccattgattcatactaattcattcttataaaattaaagattgataggacaaatataaattcacgtccttacattggtatgttgtagttactaatttatattgtttacctaactagaaacccatttatggtttcaggggtactgttaggcggcactgtttctagcagtgatgattgatcgactattagattgttaatcgaccaggatttgtattactatcgttgtaagtcataatccatattttaaccaatgcatgttgttggagaaaaaaacaaaaaagaagctaaatatatgttctccccaaaaatgtaaactccaaatctgcctgggctttataccaaaagcccaagtactacgtcatcttgaatctttcttttggctggttctaattaatacgctagtgtaccaattttggctggtactaattatacgctactcgagatacgaatgagaacatcaacaacacatctacatctacgtccattgacaacttggcataataaaaaaaaaaagacatggaatggggtatgtggtccggtctagctcctaattttgtgaagagcggtgtacacttaatatttaccaaataaggaaaacaaatacacagaaaaattcatgtgttgaatgttgacttcatctttcatcctccaactttgatgatttgcgaaaactccggcgatactcttcgttgttccctgacggctccaccatatcttctgcaaagctcactttctttttctttttctttctttccttagtaggaggttcgagcttgtccatgtaaccagagaggagacgcttgtgaagctgagctgcaagaagcaccacgcttccagagacggcgaagactgtcatgaacccaattgagctctccatcttcttgagattttgttgctgttaatttagatgagagaagaaagagattagaagatattttgacatgatcgaagttccgaggaagggaagcattgtgatgaaattaataactctcttcttttccaacttatgaaacagttatagaggagagttgaaacttgaaaaagaacaaaagaaaataaataatggcgtggaagtggaaggttttgaaattaatggttggtggactttttttttttgtaggaatttgtaatcttctgtcgacgtttttagtaacaattttaaaatatcaaattacgaactttgactatttggactaatgtaaatatgaaaactaaaacaatactaatggcttcgtaacatagcaacgaactaagacgatttgaggttgtctactaggagtacttacttaagatatgttgcacgagtcttgtttcttctataattactgaatttttgtcatgtatccacttgagcttagggcttgtgatttttgttcgtccaatttcaaatctctcaaggtgattttttttttttttttttttgctatgtctttctataaggtgaataaattcttttataaggggattacactaattcgtaatccaattaggaataagcttttccgaagtccaagtggagtagtaatatttgagagaattgattataatagactttagacctttaaatatgtgattttatatgtaaactaatactaatgaattgacttaatcaattcaaaaaaatgccaaatggataatatcatatactataaaggggtatacaaagaaaactgtgttaacttggagttatagataatatggattgtagaatgagttttgagatccaagttttatgaagacaatgttttattggatctcatgtgtttttataccgaagttccaatgatttaaggcagagatcataagacgagaaagagaagaagaagtcttaatctgtagagagatgatgttactcagatgatccagctgctatcatccttcaccattgtttctttcgaccaggtttgttgtacatgttcccacaccaatccctccccttcctgcacattccgcgatatcgatcatcaacaaaattctaagagctactcttataacacaatctcatacctttgaggtgaatttgacagttgttgtgcagcatcttcgttcgtcccctgcaagagaaagtattgttatattctgatgggatttgagttatagatgatgcaggtttaggcaataaggcttagcttaccatcttgctcccatttatcaagctttactatccatgtcccaggagtagtgtctgttgccaggacttgatctgcccaaacgcgaaacttcttcccttgtttgtctccatggtacttgcgcagctcatcgatggtatctctcagagatttttcagtaccagatggatggacaaacacaccaccggggtgctgaaagaggttgacacaacaagagtcaggtatttaatccaactgcaatacattatctaaattcggttatatactcacaactgaagctttgaggcttgctgtgtatgcctcagagttctcaacctcgccccgtctccatctctcgtagaacaaaaaaaacttcacaacctcgtgaccagggttcacattctccaccttgatctctaagaaatcagagacatctcttggagaaaggttcggaccaagcttgaagtgaccaatggcttgtataatcccacctgcacacctctcctttgcatggattaccttagggttgtcttttgcattttcagcatgccacttcaacagctcttcttgagcattgcttacctgggaacgaactaacagatttcaacattgcgatgaaaatataatatttcagagacatggtgaaccatgattgaagagcaaccaaccataacaccataaacatcgggaatactaaacagctcagcatcattcccagagtcgccacaagcaagagtattgacagggagtttcccctcagtcttcagtttcttcagcagatatgcaagcgcttgtccctttccggcaccttgtggtaaaatatccaaatccatacctccactgtaaattattttgacatccagctgatacaaccagcataaaccatttcaataaagtcacggtatctcaaggtaaatcacagttcctacaataacattatcaaagcaaactcaccccacgtttcaggaacctctgtgatagctccttagtaacttcctgagccttactcttttcaacataaaagctaaccttgtgtggcctctgctcagtttctgcctacaagcagcaatcaaactcatgtcattgaaccattgcaagattgtgagacaaaaacactatgtttcgagccaaagagtacctgaagctttaactcagggaagttgctagcttcttgtttgacaatacccaaatcccatttattgttcagagcctcaacccaaccatgatcaggaaccatagagttaccataagtaatctcagttcctacagacataatggtaatatcaggggtcaacaaaggtttctcctttctgagttctttatacaatgtcggtgatcttcccgtagaaaacacaagaagagagtcatggcgataagcgtgttcccacaacgaattgaatctcagcagagatagattctcaggatcatgatgatcaacctacacaaacaatcacatcaatcattcaatcaaacaaacttttaaaaagacgtaaaaatggcagctttataccatagtatgatcaagatcagagacaatcatcaaacgaggaggagatgttagacgctccatgattgctaatatcgtcttcctgaagttagcatattcgttaattcaatatgatttctcaaattcaattaaagaatacaaaaagtggatcatcactaaataagtacagattgtacacactctatctatggagtatcaaaacctgtaattgaattcaacaaaagtataatgaaacacatgagactgaaaacatgaatcagtcagagatagtgattggaattagaagaacactcacagagcaggatgcaaaatcgaatataataatatatgaagaaaaagatgaaagtgaagagaaaactttgtgtacccagagaatctgattttgccacaaattcggatcgatctcgagctcttctcttggcctttcgtttgctttttgtgcgatcgaaagatggttgcattgcacgtgtaggtgtaatatatatccaacggctacggttacacgttactaatcgtttttattaataaaattaaatatatatactttactaatgaattaagtatatactgtaactggcaacagagcagattactagaaacgccgaatgatgtcaccaattttctttaatatattcaaaggtttgctttcctttttttttttaacacaaaaccacaaattgaagaatgattaaaaaaccagatggaggagattaaggagtactggaaacaaagttggttaacttaaaccggtattttattgcacataaccaatttgtgtagagtgtacacactacacaggcttacatatatagatccacaaggaaaaacagaagcacaccaatgatacgattgagctaggaagacaatgtgtcaaatccgaagctgactccattattcttggtgaaatcatgtgacgtgtgatccaccacctgagcatcaacatcaccgtcaatgtcattcatcacactactgtgtattaacaatttaaaaccattcttcactcacatttgtgttgctgagctctaagttgtagaaatccatgaaggagctgccactaaacaagggtccagcatgccatgtaccacggtgcagtttcacaaactttggtcccgagaacctgaagacgcgaatctcttccacctcaggtggaatgtataagtgaccagactttgattttactgtatctacgctccttccatcatcgtcatcatcttcaataagagacggcttagccactcccatataccaaacatcacctcctattgatcctagacactgtgtcacctttgcgtgatgtgtgatcttgaaaaaccctaagggtgtttctttcagcctaagtatatagagcctgccgtcaaattatattacacattgagaacaaaccaatctgaaacctaaaagctaggactttgttataaataccttgtacaacactagtatttaggaaccaacacaaatcacatagcttgataaattagcatcaaaaatgaggaatttaaacgaagattaacaaataatcttaaggattaacgaaatttaagagaatcggggaaaagagtaccgtggggttcctctagagagatctagttgagcgtcgtggggaccgaaaccagcaccatcacgagaggcttcaatgacttgaccatactctgcgaagttctccggagtagcttcgataggaatcaaattcacttccaccggagatttcgccatcgttgaaacgcaccacaagaaaataaaaataaagaggattgtatcttgagctctttttgtatccactcaaaatgtttttaaaatcaatcagaagacaccaaagtatatttaggttttcttgtcaattttaaaagtatgggattaacatgaaaatatgagaaaacaagtattttcgatatttattgaaaaaaaaaaaaaaaaaaaaaaaacaatttgtacacagttgcatacaaattttattcacgattgctcaatttattcatgaaaacagaagcacacactgatgataagattgagttaggaggacgatgtgtcaacatcgttggggtcaactcggatggtgactcctttatttttgatgaaatcatatgtcgtgcgatccaccgcctgaacatcatcatcaacaacaacaatgtcgtcaataaaaacaagtcattcatcaccattccatacattattaacaataaaaccattctcactcacatttgtgttgctgagctcaaggttgtagaagtccatgtagctgtcactgaagagtggtccaacatgccacgtaccgtggttcagtttaataaactttggtcccgagaccctgaagacgcgaatctcttcaaccgcaggaggagcgtacaagtgaccagaccttgatttcaatttatctaccatctttccatcatcaccatcttcaataagtgtcggtttagccactccaaggtaccaaacatgacctcctattgatcctagacactgtgtcacgctcgcgtggtgagtgagtacggaaaagtcaaagggtgtatctctgatccgcattatatagaacctgtcccaagtattaaacataatgagaatatgatgattagctaattgtaaaaaaaaaaaagaacaaacaaatctgaaacctaatgctaggacttgtaaatgaagtcagttaattacttgaagtagtaagaagagtctagtttgaattggtctttcgttttgttgaattttgtagtaaataagtacgttcctacaaaatctataagtcttttgttattaggaactgatcaacacgactatctaggaaccaatacaaatcacatagcttgattgataaattagcatcaaagatgaggaatttagacattaatcaacaacgaatatgattagaagaagcatgtgttttaatcaataatcttaggtattaacgaaattttagtaaactggataaagagtaccgtgggattcctctggagagatccagttgagcgtcgttgggaccgaaacctgcaccgtcacgagaggcttcgatgacttgaccatagtctgcgaaattctcaggagtagcttcgatcgggatcagtttcacctctaccggggatttcgccatcgttggaacacttgaactctcaccatcaccacaggaaaaatggaagtgaagataagaattagcgtacgagctttttggagttttcctaaaattctcttcaagtctagattcagtaagaaaacaccaaaaatatctgggctttcttgttaatttaaaaagtatgtgtttaacatgaaaaaagagagaaaacaagggacctttttgccttttcgggattctagggcttgtcccgttgtttatcgggtgtggtcgatactcggtacgtagcatgtggacatgtatctttgagatgtgagtgtaattcgtgtaaaacgatgcatagaatggtaatgacgctcgtagttaagtcaaaattgttaccaagtctgaattaatctaaaattttagagtttgtgttagagctagttaaaatgtgttatgattgatttacaattttgatcgatctcgaccctcgagcttctttttagcctttcctttgcttttagtgcgatcgaaagatagtcgcacgtgtaattatatccaacggctacgattatattatacgtattattcgttttaataatgcttaataattaaatatactactttataactggcaacagagcagattactagaaacaccaaatgatgtaatcaaatttctttagtattcatgatttgctttctttttttagaaaaccaattcaagaattattaggattttatgaaccagggttggttaacttaaaccggtattttattgcatataaccaatttgtgtgcacagtacacaatacacagtattggtattggcaattagtcaattacattacacacaaggaaaaacagaagcacactcatgataggattgactccattattcttcttaggtgtcaaagcggaagctgactccattattcttcgtgaaatcatgtgacgtgtgatccaccacctgaacaacatcatcaacagcaacaatgttgtcaagtcattcatcacactacattgtattaacaatttaaaaccatcactcactgactcacatttgtgttgctgagttctaagttgtagaaatccatgatggagctgccactaaacaagggtccagcatgccatgtaccacggtgcagtttcacaaactttggtcccgagaacctgaagacgcgaatctcttccacctcaggtggaatgtacaagtgaccagactttgcttttactgtatctactctccttccatcatcatcatcttcaataagagatggcttagccactcccatataccaaatatcacctcctattgatcctagacactgtgtcacctttgcgtgatgcgtgatcttgaaaaaccctaagggtgtttctttcagcctaagtatatagagcctgccacgaaattatatcacacattgagaacaaaccaatctgaaacctattaacctaaaagctaggactttgttataaatctcacaacttggaactaatcaatacaactatttttggaaccaacaccaacacatatcacatagaatgataaattagcgtcaaagatgtggaatttaaacgcagattaacaaagaatctgagttttagagaatcgggaaagagtaccgtgggattcctttagagagatccaattgagcgtcgttgggaccgtaaccggccccatcacgagaggcttcgatgacttgaccatactctgcgaaggtctcaggtgtagcttcgattggtatcagattcacttccaccggagatttcgccatcgttgacttgacaccacaagaaaatgaaagtgatgattgcatctgagcttttttattcactcgaaactgtttttaaaaataatcagaaaactccaataatgggttttgttgtgaatttaaaaaaagtatgggactaaaaagaaaataacagaacatataagggtgtttaccggtgactgaattcgacagtcatttcatttgtgtttcccttcaaagtgattgtcttttttactactgaagttgtgaggaggattgagagaagaaacgtgttgaagtaccaaagttggaatctcttattactgcaggcatttagatccccaagtacgtggacaaaataactcctgaatacgagcccaagtttgatgctttggtcaggaataccacagaaagtagattttgtaaaacatatgtgaattgttgagtttctcatgttacgtttacagagttgcttttgtattgacagaatcatttggtttgagtgtattacattcacaacgttatttctttttaccaacatttgccaatgtctcttatgtttggtgacaaaaagaagcaacgaatttaccttaagattcgtaatatggcgatttaaggctactgtataccattgaagtaattgcaactgtcaaagcaacaaccaattgtagagagggcaaaaaatcacatttttgaagcagagtttttataaagagtaaatgaaactgtcctcaatgcacaacaaaacaatgaacccttttttttttgtcaaaattttgcaaagtagcttttaacaaaagaggtgagtctccggcttaagctgcccccaaaaaacttcgtagcagcaaagcaaagtaaaatcccattagcaaagcttcttctgaccaagctgatccgctagcactgcatcttcgttcttctgcatagctttcttggctagttcgtacccagcaaagttcatagcacctagaggagccacccagaagaacctcgggactgctcctttgaacaaacctagcggtccctcattacgcagaatcgatacaacaaccatagacattgagatcggtctccctggcgttgcagtcatcattctcgtcttcatcacatcaaatggggttgttacaactgctgcaatacctcctgacaccgccccaaccgctattgtctcccatgcctccagttctcttcccagagcttgcgccaccatctacaatacacacataaaccccaatcaatataacaattacagtagtgacccttatgataatccaatcatttcggttttcttacctttttggactctgcatacagtcccatgccaacaacgtatagtggaacttcgcggcaaagagttgcgcctgtcccacggaaaaagccacttggaccatcttgcttccacgtcccgacaatggcttcccctacattgttaaacatgccagcctgcaaccgttgcttcagcacctcacatggaatccgcacagctgtgcctaatagtgtgctgcagaatgatgcaatcgattgaacctgcattaaatgatcacattggttaccgagtacaaaacacagatcagaaagcacaaatgcaaacgatgtaactgttaaccaaaagcggatgggttctacttcagaaaccatacacaactttatcaaaccaagcaattaagagaccatttagccccagcagcatcaagtgtatattattctagccataaactttacataactactagaactttagaaccaaggagatgcaacaaatagtagtatacaatgatctaccaactaccatgtcaaccattgcatcaaggaagctaagtactgcaatgaaatagccttgatattggatttttcctctaacatatggtttacttactagatgccatgaactataagaacacataataatacatatacttgaagcacaaaattagaatcttgacgaaaccagccaaacagtgagtagagagtgataatcacctgaatttctgggagattgggagcaaaattgatcaacacaagtttgcttgcttcgaatattcctgtccgcaggccatggctacaatgatgaaagagattaagccacatggaaatcaaatttaataggtagaagtgaaaatatctttgatttgaaacaactgaaaagaccttgaaaattgtccaagaattgctggaatagaacccctatacactccccggacaccaatctctggaagcttggctattacttcaggaaatgacaaggttgatgcttgcacacgtgtctggcatgaaagtgataacgaatccgtcaacagtatgccacaagaagccaggaggaataattggcatactcatctatttaaatattcaaatattgtagaagcagatgtcaattacgcagacttttgtagtagccaagttctcacctaaacttgtctaaacagagcatttacttatattcagcttgcaaaagcaccaagaggactcaccttgattgtgtcaatcggatgcattaaggaagtggagagagcagaggcaagccctcccgctaatgcagattttagaacatctccagcaggtaaggccacagggggtgcaacagcaacaacagtcgcagcttcaaaccagatgttactatacaagtaaaaatagcatcaatcaccattggtatgacaacaaaaattataagtttgaagtgtttgaggaaatcaacatgaatgggagaaactaaggggaaactggtccggttcaatccaaacagttctagtggtcaaattggcattttactcattagtgcaaagacaagccgctacaaaataaaacatcaattttatttcaaaacaaagtactatacttaccgaggatcatcttgtaagcgctcatatggcagcaaaaccatgaaattacggaaatgtccgtatgagatagactcctcggtatcagccttcaaaaatctcatcatggctatagcattttcttcattagcaggaagtcctgcgttatttagtgatgccaatatctcacttttcttaagagtaccagacttggtcaagcagagagaagtataggcacggaggatggttggctccttctgttccatcaaggacaaaaattgcttccaaccaaacgatttcgagaaaagatgactcctagctcgtcgcataaattccttggcgtatcttctgggcaattttcttctcctcattgcaatttccagatcctccaaagttactttgccatcaccatctctatctaattcttcaaagaacctcctgcctggaagccacaaagagttatattggacgaaatggaataaataatagtacaggacgtaaaaatttcaaaagcaaataagtaacgtggtcctcatattagcagacaatctagtattgagaaactgcaacacacattacttaagttttaacagttgagacataaattgcggggtgatgactagagcaggcaataaaaaacgaagatatggtaatttcaaccaacaggtatccctttttaatgatttcaaccaacacaaatgcctccaacagtcaacttcaagctttaatgataagtaacatatataagcaatgcatcccgctgctctatttttgcttactaagttgccaagaaaaggtatgcttcttaataaaaatgggaggattcataccttcagactcggtgtatctgaaaaaatcctgaacagaaattagttttttcttgtctggatggtctcttgaaggtcgtcctaattgtggtaaaagttcaataagttccgtcagtgaaattgtggacagtgtggattttaagcgctctacatttgataaaggtatactcaatagtccagttgccaagttctgcggagaatcaactgcactttcctccttaccagcagtactgacattactttcatcaccatcttcacttatgtgagatgtcaggccacctatacctgacgccacatctccaactctggcaaacatcaggttcccgaggaatccatttacgtcgagttttctagcctcccagatgttaaagataagtggactatcattagaactagcttccttggaacaacaagattcattctctgaactatcctgtataaactggtccagcttctggagattctgagccaacatttcaacaacaaaaccaacagcgcattcaatcgaaaaagggttcccttccttttctacagattcaactgactgacacctcacttctttccgactcacaaatgccgcctttgatttaaggccgtgtttacgtagactgttctcatcatcccccatcttatgaatcctcttcttaccaattttaaaaggaataggaaaagcatgaacaaagccactaaccaacaaagaccaagtcatcgcaaacttgaagcaatcagtacaagaatcatcatctttcttctccaaagacttatctttcttcgccaccaccacatcatttccacgactcaacttctcactgactaaattgggagaaaacataccaaagagtgacttcacagggatcttcttgatagacaaacctttctttctctcatcagtaaccaccacacactgaacattattagtagcattgtcgtcaaattcaggagtagcaacaatccgcttcttcctgtttcttccagatgatctgaaaacaagacctagatccctttctttgcttatccaacaattttcaatatctcttgccgcctttttcacaccaagctcaatcggaagaagaacaacatctttaactagttggattgaattgaataaagtctcgatatgatcattcttagacaccattgcgtcactctcttatcaccgcaacagtcaatggggaagataccaaaaaaaaaaagatcgaaatccaacaccacagacttcgttaaccctaaaaagaaaacggagacgaatcgaacttcttaaagaaacccaaagtccctgggaataatagaaaccctaaaagtggtagaatcaagcgagagatagagaaatcagaagaaaaagaaaggtagccacggcgattcaaatatcgatttggtcattggtacatcaaccgctaagctcgagcgagaatacgaaggaaatgaaaaatgggagcaaaagcttgaaacagagagagagagagagcagatatggtgagagtaagaagagaggaagaggaggtaaccatgaaatgatgatgaccctctttagttcccttcttcttctttctttctcctttttttttttttttttttgcctttttaaaaaaacgtaaaatgaaaatgaaaattagaagaagataaagacatggatattataacagataataataataattaataaattaatactagtactatatttacgtattttctttcatgtagtggataaatcatgaccgggtctcattaatcataatccagttttaggcttttataagcgattaaaacttcacattaaaacaagaaaaatgagtcgattttgcctttagcaagagctaatgataattaaaagataattagacggtcgattgtcgaataattaaaaaaaaaaacaaggattaaataatagatttgttttgccaataaaaaataaaattaaaaatagttttgtggagggagttgctaataggggaatgaatggatagaggttgacgtaagacgtcgctggagccacatgacacgtgtactagagtttctattactggatttttttaaaaccgaaaagactagaacgcccttctgctttgcgtttttatttttgtgttcttttcagcgacaacaagtgaaagaaaagattcgagtctttatgtgtcacaaacagaccacaagcttataaattagcataaaatctgcattttgacattacagtcctataacataagatgattcataaggaagtcttttgattgaaatttgcatcaaaaagcggatccgctgtttttagttttgcctagcatcacgtctttagcttcattgatcttagaggctaggaaatggctaccacctgcatctggatggtttgctaccattaccttcctgtgtgcttccttcaccttttccgccgctacactctccctgtgttttcaatcacaaaaccccacatttcaaacaacgttacactttcttcaatggaaactatgctaatgctataaccaaattgatcattgaggattgagaaactactaaacacaagagaaagagagagtatgtgtgtgtgtttccttcacctgacgccaagaatgagagcagcttcccttttcgtcatcgtaggctggaaaccgccctcataaaatttcttaattttgggccttggtggccttgccttgaatgcttgccatgcttggattccatatctaccagcaagtgctgttgcagctactgcaacccccgctataaatggtgtcgcctggtgtaccaaaaacgcataacacaaaattaagcatttgtatatgctttattcttcttaccatcatcattctccaatgaatcaagctcacttgtcacagttttcaaaatctattgattaaaacttgcaaagaggactcatttctgctacagtaaatgacaaatacattgcaaacaagaatccaaagggacttaagacacactacattcatgaaagaagtattttgcagtcagttttaaatcttatcttaactaaacacaagactcttcaagatgagaaaagccaaggcagtgactcttcaaagattcatttccttatcaacaaaatgagccaagagagattcatatccaagaaagatcgatttagcttaagaaaatcattgaccagtattaaacacgattaacagagcactgattcatgatattataaaacttagaatccaaaagattcacagaacaagactcacaactaacggatgaaccctaatttctggaagagactattagtgttccgaattacgtaccattcagaaatctaggattcttcgtttcatccacagcttatttggatttgcgaagccgcagaggtggctgatgccgtcagagctctccgatcgctgcaaccaaaatgggaactcaatcaaaacctttgaggctgagctaaaccggttttaacgccaaccggttcaaaaccggttttataatttctcaatagaattagcaattggatcaaaccggtcttttcttatttgcatttttttgggtattagtgatgagaaggggaggaggtatccaagtatcttaaagagcttacaaacccaacaaaaatccacacccaaaaaaagagtataacaaaagaaacgaatttggattacaagttcttgaaagcagagtcatgagcatcctttggaggagtgagcctagccaacaatgccttgttagggcaatgatctgcatccacaaagtagaaattcccatcagccttgaagctcacatacggtctttgcgtgtctggataacgtatgtctgagaatttcagtgtctttgcgctaaatgtgccgagccaagtcatcatctcgacctcaaaagtgtctgaaccaggctgccacctcagcttgtgcacgtagggactaacaaaccagtggagagcagcggttgtggatgcgctaaggaagatcacagtagaggcaacagcacctttcatgatcacattcagtcccggggaagtcatgaaagtgatgaccgggccaagagagactgatagacagcaagtggagagtgagaggagtttcactttctttatggttgatgagattggtccatagtaaaccacacctccatccttctcttctttcttctcttggggtccgatgctgatcttgtgctcatcatcgtcctctctagtctttgctccaaatgatgcccagcttctctggctaagggatggaacctggaatctgaccttcgggttcactgatgatgaccatgatcctgctattgaccggtgatgatatcctgaaaagaaatgaccataggcttgatgaatctgtggtatctcgtgaccacatactactgcttcaaacaacagctaaggctcacaatgcttcaatgaagtggaaaaaccctaacttgccatttctcatccaaatgaagcacaaccccagtttcaaatccgtttgagaccaagactacatattgcctaaccaattgctaaaactcaaaatgctacaagtgaacgggaaaaaccctagcctgccatttctgatccagattaagctatggtatataatgctcaagtcaatttcaaatctatttcagcttatcggatgcaaagtactttcaccaatcaaatcgaaaagggaaaccaaaatcacgagagtggtttgagaaaatggatatacaaaacccataaagacaatatatagcagccatttctactctaaagccgtaaggattgagcttttcccgtaaattgtataaacaccatgatcggacttgtttcccggaaaatgaaaggtgtatagtggagaaaaaaagaacctgaagtgaaggtggaggaagagagacgtcgggattgggagcgaagcaagtgaatcagagctgatcttcccatcgccgtttctgttgcgagattgcaaagattcaggtctcctcctccaaatgaatgttgtagggttttagagattttattttcctttatatattaataaaacttgtagctttataaatttcttttagtggtctagtggttactgtttctctcttcaagcatgaagtctcgtgttcgaactttttttctttgaccttgataacacttgcacacctttttttttttttttttttttatcttcaacacctaatggacaaaattttatttttgtgtattgttttatgtctctctacaaaatcacatgactgattgaggaatttggatccgaaacgatgactagagtctagatatgacatgtattaagggataaccattagttactcgagttgtttagctaagtaagagtccgtgtacgtttttcggtttcttattggctcttcgaatcaaaaatagatgatgatacaatgtaacataggcaaggacaaagtcatcgttgtaaataaagtcaatgatgtaagaaatacaaatataaccgccatttattaatctcacttactctgtccccaccatcactcactgattttattatcatcaaaaacattgagatcttcacccttatcatttgatccaaccatggctcgactccttctcctcttcttcttcttccttattctactccattacgcttcttgttccagacacgaacaagaaaaagaccgaatctttcaccttcccggtgaaccaaacgatgtctccttctctcacttctctggttacattaccgtcaacgagtcagcaggaagagcactattctactggctcactgagtcaccaccgagtgaaaaccctgagtctaagcctcttgtcctctggctcaacggtggacctggttgttcctccgtagcttacggtgccgctgaagaaatcggaccttttagaatcaatcctgatggcaaaactctttaccacaatccttactcttggaacaaatgtacatctctctctgtttctccatttctctccaaattttgatttcacaatccttaaattaacactctttatattgggtcagtggcgaatttgctcttccttgaatctcctgctggtgttggtttctcgtattcgaatactacctccgatttgtatactgccggagatcagagaactggtaaagtcttgacctttgacttctctttctctagatttatcaatcatttgatgattttggtttgattttttctagcggaagatgcttatgtgtttcttgtgaaatggtttgagaggtttcctcaatacaaacacagagagttctacattgctggagaaagctatgcaggttattgttattactgattctattcaattggaaactttgtcttagctaagcattttcacttttcttctttaggtcattatgttcctcagttgtcacagattgtttatgagaaacgcaatccagctatcaactttaaaggcttcattgtaagcaagaaaaaaagaagcacaaatctattaacatgttctttttgtgttggtataaacgtgagtttgtttctaggttgggaatgctgtgattgatgactaccatgattacgtgggtttatttgaatattggtgggctcatgggttgatatctgatctcacttaccacaacttacggatcacgtgtgaatttggatcatccgagcacccgtcctctaaatgcaccaaggccatggaagctgcagacttggagcaaggcaatattgatccttatagcatttacactgtcacttgtaaaaaggaggctgcagctcttaggtctcgcttctcgagagttcgtcatgtgagttttccatcactgcccatcatattcctttaactactattaccagctcgagtaaggtagttttggtcattaggaggttccaactttactagagacagaacatgaaagtcaaacctttatatgcagaattggctacgtatctagtgtattagaccctctctttgtgctaccagattcaaaatgaccaatatatgagcctatttcaacaagtagatgtactttggttagtccaagaaagtagagtggggattacatgatatctggattctggactgcaaaaaaatctttcggattctctctgctacttgattccaattcattgtctgagttgattacttgatttgctttatggctgcttctatagattcaagttattctaccaagacatagtccataggtaacaagatttgacaaatctctaaacttgctacgttttttgtttatctaagccatggatgtggagagcctatgacccttgcacagagaaatactccggcatgtatttcaattctccggaggttcaaaaggctatgcatgctaatataacaggactagcttatccatggaaagggtgcaggtaaaaaacacattatagtgggtcaacaaatttaagaaaatgttctcttgtggttcattttcagtgacatagttttcttgtttagtgacatcgttggagagaaatgggcagattctcctctgtctatgcttccaatctacaaagaactcatcgccgcaggtctcaggatatgggttttcaggtatatctacttctccttttgatcatcatcttgtacatcccggtttggtatcatgattgatatcttgttctgtaaatttggatgcagcggagacactgattcagtggttcccattactggaacacgatactccattagagccctcaagttacaaccactctccaaatggtacccttggaacgatgatggacaggtagaaaaaaacaactcaatactcagtttcctcagtctcatttctttcttctgtggaaactaatgcatgagtactgaaagaacaggttggtggatggagccaagtttacaaagggctgactctggtgacaatacatggagcaggacatgaggtacctcttttccgccctcgtcgagcttttcttctttttcagtcgtttctcgacaacaagccattgccaatgtaaattgtaagacactgtgataagaccagagttttttataataagaagtaagaatctctttttcacattctcagctatcagtttattcgcactaatgacacaaaaccttgagcttctgtgtctaatcctaacaaatgttaatcattttcactttcaagtcttcttcacattatttattccaaaagctttgtgtaaatatcaatttagctgatctgatattcaaagaaaataacaatgttgcttagctgctactttaaaattatagctttccgttgcatttcttggtacacaagaaaacgagtaagacatggtttttaattaaataaattaatattgaaatggatgtctaagtttatgggaatgcatttaattagaggcacatgatcctcctctttgggattgctcaccttgtaaacatctctttatgcttttttgaaaataattatttttcattgatgtgaaagaaaagaattttaaaagccaatatctcactcgttacaaaaaggtaggacaaaaagaacccaaattgtaggttatggtccaacaagatcggtattaggtgaaactaaagtgaaaatatatgaacggacaagccatgaaatgtcaaactaaatcggcttaccaattaaaaccaacccaatcaactaattatttgtgatgagtattttatttggttatcgtttataaaggacttgcaaatccccactttctatgaaaagttcctccctgcagagacgatgtttgtctacacgtctccatgtgaaatacatgactaactaaattacggtgcaagcaagcaatatctagcttttaattagtcaaagctaagaaatatccctatcataaaagtatcaaattatgaaacctgtaaaatgaacagagaagtatactattttgacaatgactacataacgatacaaatgaataaaataaacacgagataactttcaagatgagatatgtatacaagatgccaatgaatcagaaacagaataatgtgtaagaaactagagagtagtcaaaatactcgatccacaagtaagctaatttgactatatgcattattaatcaacagtttaattatatacatattatatacaccacatatatgatacctaaaaatggcataagttgacaacgaccctcgtttgccaaattatagtataaaatcatcagggtgttaaatgagagattcccaataaactcaagaaggaacaaagcactctctttctttgaagatgatgatcacaaaaaaactatatcaatgtatgtgtttattatgcatggtgattgcattattagacgtagtgagtagtgatgatgctaaagagcaaaagatgaaggacaagattatctctttgccaggccaacctcctaacctcaacttctctcaattttctggctacgtcactgttgatcccgcggccggacgggctctcttttattggctaaccgaagctcctaggcctagcggaacgaagcccttagtcctatggctcaatggtggtccaggatgctcctctattgcttatggtgcttctgaagaagttggtccatttcgggttaatccagacggaaagactttgcgtctaaatctatatgcttggaacaaaggtattctttaaatttgatttaatttggaattc

SEQ ID NO: 335 - DNA, 31733 bp, Arabidopsis thaliana
aaaattaactaacgtaccatgtagtacggaggaggatagtgttgttgttgagggtagaaatgaaactggtcgtgattggttgtatatgtgttagaaccgtcaggtgtggatggctcggaccagtccgaatctagctggcactccatgttcactccgaacagtcttaatgtcttcgagttgcctctttggctctccaccgcttgagcccctatgtgccatatacaattaatcaacataaaaattatatatccagtaacatagatagtgaaatcgaggaatctataatggataactaccgagacttttgtcataattttccaaaatgaacaagactttaatcggaagagaatttccaattgtggtactcagatgacaagctttaccacaatgggacgccacgttatattatatgtgaattacattggtactacaaaatgtccacatcacataaaccagtatatatgaaaataattaagtatatactcttaaaactatgttggacttgggttaatgtcttgaatcgaatttgagctgatgaatatattcggaacatgtgaggaactactgcatgccgttttggttacggtccaagatcccgattaaagataagggtgtatatatattcacactgatgctataagtataatgaaaaatggagaaagagtaggtgtaaggatacgcaacaaatgtcacgcagagcagataatacgaatccgattctgtttctatgggcttccatcatttctttatttttacttctctacttactttaaagcgcgtctaacctcacgcgcacatttacaaactcaaacaagataaagagttttcaattgggtcacgtaacctcatacatttcatgaaatagattttccactttttttttggacttttacacttttttaactttaagtaaatatcgaatcactcgttttttttttttttttgagaaagaacatcgcatgactcgttaaattttatttccgttatttatccagtctatgcatgtaaaatgaaaactatacgttgacaaaaatagaaacgacaaaatgaacatctcttccaatttctataactctttttttgttttggttttaatgctattccataactcttaatagtgtgttaattagtcaatggcttagttaataatcgagctaaatggttggaaaaactattgtgtttcactacacctttaaatgtcaaagatattcgacattttttgttcaagattaatctgaatttaggttcaaatttttttggttatgacacaaaaaaaagtttaattaaataaaaagggtacctgcatgaggataatattggagcgaggcattggattgaacatggcgataagagtcggaggaggaagaagagtcaccgcgtcttctccagccaatgaagaatcttccgccgtctgaacggtgtcgatggaagagaacgacgtctccggcgtcaaggtgcttctccttgacgtatctgctccagcctttggtcaagacataactctggctactgttccagtacgagtatctgaatctccatggtttaccttcctcgtcctcaaagcagaggagaagtcctttctccacggcgtctgcggcggcggccgctagtgggaagtatctctcggcgtgctgttttgggatgacgaggcggttgagttttccgacgtcacttggggttaagggtttctcgaaaagagcttctttttcttccacgacgtcgttttggtgttgttgttgttgctgctgttgttgccacatgagagaatggtagtggaaatcgcttgagtattggtttattgacatttgaaagagagggagagagaaagagatggcaaatagtgatgagagagagatagagaaagggcaaatattgtttgagataccaatgctcctttggctaggttacatgtatctgcctctatttatatctgtatatatatgtttcaaaagaaagagaaaatttatctataatacatcaagtatgtataagatatgcctttctagtaatttctgaatataattgtagatatgaattttgatgtaaagagaataattaaaaattggactcattaatttgggtttcagcaaagctaacaatatgaaaactaatttaatatccttgatataaatgtaaaaagtttacttgcaaaacagagaaacatatgaaaggtggttgatatcactatataaataataaagagtgttatctagtggtattttagggtgtatagatttcacacttttggtactctttctatgataatatgtatggacatatctatatttacatgtgagatgtgttttgtcgggataaggcacatgttatcgcattatccttcattttctatagcttactactaacttctcaagcacgtgctctccattcaccacccaacaaatcatccaattatctcaatcttaattatgttagttttgacatattgacatttgtattacaaattaactgacatacatatatagtttttagtttcttacaataacatttacttatttctgttacagcttgactttgtgaccctacaatttcatcaggtacggtagaacattatatttatcagccttagtgtgaaattaacacaaaaccatatttctacatgagaaaatattgtataattccagaaatagtaaggtagcctattttatctttgataaaattgcagatattattggattatataaaaaacatatatatgaaaaagaagaagaaaagaaaggcagatacatggaccaaagcctagaaaagatcttttgtctcttaaccaagaagatttctatgtacagcctttccttatttagttttttcatcacgtgcatgacacatctcataaatggctacgtattgttcataaaatttcgaaaattgtttgtctctgactattttatgtgaaatgataatttattttttataaaagagaacacatatatagctttgtgtttccaaagaaagtagtcgtgggagggatagagataagatctgtcttcaattgtctgtcttctttctacagtcgtgtttcaatcctctcctcacattttttccctcactaacaaacatataataaaacaagaataaataattcgaaaaaatgtattacgtaaacccagaacaaacttttctaatttgttactccctttttgttttttatgtctttccgacttctttgtcctctttgtttcatttttctgacaaatttatcacaatctgtcattatgctatcttgagagattaattttctaaaatcccataaagttattttgtatatatacgttagggagtatccagtggatacatataatagttattatatattatgcaatgtagtttaacttcagttaaatttgtaatttgtatgtaatatttaagatttgtgcgacatgaattcaaatccaacttcacaaaaagtaacttaggttggtgaatggtgataatgaaatgcagcacatagctaaaagtgtaacaatttatgtatagcaaaaacgtcatctacgttatatcgacaacttttttttttttttttttggtgacgttatatcgacaacttgtttagatctgaaacgttttaattcgaaaaagttttcgtccaccaaaaagttgttagtgtgatatttttatatattactattaaaaaaaacccaggtcaagtgataatacctcatcctcgaccgccgcgaaacttcctcaatttccaagtagattcattctatcaggtaaaccctgtttcttcaattctgctactgacatcaatgtttctccacaattacactttaccttgtgtaaaatcagtttgcaagagttaataagagagttcttctaacaatgaaatgaagggagtaggtgcacaccaaaaaaaaaaaaaaaattgaaatgaagggagttgaaaatttctaattcaattttggttatattcaaaagtaagattactagcggtttgaagtaagttgtatacatttttccttcaaatttggatgtgatgatattattcatcataaaaatattgcaataacaaaatagtactactacaagaaatgaaattaaagaaaacaataatgagaacagcagagaaggaacatggatccttagcgaataatcaaagatatggaatcatatatataaataaaagagagacaaacaaattccaagaaattgtaaaatttgaggacagatctttggatgcattaaaaaaaaactttatgggttaattgtaaggcaagtgagtgagactaattagcttgaccctgcacaaaagtcatatatgctctacgcttatagctatttagcattgctgtactcattttgattctcttttcgcaattattgtgttcccgtttatgatcccaataatactaaataaagtatctatgatgctcttcatataaaaaaaggtatatttacatgatgcatatacacgcgacgtatacaactacaatctcatgttaagccgtgacgtaaacctatattatatttctcaagtatatatataaagttgttaattaattttgaatcgcgattccagaattcgggttcagtgcagccataagtaaagaatggttcgggcgagtaatgggaaatgacactggttatgaagttgaagtctattagattcgattagatcaatagtaaatgtaaactattttgaactagtcgatctcaatttgattcaacgtttttacctgatcaactaggacaatccatagccaaggttaataaaataaaaataccatttttccttatcagtcaactatatatggtgtgatgttctatagttgtttctgtctaaaataaaccttatttttaaaatcaaattccgaagttctagttattggaataattgttctgatacgttgataacaattctccaataatttccaccaatcaactttataacgaaaagttgagaaaaatgtatattcagtttttctcaaaggatttatatatatacctgtttctaaatcaacactattaaaaataaaattgatttgtaaatctattgttacacaatagcaagacgacaagtctaatagagggttgtgtggcggtgacacagcagtgggacgaagtgaacacagtgttttgagttatgatacgaatgataatataacaatgaggtaatcggagattggtcatctttttagttggttttggaggaacattttgtctaatcgaattgaacagattcattaacatggatctgacgttttaacgaatatgattgtatatttttaatcttgtgtcaaaagtctataacgttgaacctaatcttttggctaggcaagctgtgatgcagtatactatcaaccaaatttgatttcatggcttgtttgcttgaggtttaaacaatactttgtcacgtcgtttcaaacatggtaacagccaaaaacgtaattaatagtgaacttatgcagcattctagattgtaatacatttgtagtttttagttttttttgttaattatatatagtataatatttcgaaaagcatcaaaatttaaattaaaacatataaagacaaaggaaaaaacattttcatagaagtatctagactaggatacccacgtgccactacgtacacctacgtctatgtatgtgtgcactgtgcatgtacatttgtgtacatatagacgtacgatatttgtagacttgtgattacgaaattaatgtaataattaaagatagacaaagaatccaagtttgatttagtaggtatctgacacacctggattaatactaaaaaaaacagatttttgaaaaagatatgagatcatctgtgcaagttcattgcacttagcagtaattgagcacaagattgctttccaatgcagagaattatggcaagaataatgtatgagtactgacacaaatgagatggcttaaacaaatgctgcaattaagtttgtaattgacttgacagtttaaaagtaatctgctccatatggacagatgaatgctattattatatatcttctctttacgaaattatattatagaatgcaagtgtatactatggacaagagactatggatgtaatgtactctcatcatataagcacatatataattagcatgagactttcagacctagttccgtgatactataatatccaattgatacatggaccctaacttgggcctgtctctaagcacaatcttgtgaaaatatccaggcattggctgatgatttaaaccaggtacaatcttctaaagctcacgagttcgagttttcacaatcttgaataaaactttcatagaaaagatagtttatgtccgacaactatatataccaaaaagttaggttttttttttaatgatatcttcagtttgtatcatgaactctagatgtatattatatacgcaaacatcagtgcttaactatataagatatacaatttaaaatgtaactgcatatatgcagttggattttgtctgtcaaattaaaggggaaaattaggttgagagtaggaaccggacacacatactataatgtcgtcggcttattttaatatcacacaattgcaaccaataatatttcttagtttattaagtgtgtattagaatattaatcaaactctaaaatttatttataaaaaaaaaaaaatcatttgcgagatgaaaataaaatgtgtttgttgcaatatttcaagtattttcatttcgataaaacaaatattttctggttttaacagtattcaaagttgtatatattctacaaattaatgttattgtaaaatcgattgtaatctacaacaaacctgttactgcaaaaacaatatcatcattcatcacaaatttaagatagattagtgataaatagcagtaataaagtataaccaaattgagaacaatattatagccatgtgatatcctcctatccttttaattgaatacatatgattatatttcaatactttagtttgtaattaacgaagagccaagacgacgttatttattaattattttcaataaatcatcatgctgatgtagatcattatatttgttggcatttccttttctcattcaactttttctttttggttattacttaatagtcaaatttaaataacacaaaagctgtataaacctaatcgacggtgatatcttaagacttaaaaagttaagattaagggaacccttaatttaatgtttttttttttgttataagttgtccattccttgttgcttttaaaaatatattaaactgttaaaaaggtgatctcgttgtcaatgtaaaaagttggctaagtactaagcatgtgacgatcttggctaatgcctgaaccgcttaattaaggtcacataattttatacgattgaataataacatatgacgtatgaatcataattaaatgaaatccaaatattcaaagtcttagtaatagaataaaaatcaacctacatgaacgaattcaaacgaattaatactataaatatcattgtctcaatcgtggacatttttgttccactttattccttaaccccttggggtgcaaattccataaacccaaaaactaaaattaaaagttagtagaaatcaccaatcattcaaaccttttttttttttttttttgttcaccggccatatacttactaattactatgtctcatattttgctagtaatactgtgtcgccgaaccttgctagtataattgaaactacgggtgataaaaacaagaaaagagagatggtatgatatcatattagctaaaaacatacaagaggtcaatatgggccatgcctttcccaccttcttacgtatctttatttatgactcctttgtttgtgaatgtctcgtcgcatatgtgtgtacgtttttgatcttcatgatcactttatgtttttttttttgcataaggattctgacactggtgtgcctctatgtgactgacttgtagatcaaatttcgactgtgtagaaaaggaagcattcggtacttgcataatcttttgctatttctagtaaattacgttaatgttaaagccttaaagtcatcatcataatagaaacacaaaaacagaagactttatcatagtacgttagatcagagctgctctgtggaaagtaaattagcagagaggtaagacataccgaatgtttgttgggcctttttcaatgcaatgatagctagctaggtcagtgactcaatgattaactgttttaatttttatatttttaattataaattcttctatttctgataatttattttcagaactaaatcctaattcttgtgtggatatatttagacaaaattaaacaattatgattagtatttgaaataaacaatgtctagctaaaattatcatgtaaggcctgcgtgtttgaatagtaaatagatgtagttagacaaacaataccaattctctaataatgtataattgacaaaagagtatattttgaatgtaatatacatatacagatatacttttctagtgggatattcaagtatccggaaatcgaatgcctctgaggtcatgcttttgctaaatattcttcccgtggacattttcttacataaaatctatcatttgtttttatttttttaaaatctataatttcgttctaaaattcatttatagtctcctcaatcatgaaagtttagtttccaaacaataaataaaatttgacaaaaaatctatatgataataactcaatcgaagacttgaagtacttaaaataaatgatgtcagtaatatcacatagatatttttaaaaaaagagtcgaaattttcttatttgtttatgtcactaatcttttcaactccgacataattgtctctattatattaagaaaatgacgttaagaaagaaaaaaaacaatgtatcaacttgccccagtttcggtagtggtattattgtaataaaaagtaaaaagatggaattttgtcaaacaaaaagactttgacgctcttatataaatacccttcactgattaaccaaaatatcattaactaaataatcactcccaattagtactaatcatcactcagggcaacgtgaacagagtctagagatggctaattcctcctccttctccccctctaccaccgtaacagatttaatctccaccgtccatgacgacatcatagagtctcacatcttgacacgtctcgacggcgcaaccttagcatccgtctcttgcgcctcctcacatcttcatcatctcgcttccaatgagatcctctggtccaaaatctgccgatccacgtggccttcttgctccggtggttctcgttctttcttctccgacgcttattctatggtggaaaccgccggtacagtctctgatctcgaccgtccgtttccggaattgatctccgccgtggatcttcactacagagggaagttgatttttagtagagtcgtgaagacggagactacgacggcgtggtttaagagttcgccgttgaggattgatctggtggatacaaaggatacggtggcgacgccgattaagagaagacagaggacggaagacacgtgtcgtgatctagagaaggatttgactttgagctggatcgtgattgatccgatcgggaaacgagcggcgaatatttcgagtcaccggccggtgtcggtgcagaggaactggataagcggagaagtggaggcgcaattcgcgacggtggtgggggcggtggagtgtgtgatcacggtggtcacgtgcggtgaggaggagatgcacgtgagggaagtgagtctcaaggtagagaagatggagggaacgcatttaaacgggagggacagtttggttattttaaggagtgtcatggagggtaaaagggtaaatggaagtaggagggaagtagaatcgaagaagagacacgaagagtttatggagaagaagagagagatgaaggagaagaagatgagggtagaatcggtatttgacattttgactgtagcttttggtattttaggctttgtgttgcttgttgtgttttgtctttggagaacctctatatgaatcagaagcttttaagttgaaccaaaagaaaagacaaatttctttaaaacataaaacaacttcaattacattttcacacaataataccaattctcatgttacacaaagccacaaacatatacaacaagtacattacgatcttgacacttaaagatgaaatcaatgcctcttgagggcgatggctgagatgatgataagaacgatgaagaagagaatcgcgatagaatcagccacaaccgcggtgctaacgttctggcagaagtctccaaactgctgacagatagggagccagttggtgctttggttgccgttgtgtgcaaggtaggtgattgatgctgccgctgctgctgctgatgtgttgagcgtcacgaccagctttatatatacaatcataacataaaagagtgtgagttatatcaaattatgaaagaaatgaagaatagagttataaggtaagttacagtatcgcaaatgaggaggatcagccggggcgcgacagcatgtggacggacaatggatacgatggagaatggaagtgaaaggacgagatagctagcgactacggctacggctatcacaaagtaccttcaaaaaacgagtatattatttcattaggttactaaccgcacaatgatataaccggaacatgacttgtcttactaataactcgaatttaaatatttgatttcaagaaaactataacaaattagaagtatctatatggttcacttaaagatataaaatatgcattaaatttgtaaacattatgtcaataagtaattatgaagataggaagggacgtactgaaacgcaggaaggtcatcgtaaccggcttggaactggaggaactgagtaaagaagggaagagtttcctcggcggtgtacatgacagaggcagccccaatagtgactgctatggccgccaaacggaggaggaaatcgaatatagccaaacctctcttggcaccacctcttgaggcgactgccacaaagcccttcttcttcgcgtcctttacgacatggcttgaacttttggtaacagtgcttggctcgccgacgtcgatggtggtggactctttcgccattttctcttgcaattggggtttaaaagaaagaaaaagtgtgtgctttgtgtgttgtgtattggaatgttttgtagttgtggtgggaaactaatggaagatacaagtgtatatatagtgctttgtattaagcagtgattgattaagaataattagtagctagttaatgatgagctcttttaaaatggtttgatattgagtttagttgatttgttaggggtccgggaagaggagttgttgcttcttactttccccacttaattgggtttgagctaacaattgaacacaaaagaaaatgtaaactaatgaagttggtatcccttcgtaggcaaaagtgcttaataatgtatgatttatgttcatattattccatgccaattgtacagttgaacatttttatagcattaatttggtaaataaacaaattagatacataatatttcactactttttagtcattttgatacatatttcttttaacttgaaaaatcaagttgacaattaccatatactacgtgactctttctaagtggaccagatgttaaatgtaagcctaaaaggatccgatagcgccagcccaaacaaaaaacttatgtagtttttgcaaattagggcttttgattgcaaaatttcaacccataatcatttcccctttaaacttgattttcagagatacaaaatataaatattctcatcaaagctatattccagcaaaatatccccctagatatcttgatgaaatctttttttttttttttggttcaaaattcaaatctcccattgaaacaaaatcgagatttaataatggaaatactgcggatttgttaatatttcagtttagaaaatttaacattatctaacaaaatattatttacaaatttatatggaaatattgtggatttgtaacatttcatgtttagaaaatttagtattacctcaaaaaagtgttatttacgtttatattttttctattttaaaaattatgcttagtctttatctctatatagattgatgtattgtagaataagggtcttattccaagcgcctcttgatattttgaagaaacttgagtcttgacaataattatttctaaacatctttgtgtttttactctcatcaatttattgatctatattatgttttcttgaatattagttaggattgatatctatttaatcttctctctcatactcacttttatgcagattaaatggctaggatcagaagaagaatccaaaagcgccatatccacgaaaaccgctacatcgatttctttggagaacgtttgatcgtcacggtcactcatactacctcaaccatccgccgttggattcatagcatccgtttcttcagccgtcttcgctcctcacaccctctcgttgttggactcgacgtccaatggacacccggtggttccgatcctccaccggatattctccaactatgtgttggtaaccgctgtctcatcatccagttgtctcactgtaaacgcattcctgaggtccttcgaagtttcttggaagatgagacaatcacttttgtcggcgtctggaacagccaagaccagggcaagctcgaaagattccgccatcagttggagatatggagacttctagacataaggcactatctgcctacgaggctcctcaatagttcgtttgagaagattgtagaggagtgtttggggtacaagggagtgaggaaagataaggagatatgtatgagtaattggggtgctcgtagcctttcccatgatcagattgttcaggcgtcagatgatgtctatgtttgctgcaagctcggtgttaaggaatgtatctggaaagagcgctcgaatgttaaagaacgtatctggaaagagagctcgaatgttaaggaacatatctggaaagagagctcgaaactttattttgttggggtatgtttctgaggaaagagcttttccttgaaaataatcaatgtcttttcttttagttgtttggaattttgataatgaacgttatctaggtcaaaatctttaatcgccaattctcatgttgtgttaatattttttttttgaatacaaatacaatgcatgcgttattgtcagagactatgaaataaaaagacttgtctatgttaacattcctatgaaaatatatatgttttaaaatattgcatattaaatgaactacaggagtcacatacatgttacatgtatgtcgatatcaaacacatgatcatagatattttgaccaacactgtgatttccaaaggctcagattaagggtaaaagaataaattccttgctgagaagattaaatcgaaaaccaaaaaaaaaaaaaaagaagatgaaattggttgtgtgtggtcatgttggacaaggatgaaaaaagaatttgtgcaagtgtcgagtgatcgtgttttgatgcaacccacaagactatgatgggcctgtgctttctcttggaacactgctgaccccgaagaagagatatgcccgcgagaccgcgattccttagttgatcttttaaggtgtgattaaaaaatcattaaaaaatatgatttgtgtaaaataaacatgtatggaaaattgaaaagtatatataaaataaaaagaaatagatatgcatttttgtttatgaagggtgaaattatattttagtatatcagtcaaagatatacatactatggattattgttagcagttttaattggtacattccgattataattttgcggtccttaactttatactttttgattttcctcttctttttttttgtatatgataagtttttaaactttatataagtgcttctatatctttcatgacaatcataagcctaaacccatttgtagaaattttaggaaagtattaaaggatccacttgtgaaacaaagtgaaatggttgggtccactttcatatgtaaaaaactacactttgcggccaactaaaacctgtcaatcaatcatctaaggtcggggcataacgcataaaccaccatgctatggttcggtttaaacacctctttaagcaatcctctcacatttcaattgatatttcagattagtttttgctttggtttagttaggttcggttagtttgatttccgtaaattgtaaataaaatttaatcaagtcattttgatccggttttggttcggtattgttagcgcttgttagattacggttgtcttttcttttatataacatgtgttagatttcatagcatagaataatgaattaatgtggttagttagatgattgattaacactgaatgagtgaggtatgtaagatgcttgtttgcaatgaaatttgttgcagttaaaatcaagctaaattgacataatatagtatacattgattgaccttaataaataaaaacattcatattcacgaaaaaggattaaaagataaattttcgtaattataaatcataaataagatttttgtgatgaaacttacctatttatttctactgtatttataaactcttaacagaaagagaataacaagtgggtatgtgattggaaagtattttcactctagtgttgctaatttgctggatggcacacttcattaccaatgccaaaacactaataatgagaatttcacatggccttttaattctaaataaaaaattcatcttttcttcttgataatgaaaaatgtatagacattaatctaaaaagacaactaactggaggtcatatatttgtgtaatcacgtttatatcatttgccttgtaaaattattagaggagcactaataaacaaaagttgttaggaattgattttaaattctgaaagttagtgtagacataggagtgagtcagatatccatagagaacaatatgataatatgtgaaaattaggtctgattcattatatttacagtaattagttgattgaatatgtcatttatgcaatatgggagacaaccaaacatacacacacaagtggctacttagtgattagtgatctgaaattagtagtgaattcgtatgttttatattcaatcacgcatatatatacgtgatacagtagtaaaaccccataaaccatatatgtggataaacgggaagtactgttgttaactagtggtcgatatcttattcaaacttcgtaagactttaactcacggatgattgaatatgttcatattgtagcttactagcttagtatctcactcatgcaccattccataatttttgttttctttgtaaccatctcattacaactctaagctgatcaaaactcgtttttaattaaaaatatacatgaatacaaattcagtctagtgatttatgttagtgtcgtccatgtgttaccaattgtatataaatctcatataatacattcttttaaaagaaaaattgtactatcatatatatataaacgaaatgatattttgtagttaaaataccatttcatttcaaatttagcaaaaaaaaaaaaaaaaaccatttcagaggaaaacgtcccaagaacataaatatttagcactaacacacaaaccacaaacaacttattgttgttccaccgtgttgtgatttatccaccaaaaagtttaaaaccaatacctataacagtgtttgtagttgtatattacctataatcatgacattcctatagataaaaacacataagataaacaaatgaaattgataggttaggtgtgggcctcaacgtgtgaaattttggacatccatcctatttgctacaaacgcggttgggtctcatgaaatgcctataaatacggacacattctcaagcaaactcatctcacaactaaatcttaagtagaaagagtgaaacatggctaatcacaaaaatctcttctttctatgtttcttaataggtttagggttatgttctgctagacgagcactactctcctcctctgaatccgaggctgaagtcgctgcctatggcgtgaatagtggtttaagtgctggtcttggtgttggtattggtggtggtcctggaggaggatctggttacggaggtggaagcggtgaaggcggtggagctggtgggcatggcgagggacatattggtgggggcggaggtggtggacatggtggtggtgctggcggaggaggaggtggtggccctggaggaggctacggaggtggaagcggtgaaggtggtggagctggatacggaggcggagaagctggtgggcatggcggaggtggaggaggcggagcaggcggcggtggaggtggtggtggtggtgcacatggtggaggatacggtggtggacaaggtgctggtgctggaggaggatatggaggtggaggtgccgggggacatggaggtggtggaggcggtggaaatggtgggggtggaggaggaggttctggcgaaggaggagctcatggtggtggttacggagcaggaggtggagctggagagggatacggtggtggtgctggagctggtggacatggtggtggaggaggaggcggtggtggttccggaggtggaggaggaggaggtggaggttatgctgctgcttctggatacggtcacggtgggggtgctggtggtggagaaggaagcggtggctatgtaccatgaaaaattatctatatggagtgtaacggcaattgagtgaagtgtcatatctcgtaagggactatatagtttcacgatttatatgtggcaataaatagagtaatccttcgtataataagccgtagaaaggcggctattgttgaagtttttaaattgtaccacgaccaatattgttgtaagctactactacgtgtgtatcaagtttttataaatggaaatcatagttgttcctacgcgtgacgtagaatctatattaaataaattttacggagtatgcaaagtaaggtacatgagtgaattaggacacatacaactttgatttggtacatgacaacaagtgacaatatgaagaacattaaaaacatcaataatgcccaaaggtttaattgacattaatttaattgggccgaacttaattttccaatagtttcaacctctataataaacactcttaatattatttacactaaaaggcccaaaggttatagaaaattagagccgacccataaaaccgataataaaggatcagatccgacccgataaaggtaagcagtgtagcgtcgcatcatacactccttcggttcccgacgaatcgctgcttttttctctctctctctccgtcgctgaaaaatgtcggcaagacctgaaggaagtccgccggaggttacgctcgagacctccatgggtcctttcaccgtcgaggtttctctctctcactttttcgcttatcggatcaacgataacacattccggccatgacattcatatatagagcttacacgaacttgagatctagatttcattctctataattctacattccaattgtatttttctcgaatcgagcttaaactttaggattttagaacggggttttagggtttacaatgttttgatctgtgtgtcaatttttactcagatgtattacaaacactccccgagaacttgccggaacttccttgagctatcccggagaggttactatgacaacgttctgtttcacagaatcgtcaaggtatgttttctgtgtgtttcagtctacttttcgttgtacttaagatcatcattgtgatgaagttttaaggaaattgttttgctttgctattgatctgtttcaggatttcattgtgcaaggtggggatcctacaggaactggaagaggtggtgaatccatttatgggtacgttatcatcgtttttctttaatcaatgctagctttgcttgttgattctttgtcagtaatcaaatttgaatatggggacacaagcaagctctgatgtagttagttttggtgggggatagaagcaagctctgatgtagttagttttgaagtgataatattcaaagctctgatgaagtaagcttcattatggactaggctctgtgactagaagtctcaagttaattgacactactcaagttgctttattcattgtccattccattcttgttttgtttaggtccagtcatgtgttccagaggcttgatcttaatcttagcatttgtcttattttattttattttttgccttgctccttttcctagttcgaagtttgaggatgagataaacaaagagttgaagcacacaggagccggaattttatcaatggcgaacgctggtcctaatacaaatgggagtcaatttttcatcaccttagccccacaaccgtccttggatggtaaacacagaatacactcttttaatagcttacaatgttttgagatcattttccatgtttactaagagaacttgcattgactgttgtgttcttcttttcacatctctatgcaacttctaggaaaacacacaatatttggtagagtgtgccgaggcatggaggtgatcaagaggctcggtagtgtccaaaccgataacaccgacaggtaaagttgattattcatttggaatcaacaagaattaaccaccgagtgaaaaaacccaactaatcgaaggaatctcttttctattctcaatttccaggccgatccatgaagtgaagattctaaggaccaaagtgatcgattgattggggcagaggagtttttgtcaaggagaagaagaagcatttagtaaaccgtttatgacatgaagaactataactctgtgtactgatcccttgatactattgtagactggtttttgtctaagtcttgactctactttgatggaaaaaaatgattgaaatacgttaaatcactctctatttctttttgtaatttgcctcgttcatatcaattcaacggcttaaaaaagaacacgtcatcaagattttcatgtttcaactcatatcctctaaaaagctatctctcactatgtgaaggacgcgacagtaggaaaatggctttcgcagcgacgctcttcgttccacctccagtagccgtccgatctccggctagattccttggccgtctctcaattccttgcctgctccaagttcttccgactaatggtgcagcgagtccccggcaagtgaagagggcaattgtagcaaatgcttcgccgggaaacggtggcgttaaggccgaggaagaagacggagtttctctgggtactatgaagcttcccgtagataccgatctcgctagattcgaaactcttctatttcaggtaaatttgtagcatgcaatagctggaatagctcagttggttagagcgtgtggctgttaaccacaaggtcggaggttcgacccctccttctagcgatcttttctttaacttttactttttttttttgttttgctacaacagtgggcgaatagtctttgccaaggagccaatctacctctacctgttcctctcaaggtactaatcttgcgattactcaaaaattatatgtcaacaaatttggctacggatcatataaattgtaaaaagctaagaagccacttttttttttgttataggtggacagaataagcggaggagcgaggttaggattcatagtgatggaagatgaaggcaagaccgatgttccggtttacattgactgtttggttttccaaacaacagagaatggtgtagtgttccaagcgacgcgtaatgggcggaagaaagataaagcacctccgggagaagaaagaatcatgagaagtctcttaggagccctcaaaaaagctgtggagattgctcgagtcacataaacatttgcctctttcagttgaaaccgaatttcgaatatctcttttgctctacgtctttctagtttcttactgctactactacttatctgagacatgatcactggtaaataataaagttttaaagtttggggtcacatgaggaaacaacactagcaactaaagtattatgctataaataatcgtgttgcggagctatcaacaaatgacaatttggccgagtggtctaaggcgccagatttaggctctggtccgaaagggcgtgggttcaaatcccacagttgtcaaatattttttttatattcttttgtccagatatcgttaaaacgtcgtcgttacaaagtgggccgaagaacccaacaagtaagattcggcccaaatttacgtggaaaccctaaacgctcgttttctcactaagaagtctcataaaccctaatatataaaagcgatttctgattcttccatcgtttctctcttgcaaaactctgtgtgtaggcggaactacagaaccaagagcctctttctaatcggagttactttaatccccttgaaccatggtaagcctcttctgcgaaaagttttcatcttttctccgattatctcagattggtttgagaatacatatgtagattttggttgttccattgtttcttcgagtcttttggagttaagaaaatatctatctttctttgttttggatcctgtagctgttgtttaattggatttgtgagaaaatgccttttttattgtctaagcttgtaatctgaatttgctatgattattagattatcattgagttcgatttgaagtgatattagagattgggtttatgaatcatgcgttaatgtaattcttgaagcgtaatgtaattgagtgttaatgtgtattttgtatagtcaaagagaaagactaaagagccaaaggtcgatgttgtgactcttggaccatctgttcgtgagggagagcaagttttcggtgttgtccacatctttgcttcattcaacgacactttcattgtgagtttctgtctaaattgagattccatttcatcatttatgctgttggaaactgacctcgtatatctccaattccagcatgttactgatttgtctggtcgtgaaactcttgtccgtatcaccggtaagcatcttttgatttcttcactggtccttgctcattcctctatatgtggaacgagaccacaaatgttatactcttttgtggatatgacttgttagatgaattgttatgtagtgtctcaattctcttgattagttcttgttgtcctaaacatttcgataactttcctcttttgattttgattaggtggaatgaaggtgaaagctgatagagatgagtcctcaccttacgcagctatgcttgcagcacaggatgttgctcagcgatgcaaggtacttactacatatatgacctgagacattcattacaaaactaaattcctcatcctttttaatgaatgtaaactactattctaaacacaggaacttggtatcactgccatgcatgtgaagctccgtgccacaggtggaaacaagaccaagacacctggtcctggagcacagtctgcccttagagcccttgctcgttccggcatgaaaataggccgtattggtaagcttcataacccatagtcttatctcagctattttcccttttgtattgtttcctcatcatttctaacaccgtacttgttgttgcagaggatgttactcccatcccaacagacagtacccgcagaaagggtggtagaagaggaagaaggctctgagtttttctcgcattgtgggatgttttctatttagctccatgtgtttcattttgtctgaaccatttttgtttgtgttagattgttgaagagctttggagtttaacactttttgttaatttaatcaacatttttctactttgatatgtgagtttggccttaaattagtataattggcttccatgattgctatgatgttttgagttgtcatgcccttctcaccgggaaatttggttattccaaattcatccaaaatgttcaatgctgcgaaaaacagtacccagatcatgtggtaattcgtaaggtgaaacttcatttttcgatactgtttatcattattgtattcaagttaaaaattataacagcaagataatggaagtttgagaggaaaatgatagtgttctctcattccccaactcaaacctgataattaccatgtctagttcaagtgatggaacaaaacacaaatcaagaatagttaaatcatacatgtgtgaacttaaacttttaatcattgaagttatcaatcagctcacgaggcaattcatatgcgaatcaaaagatggatttcttgaaacttaagaacactactgtgttcaatatacaaattatgaccacaagatttgatcataaacttaatttttacaatggaagttagagagcgaaaatgatgcgttctcgtctccaaatcaaaccatgaccagttcactgatccagagtaaaataggacttcatgtggtggaacagaacaacaatcaagaagagtagttaaatcatcatacatgtatattgctttatttttttttgtttgtttgtgcaaattgtgttttgttgataatcaacgcacactatgatccatacgttaatgggctttggaattgagggcccattgtaataatcaacacaaaaccctaagaaatggataaagtataaagcttcattttttacactgcaaacgccgtttcgagacttccggcgaagaagacgaacgcaaagatgcagattttcgtgaaaacgctaaccggcaagaccatcaccctcgaggtcgagagcagtgacaccatcgacaatgtcaaggccaagatccaggacaaagaaggtatattttctaatgctttttaaaaattgtaactttgaaattgtgatctcttagtgattcgtttttgctctgtttcaggaattcctccggaccagcagaggttgatcttcgccggaaaacagcttgaagatggtcgtaccttggctgactacaacatccagaaaggtctctttctcgaatttgaatgttttggattctttagaaaatgaaactagtatagctatgattgttttgttgatccaattctgttttgtttactataaaacagagtcgactttgcatcttgttctgaggcttaggggaggtatcattgagccttcattgatgatgttggctcgtaagtataaccaagacaaaatgatttgtcgcaagtaagatctctgatcttttctctttgttgttctaagtgtaccatgtccatgtgtgatgattatagtaaaaatggggaattaacttaggggtgaactattattcattttctacgtggattatgattctcttagtttgctgataaatgtattgaaatctatctagttctttcactgtaacactatggttgtgtgaaaactgtgtctcatgtttgagttgttaaccttgttggtttaggtgttatgctcgtctccacccaagagctgtgaactgcaggaagaagaagtgtggccatagcaaccaggtttggttttttgtctctttagattttaaaattccacagaatttgtttgatttgttagttgttaagtgtgattttctgtttatttttgcagttgaggccaaagaagaagatcaagtgatcttttgttcaccaaaagcttatttacgttatttttgtgtttgctttgagaaagactcctctattgttctgacacaaaccttgtttcagtgaattttgattttacgattattgtttagtaaatctgatttttggctttttttcttcatcaattctaaaatctcttgcaaagtttcttcaaattagagttctgcaatccgaaatataaatttaagagccccattattcatctgttaacagtctgtgttccaagcattgagactctctatggtaacagtctatgttccattgttaaatcacatacaagcatgcattctcttatactcttgacgttatcactcttcacgaaagctccaaagagtgatcattcggtactagagagcttgtttatgtgtaaagagtgtaatatcataaacaagcaaatatatcaaagattcttattaagagatacgtaattatccatctatcaatatcccaataagctttgactttcaagagttgacctcagatcttcatgctatcttttctttttaaatttgaataagtcgaaactaactagtatagaattagaaacgaaagcatatctcaaagaatctttttattggtagacgagattaccacaaatctcaaacaaaataattcaacgacaattgctaaaaaagtgatcatcaaaacgaattcataaactaaaaagcaaaacaaaaccaaaagactattaaactattgatgaataagatcaatgtgactctttgttagagttcatcataatcttaaactcttcaaaattaacaaaaccatcactgtctttatcaacggtttgaaccatcacaacacaatcttccattgtatgcttctctccaagtcgtttcaataccacatgaatctcactcgctgagatctttccatcaccatccatatcatacaaatcgaaagcttctttcataacaacttcttcttcggtatctttttctcctccaccattgaccatcaaacacgaagcaaactccacatcatcaatttgaccatcaccatcgacatcaagaactataaacatcttatcaatttcttctgatgttatttgaggagaaaaaacgcgaatcgcctctgcgaattcgtcccataaaatttttccatctttgtttttgtcaacactttcgaaaatctctgccatagacattgaatgagtaatattatggtgatagatattgaatttttgtttgtgagaaagtcaaaaccttagtatttatatttatagaaaacgaatgttattgttttgattcctaaaagatttggttgaatcctaaaagatttggttttgtgaagtgatttcctttttacataaatttctatttcttttttaaaaataataaactttatggtttttgaaaatagaaaacgcaaagatcgtttcctatttttcttgttgttttgaaaacattttttttttaataatctatcatcacatgatttaattttataagattatattagaaaaatttgatagtgggcttcttcctataattattattttcttaaaataaatttcaaatctctgttacatatacatctcttaagcgcattataaaaatgtcacttacaaaaacgaatagtttaaccatgttagtagattatttgttaaaacacttgcacctgattgataaccaacgacatattcttgatgtttggtctaaacttatttttattgagagactaaagacagaaagatacaacagtcgatacataaagtatggacatcacaaccaaattgttcgtaaacacagaaactcccacatttttcttcctaatttcacagtatctctcagttactatactgaagatgaaaatataagaaaaagtgagaaagagagaagacggtatagctaaactatagagagaagagctaaattaaagagctccatcattcatttgcagaggacgatccatattccaagcattgagactctctatggtcacagtttgtgttccattgttaaagacatacaaatgtgcattctcttttactgctttcactggatacactcttgatgttatcaccgttttacctaatgctccaaagctctctactactgaatgatcaatctgtaacaattaaattccattttatgtcacgttacataataacataaacaagcaaaaatattaaagattcgttcatatatacacgtaccaaactccttagagagatccttccatcagccatatcaacatccacaaaaccagcaaacgatggtttatacatcctatcttttgcgagtaaacccgtgtcttgctttaacgacgacctataacaaagaagttcaaaaatataatgttacattataactaatggaaagcatattgtataatagtatgtaattataaagcatatatatatagagagagagaaatcatgcatggaaacgtacggtctagcatcggagcacatgagaactttaggcttatgagttttagtgtcgttgaagactctaaagaagacaggagtgtactcttccaaatcaggagtcgctaatgtgatcagaccaaaaggtcctacaccgcctctcacattcgagcctttaatgttacacaattccaatggtttccacgtgaaactcggatcgaatatctcagctttctctagacttccaacatagaacgttacttccacatcggcttgagcaggagtgattcctttgacttctatgcgttgacccatcttgatgtcatgattgttcattcggacgtagttacctcttaatgactctatctcttcaacaggccaaaacacaagttgcttcttgcttgaatcaaggagcaccgttcttggaatcacctataaattcattacataatttaacataaaatttcattatattaacaaaggtatgggttttaaattaattagctagatacctgaagaccagcccaacccttcaaaatatcatcttcaacggtgtcagattcattagcccaaccccataagattcttctgttctttttgtagtcaaagaatgtcttggaagcgtagaaattaccgtaatcgaatcttaaaccctcccaaccatcgggagtattaccgtccggtatgtaccggtccttcttaagatcgtatttaccaagcgtgtaatactcgtaccgggtaatgtccaagctaaccttcaacacatgcttggtgtttggaccgacgtaatccaagtccaaaccgtttcggaaatcggttaaggaaaccgggaagaaatcaggacattcccacataccggttgactgtttagagtgaaccgggtgcttagctttgacccaatgcttgaaatctcggcttctgtagatgtaagcaattcctctacgctttctttttgaccctaccacggttctccaatgcccgtctttggagaaccaagcggttgtcgggtcacggaatgctgaaccgttcattgtatagtctgggattgcaatcgggttatcgtccggtttaatccatttccttaggtatgggtctgatgggtcctctgggattgcatagttttgcaactgagtttcgttctggttaacaccggtatagaggataatcggtccttttcccggtacgattgttattgaaccggaccatgtacctccgatgtcgaaccattttgaaggactaagagccggttcaagagcctcccagttaaccaagtctttagaaaccgaatgggcccatataatattaccccaaaccgcacctttggtgttatattggtagaagagatggtagagacctttgtagtatactggacctgttttcgaaaaaccataaattaactagagtatctcgtatgcaattaacgatgtgtaataagacccaaaaattataaaaactcaccatttggatctatataaggattgttgagaatgccacatggaaacaaacaaaaacaaaaacgaggttagtttagtttgagttcatcataattagattatgatttcgagggaaataagataagacaagaggattcgagaatacataaaaatcacatgaaattgaagtctttggtagaacaagttgaagatgaaattaatttcatgtgatttttccatagaaaaaaacaaacatagcagtgttctcacgttatatatgctgtgttttatattggtgaaatgtgaatgtctaaagatataactttaattaatattctatatacaaaaaaattatacataggcaacaaggaataatataaatagcccatgcaaaaattagtttctcccctgcactttcatgacgtaattatcatacgtgagattattaaggaacggagaagttttttttttttttttgacctagatcggtgaagaagttgtattaattgttgtatcgcacaaactataaccaacaaaaaaaaggatttgaagaatttggagatctcttatcgggcaatgcaaataacttcttagtgtggaatcaactttcatttcacaagaaaaataaaaactaacaccaaaaccaaaatcattgaaaactaaaagaaacaaatatttccaactaaattttgaagagagggagagatcaaatgtaccgttaatccaatgctttggaggttgaaagtgaaaactaggtctgtgaagatgattcactgactcgactgattcagattgcaattcttcgtaaatctgatgaaatgcatcaattcctttgatattttgattgcttaaattgattagtacaagcaataataataagacagaaataacatttgaaatagccattgatccaaagactcaggatctgagtggcgtttgttaaatgtttttggccgtgtagtatttaagttgaataaggagagaatgtgataagtggaagtagtttgttgtaatgtttatataggcgaaatatgaggaggaagataacagaaacatagataatttttaggataatgttaatccgatccgaagatttttactctcactataattagagaaatatacatccggttgaaattaaatatgtttggtcggcggtttgattccttatatctagggttttctcatgtgtaatcaaacatatcttaatggatgttttaattaaagtgtgttactggaatatgtgtatatagattaggtttcataacttctttgacgattccgttgctcaaatgaagtcatggcttgaatattttttttttttaaaaaaaaatctaacaagaattatatattatagtttattttttttcttcttctaatttaacgtggttagtttagcaaatttcaaactatatttttgtcacaactaatcattaatttctattaaaaaaatccacacgatatcaactgatggaattataatggaaacggaaatccaaaatataaggatttaataaccaaatatttaattagtatctcatttttgattcatttttaagaagtgatgcaagtatctttctttgtggatagcaaattatgtaattatagtttcggtaattatcttttcttataaattgaccgtagaagtaggagataattatccactatgtaactaattggtttatcttggattaattggcagaatcgtatgagttcaaatattcagacccaaatatactccaattaggtgggttatatagtaaaactcttaaagtgactcttaaaaatcttggtgtatggcttgagctctaaagtgtttcagaaggcaccacaatagtgcctaacatttttttcaaattttgcatagtggttaattctgataatgatcagcctaattaatgcttcctatcaattttgtttatgtcagtagaacaaccaaaacaaaattgataagcagcattagtttaaaaaattattttaaaattcagttgtatcgcttccaatataatcggtctaatcaagaacgggttcaaaggtgaactctcagagacaatgcttgaggcataacgaatcttatgttatatgtccggttatatttgagcaatttgccatcacatcatcataacgccaaaaagtgaatcaaagagtcttcccgcagtttacgttcacattttcagcaatatatgcacttacttcccccaataaacccaattctccggtttgcttcaaattcagaatattgttttcttcaaaattccggttgtgcctaaaaactagaaatactgccacaactttttggctagtgatgttgattccatttctataattgtgaaacatcacctacaactacaacactttgcttgcatcttttgtgtatatgaacctgcagtgactaacaccatgcttaactaatcgttaccatacatatatttgaatgaaagaaatttctcttggtggatgtataattccactatattgatgttccactttctaaaatgaaagacctaacattaaaagcttgatatagaaaccatacttgacattaccagtatcattacatgtcaccttgagctttatatatacacaaatgcgatttgtaataaaaatcccaagtgaatagtagttgctgagttgtaaaagttttggaaattgatcacgaactaaaagagttttcatgattgttctttttttaaaatggtaaaagatgattctatgagaatctctcatgctcatggtttttagaaattctcatgggaagtgagaaagatgaattttctgagtggcacagtgactctgatttcacaaaattctacttgatttcccacttaaaatgttcattgttgggattttaaagcatcttcatggttgagtcatatatagaaagtgatcaagtggtatatgcatgcacatatcacaaaccatcataaccaaaaagggtccaagattcgcattatgtaatagtagaacaaaccgtctttgagaacttcgattactgtaagagaatttcaactactcgaataagaaatcatagattacaatgatgaatatttcaaatgtgtcagaagcatctgactcttcattgattgatcccacactttcacaaaagtatacatagattcatagtgatgatacagacacagacactgattttgagggttttaaaaacaaaatatcatataatggaacagaggtggttccttagttgacttgtgagagaggcgaccgtgttagctgttgcggttttgtttccttggtcgcaaaggattcataagagttgttttcacggaactcttcaactaatgtctcaattggcatggctcgtagtgattcaatggtggctttggttgggatctctggttcattctttgttggagttgcacctgtgggctcatactccatgtattgttgttgaaaagtttcttgagctttatcctcgatgcatctggcttggcaacactgatcctgttggaaactttcaagagttttttcatgcgacctgacattttccaggatttttgatacagacgctttttcatcctctgacatgcctgaaagattacaaggatatcggtttatgattgggagattaatgatcatgccaagaaactcttttatctaagaaacagtcatgtgcaagaaagaaagctcacgttcaatttgctggattatatcatcgctgttctttgttacatctttttcagcagcagtccttgcagaatctacttcggcatcgtgctgctcgttactatcacaagcagacctaaaccaaacttgaagttaatgtatggtagcataacatgaagagaaccataaaattaaatatagccagcgttaagaagcgaatacatgtagatgaaatgaattcagaacaaaacttaaaccacttacctaacaagtgaagagacatctgtgacttgcttactggtcatctcctttagagattcatgagttatcttgcagtgtttgaaagctgattccgcatgacccacactaacgcataaaaagataaagagaggttaaaatgcataactgaagatttgtatctcaaaggaattgcaaaacatagtaaggaacttacgattgctgaagcagtaactccattcgacaatgttttgcagccgagaaatcagcaccttctctggcttcattctcagcttgcatggaaaatgtctcccactttctttttgcgtctttcgtcagattattaacagcagagacatgttcgtccaagaaagttttgttggaagagacggcatctttaaagttatggagtcttgaatcaacctgccgagcaaaacatacagtttatgtgacacaaaacgggagagagagagaaacaaatgaaggaggaagcaacgaaccaattcgtgttggcgacgaatgtgacttgagactaggttagttaaatctgcaataagtttatctgtatcagattttgactgagcctgcacaacacacat

SEQ ID NO: 336 - DNA, 91354 bp, Arabidopsis thaliana
gaattcattcaaacactaatctataaagatttttgaaatctattctaataaaagttttcttcaccttctttggaagttgaggaacttgataccataagcaaaggcaaagagaaagatcaagatccaggcgatgtggacaacggctacaactggtaagaagtcataatcgaacccgaatccatttttgagcaacgttttaagactcatatctccaacaccagtgatgtgcacaatcgaatccctgtctcctacttgagatgtgatgattccatacaatgtccaagccacaggtgatgcccaatagtaccatctccaccatattggtatttgctgcatcaaaagttaaaagtttagtctagctcttaaaacactttttttttatattattaattcaaatggaagttgcttagtttatttaccggtctagggatgaggaaaccggagaaaagattccagaaactgaggaagaaggacaagcagattccagctatttgatagtttggtgtcaaggcgacaagcatcataccgtatagggtgaagtagacgaagcatgttaacatgtagtagtagaaccagaagaatttgaccacagtccagtcgtatccgatcatcgagtaaaggataagtgtgtaaactccggtttgtatagtgttgtacatgatttctactgctacctgcatcatttttagataaccatatcttaggaaaagtagcatataaaagttgaggcaaaattattagaatggttaagtacctgagaaattgcatagggaatggcggagtacattccagcggctttttcgcggtagaaaaccgttcgctcaatagcaactgcgggttgaactgttgcagcgttggtggcaccgaggaacaatacagcagcatacatggctccaaagaaattattcaggtcttgctctttctctctgttttggtgtttttggatgaatacgtcacattttgataagatgatagtttacttatggaatagagaaaagaagatgccttacattttagttcctgtttgccagaaaagtagaccaaacaagacaccaatgactactgtcatgagaaaccgaatggcattgtactgaggatatctccagtttgaccaatacattttccagaagcaagctttggtttgagtagaaaatggttgcgcgtacttggttcggaagtagagatcattcgatcccggtggtggagtactcagctctttgatgagttcctgatttctcctgagtaaaacatcaagttcatattagaaacacagtgtaacaactctgcattagtagtagcatttttcttaaaacacataccgattaacagaggagttaacgaatatttgagcaaagtccacgctcatttgtgactccattgaaggagtagtgacgtcaagcatccacgtcgcaggattgtatccgtccttgatctttggaaccccttcaatagcctgcaagaaaagttctagatatagttccatattcatatgaccaagagagaggaaaagcaaaaccaatgattcacctcaaagtattcaacgagtttttgtgagtgatgtcctagtgttccagcatatataacttgtcctcctcgtttcatcaacagcaactgcattaaaccaaagatgattgattaactttatcctggttcagggacttaaaagtggaaaaaatttcggaagcaaacctcatcgaaggattcgaaaatgtcgatgctaggttggtgaattgtacaaacaacagttcttcctgtatcaacagtattcctaacagtacgcataacaatggcagcagctcttgcatcaagaccagatgttggctcgtccatgaagattattgatggattagctaccaattcaactgctatagtaagcctcttcctctgttctgttgaaagaccatctacaccaggaagaccaactatagagtttctaagaggtttaagctccaccaactccatcacttcctccacaaacatctacatgcaaaaaaaggttaccagattataaaatcatgcgagtgattatgaaaaacaaatgaaacgttatgtatagtaatacttacctctcgtgttttggtatctatatcggcggaaagacgaagccatgctgaatagataagggattcataaacggtaacatgtggagaatggatatcattttgctcacagtaaccactgactctagcaaatgttgcttggttctttgggtaaccagatatgttaatactcccttctacatagcctcctgttttcctaccggccaagacatccattaaggtagtcttacccgcaccactaacaccgaccaatgctgtcaatacgccaggcctgaaagctccaccaacgtctcttagtaactgaagtcgatctccttcaactccttgagccttcatttcctgcagaatttaaaggaaacaatgaatacaactaaaggtgcatttgtaaagcgatacaacgagaacaagtatgagacgcagttgcttactgcaggcatatccacgtagtagttcacattgttgaatgctagagaaagtggttggaaaggtaaaaccattcctttctttggtccatgacttgaagtactagtgagttccactacagaacctgcaacttttttagtagagtcagaataaccaaagtgaaaaggctgcagaattgaagaggtaaaagatttcacctcctgttccactgtgactccctttgtgtttgtctttaccttcttccacaactgtagtagctttggagttaccaagagctacaagaaaaaatttcaagatcttgtcaactaaaaatgattcttgttctgaatagtcagaaagttcaaaatgagagcacttacggttcaaatacatcaaggctattatgtaacagaagttgaacaacacagtaaacccaagtagcgccccaatacagatccaaaaccaatatggttctgtaaagaagcctctgctcttcagcaagacttctccaactgttttcgcgttgatgcgtgtatcattgtttggctgcatcatgtaacataacagaatttatatcacaatttgaaaagagaagtcaaccagatgaggtctagatgagaaatcttacgctgccccatcgctcatccaaaaattcatttataactaatgcagtctgtccatacatcataggtgatgtataatagcaccaagtcagccacgacgggatgtcatctgcgaaacaagacataatatatgtttcacttaataatcccatagagaaagaagctgaacacgatatcaaaagggattatctgcttacctttagaaataataaagcctccaagaacaaatacgactagcaatgctaatgtcccgccagagttggcgatgacttctgttcttccaagggctccaaggaatctaaataaagaaagtgccatctgattcacacagaagtatgctagcaactgccggaagaacctaatggaacaagtttggttagttcaagggaatgacaatagaagcaaaaaaaacaagttccttagtgattttcatgagcaaatgtacctggcagcagaaggagcaaaaccaatagtgtagtatgtaagagcgatccatataactgattcaataagagataacggaatcttgagaagaaaaccgggtaatgcgaaagcccatggaggatagaacaagaagtccctctgcttgaagaaaaccggaagcctcatcactgtgaaggctagttcagccattccattaaacattagattgatcaagctgaaaaagagagcaccataaaacttttgaccatcttgcacagtgccgacatgcatttctgtccgaaaataaaccgtcatggcaatcaaagacatgatggttatctggacggtcttgaacacgtacacaaaggagttacgtttcataagaagccattctctatcaaagcatgccttgaatagatccttgtttgatataccatacttttgtgtcactagtgctgcaggatgagtttttgctttgtcataaggaaccctgaattctgaagcaagttgttgccctgcgtgaaaagaattgaagccgcttgagaagtcatgcactgatacatagctgtaaggatgttctctcctgttccaatactgttcttggtccttcttagacgtaacttcttgcagaaaatctgcaatacctttcctttcaggacatttgaaacccatgtactcaaagaactcaagaacgttgtctcgtgacccctggtagacaatttggccctctgagagtaggataatgtcgtcgaaaagctcaaatgtctctggcgcaggttgtagaagcgaaatgaccattgtgacatccgcgatatgaactagttgcctcatgaacttgcaaatttggaatgttgtggaactgtctaaccctgttgatatttcatccatgaaaagagctgttgctggtccaaccaacatctctcctgctcattttaaacaagagacatacaagtttaagaacacatattcactgaaggaaccatgggaatatcaaagggaacataagttgtacctgttgttagacgtttccgctgtccaccagaaatacctcgtctcatcacatctccaacaagtgtgtcagcacaaatgtccagaccaagtaactgtcaagtggcattaaaccaaggataaggtcaaaaattgtttgttagaataagacagaagcatgcaaaaaagatgtaccttaagtacatagtctgtaaccaaactagtttcttggccagatatagcaatggatttcataaatgcatcaatctcagggtcaggcttaattccagcttctctctccctccttgagagctcagtcaaaagctggtaccgagtcccaacacctaaacatcgtcccgaaaagtccaatgactctcgcacagtcatttctccaaagtgaaggtcatgctgactaatgtaagcacaagtcttctgaggaacaaactcacgaaactcatgaccgcagtaagttatcctcccagacatctgtcacagaccccggaaaatgttaactcaaccaagagcttacatacatataaataatataaatatgatagacaacaaaacaaacctggagagtgtcatcaagcttcccagctaaagcttgtaacaaagttgttttccctgaactaggtggaccaagtaataaagtcatccttgatggtttgataatgccacttatatctttaagaatctcaatcttcctcttcttagatggaagcaggtggaataatccaagaatactctgttttacaaagaaccacaagaatcttaagtaaattaaagagatcaacagttacatgcaattttgacattcacacataaagtttgacattttaaagatatctaatttggacccgacaagactaaatcccaaaaaggttaaaaatttatgccaagacacaaaaagcggtaaagttaggttttatcttttttagatcttctcaacaacattgaacaagacaaagttaatccaataaaaaaaaaaaaaaactgaacctcgattgtattcaaagtgacgttgaagagagtaggaagagctctgcttgcactacgaacatctccttccactgaaagattctcataccttacttcaattttcggaacttcgattcccactctgtttcaaaaaaaaaaaaaaaaatttgtcagacgagacaaaagttgtaataaaaaaaaagagttgttgttcttgtttttggttttgtctgaaaatctgacctgtcagttctttctctcaatcgccgaagaaacttttcgttatcttcttcaacgaatttcagaatcatttccataagatgtttcttctccttaggagcaagattcgtgacgtcaacatcttcaagtccaatcttaccgttgaccatcgtttgcggcaacataccttttcttaaccgatcgtaagtcggtaatctctcaagcgccgcccatcggagctccacgtcatcttcttctcgtctatcgctccgaccaaacacgtcgtccgttgggggagcaaacacatctctgaagctttttgaagcagctccggctaaactccggtgacttgtggagcctaaacttcctctcccgctcattgttcggaccagatcttcatctcgtcctaacatcgccgctgagtcgtccggttttactaatgaatgttcgagacgatttagtttccggcgaccatttaaaggggagagagaaactctggagtgagagagaagagagaagaggcgagtttaaaggcttcgagtgacaatattttttttatttataatacaatttttttttttgtctgttttcttttgtctagtaagactaacaactgttaaatatgatttaaatagtattttatattattttccgatagaaaatacttaaaaagaattactagctatatatatatcgatttcaattagttataaaatcccaaataaaattaattactatctatagcaaaaatgaaatgttgaattgatatatgtgtttgttagttatttgtatcatataattttttttagtaaaattagttagtccaacatttagtctgttttacagatatttgtttttgactattgatgtctaaatgagttgatggattgccacctactgttcagacgtaaatggtaaatatgatttattttacatcatttcgataaaatatactgaaaaaatttagttctatatttaaatcgatctcaattagatagaaaatatcaaataaaattcaatactatatataggaaagataaaatgttgaattgatgtgatatatgtgcgtgttacatatttgtatcagataacttcttatgaatttattttaataaattactatgaagaataacattgaatttctgatgaattagtatatcttatttatattatattgtttgtaacatatcatagttattttataaacaaaataaatatagacgtatatatatatataattaagatgtatttcctagctttcagtgtaattagtttaggtgaatattttagtaaaattagttagtccaatatttagtctgctttacatatatttagttttgataatggatgtccaaatgagttgatggattgtcacctactgttcagacgtttattgctacatagtacagtcgtgttattaggtgtaagaaatctacattgtatggtgatcagacgatcaacattcaacataatccgtctaactgtttgctatgttcataatcgtaagtaaatggtaagtcgtccatactattaaaagttttcaaggtgcttttttaataaaattgcattaaaatctaacacatgcatgatcttttacttaagtatcaactgaaattcctccaacggaattattttgtactaaatcaaaattgttgcctattaatttttgttttctgtcgttttaaaattcaaattgaggatttggaatgtgtgtgaattgtaaaaaataattaaattccatcgcataatttcttccaacgaagttatgctttcaatttcaattaaaaaaaaaaaaaaaaattagtgattttgccgcaaacggtggattcttatagcattatctcgttgagttacaattttacaaattctgtgatgatttgattagtttaattttgttgatattgtaggtagtgtgtctaatttaaacaaagtaatatactaatattacggattgaacgtgtctctcgtgtctattcgtagtgatgtaattgcttgtgtcataaatatcataataaaatgggggggaaaactaaaatattttttaagggaaatttagaaaattcagttgaaaaaaaaagattaaagtctttgcgcatgacgacatgtaatattgttgggcatttttaatagggttatttccactttaacaaatacatgaaactaccacaatttcattttaacagtataaactacgatgcatagatagagctaaattcatcgggaaggtactctcaagtttcatcttaattggacaccaaatgcaatcgaatttttttgttttgtcttttaacagcattacgtttgatatttttggttagttctggttctctttacaaattgttgtttgtttgatagtgctttcgttagccgaacaatgacaaaacatgacctcagatggtcgaccatgcattctcagtgtgaataagtttgaggtgtcaggcttgcaaatatcgcacgttgaacttctgagtttaaaggctgcactgacttcgattaggaaagttcaattcttatatgagtttaattctttttaccctttgcaatacgaaaatataaatcctcttctaattctaaactaggttccaaaaattagttacggtttcgatttaaaatattcctaattctgtatcaaattttggcaacgatacctttttccagtacattggacactggacacccctaggaaactatgcgatcagaaataatatatacagatgctataatctgctttcaaatacaaagcactaaactgagacaaagcatatctttgaagattccaaactttgaagggtatccatattattattcgataatgttgaacttacttttgttttttttttatctttgcgtacaatttggaacgtctcttactcttttgctattgaagtttgaatttcatataacatacaaaatgagatttatgttaacatgggcacactctaacagtagaaatacatatgcataatataattcacttataagtatatggtgctttaatagaagctggtagttgaaaatttgaaggctatttttaacagaaataaattctaaagactattttgagtaaaaatcattcatagggcgatctatatatagtaccatatagatgattgtgagataatcaatgaacgtgagtagagctacacatgtttgaatgagaatatcggacggtcagaaataaacggaagagatatcgcaacccacgaagtaagggattttcatcacatgacaacagtcatcaatttagctattccctatgcattccattaatacgataatgaatggtgtgtggcatcatcataaccacaatcattaattaataataccttaataatcaaatacgatctttttttaagatttagagagttcccaaaatgtttaattattttaaaattttaataggtaaaaatttgcaggagaacatccatgtgctcaacaaattggtgagaggttttgttgtttcttttatttttgtttaagttctctctatttatcgtatttgtgctaagcgcttaactcatcgaataagctttggataattcagaacctaaacttttgacattaccagttataatttaatccaaataatgacaaaatattatatctagtttaatttaaaacaacacatgcacacgtaatgtatggcgtcacctatgacgaattgtgttttcttatatttattctttcctttccctaaaaaaatgaatagagcgttattagtttatgatttttatatacatggacggttgcatgacattttttttattacccgttaaaacagtgtcattcatcatatttgacctgtcaaaaactcacgtagcacgttacaaatatatatatgtatagggtcccaatcatataaacagatgcgatatgcatggctcacgttcttggaacgctagagttttttttgaagttttattagttattgataatttctccaactctaactttttttatcttcttttacataaattatctgctgctgtaaataacaaattttttgggtcgtatactcgaatttccatcaaaaccaaaagttctgaaaaaatcccacaatatataatatataagccgccaagagccaattccatcttgtggatcactaaaccagtatttttggggtttgaatctcacgttctccattaaagaataaggacatgcaagtaagcaaaaacaagttccatataagcagaaccatattccggaggactgcaactttcaaaatgtaatatatagcggaatcatctgtttatatacagaaaagtagggttcaagcctttcgacttcagatttttttttaaaattttactttagaacttcaatcataattaagcacatgtaaacggcttaccaatttataattaaaaaaaaaaaacggtcattgtgctgaaaaatatcagcgtttttattttttagtatgtgtacaagacaattttaagtggatcgtttactaaacgagagatgtccctgtgaaaagctgtccacgtacgaaattgatctgtccccaacggccacctatataaaattgaactaaaccttaattactttattggtttgttgctttaattactaaagttagtagggacgtgactattacgggttttcttttcttttcccaaaaccttaattgctaaaatcacattctaatgtataatgagtacagctttcttacaagattttttttcaaagaccaatctctttaaaaaagcttgaaaaacgactttttaattatatttaaataaaaacacggcttgataacaactgctaagttgactttcaacggataatgaatgtgtgtcctttacaggaacctcaattttatttttaattatgaaacatcttatgaaaatcagcacaaaatcttaatagtcaacccccggatcgtttattagcctaaaactaaacattttaagtgaacaatttctttagtgatttataatcagcatttcaatttaatcgcttatcatctacttctcaaaatgggagcatgatgcaataagttttcgttatgtaagttttgccgaatgtacttgaaaatgaatttctctagtttgtttggtcaacaacattctatacaggatggtcaagtaaagttgcatacaatttaatctacaactacaccgaccaaacttcaattttaaatttcgaaacaaaaatctttcggctaaacataaagtctagagtgttggtgattaaagtctttgtttgagcagtgttttagtgagggtttggccattccataacataaccagcgtctctctatgcattggagccgcacgtcttcccagcgagcatctatcagacttgcatctactgatcttgactatgcttagactacgaccttcttctttctcctgtcactcaaaagaaatatcaatgaaactttctttattattaccaaaagtgtcttagtcttgccatgtgaatactgtttcgagctaaagctacaaagaatgactttcatatggtcttttcaggtattacttacctctgggacatcaaaaccgccttcctttgcatcacacatgtccagagataccagccggagcatcggaaactgctcattgttgagatgaattaagcaaaaaaatctcttaacggaaaaatacgcatggagagtgctcgaaattttaccttcaaagtagcatcaagaaggaagcttttctgtattccagagcccttaacaaagaaaaagaaaacaggaacatggaaaccattgataaagcttgacacatcaaagagtttttagttctagctgagagcgatgtgacatagcactaaaaaaatggatatataaaagagaactcacgttgtggcgaagaaaaaggtcttcaagagcaatgcaaccatagagagaagcgacaccattctctgttatacttccacattcctatcacccaaatatggttaaagtagttataaaagcgagttactgttcttctaaaagtttcaggttggtagatcattataccttaaaatgaaaaaaaaatcttgcggattactagaacattacaaataagcttaataacaaacctctagatgaagagaaatcattcctggccatccagctgagatgataggttgacaatctgagagataacaatcaaaacaagaggtgaacaaaattaagaaatagcacaggattacgaggctagatgatttggttccccagtaaaataaagattgtacctgaagttaagtgtaaacatcctactaatgaaagctcggtcaagttcggacagctttgtgtgagaacaagtaaatcatcattggtcatccaacgagttaccctctcaagccttagttttctcaggttcggcatagagaacttgaaactttgaagggatatttcaccgaagcaataggacaaagctaactcttgcaggtgcttcaacgatgtcaggacacttgtcaaggcagaatcagatatttcctggtataccaaaaattagttcaagatcggagactccctgtcctctaataacactctttgaaatttaaagaaccagaacaacctgaaaatggaggacgatagactctagcaaaggacaagttgaaggtagaagctttaaaacatcttcacctaaggaagcacccaaacccacacttataactcgtaggaacgaagctgcaggtctcaaagactcaaaagagaaataagaaaacccccaaccaatctcaagctcctccaatccactccccttgcttaaacatttaaacacctcttgaccagaaaccaacggagagaaattgtcagttctgccgtcaacttctaattggagtagatttttacatcccctggctttgagggtttttagattaggatttctgctaattacacgagcaagagccatccaagatatctgtaaaaatctccaagcattagtggggctaaattactatggactactgaatcagagcatcacatgaatgtggctatgtcctgtggaagtaagatatataatactataactaacgaatgaatgactgaccgtggtatttgaaatatcaagtgcttccaaggtagagccggggaattcacatagcacactgtctgaaacttttgtatcccttaagcaaagacttttcattttctgtgaatgagttatcaagttaagaagcgacgtctcactaattcctgcaaatgtaacactaaatttatgtgagaacccataatcttttacattgagactgaaatggaaaaaaaaatacccaccctcgcatttactcatgtgcagagtttgaagattggatgctactgaatttatatccatatgctcattggtcatagatatagtagcgcatagtgccaaaatcgaattttccgagaaagaggtatagcaaactatgagagagcataattttttacacctctgtataacagatgctatacatgcatctgagagtagtgcacacccttttatgttcaggtaacataacgactcacatactctagagatgctccgtagttccatatctgttgcaatgcaaaattgaggtatcagctacgaaaatatacagtttagctaccttttagtttattagcggcaacaagaaaaatagctgggatttggattgtgaaagtagaacatatttggactttgctgattgatacggtatatcaaataattgggagtataagaaagtagccaaaaaacaaacaaaaagactaaccacatatgtcacttctaccctccagcgttaatcttgtgatactcgatagcaaacaatgaccttggccagagtaaaacacagatgcttgaaccggtattataggagagacatcaactgttaaatcaacttcagtgagctcgcgaaaattcaggagaagttcaagcagggtagacaccttgatgtttaagagataagcagctcttagttttcttaatgatgggaatgacttagagaagcacttgatcacaactttataatcaagcctctgacacttggaaatatcaatctctttcaccgattcaaaagacaaaattggtaaagttctgtgagatatttgttcttgatgtctttcatcgtcatcagggttctttaggaaactttccaaactcttcctccacctgaggtttgcgaaatacgagttaggcagtattgacagtagcaggctggcttcatttaactgtggacatcctgagagatccaatatctgattgagggaacaaaggagcataattagacagggcgacatatagctttcaaggactcacctatttatcaaaatgaatcaaagacatccactgtctaaatatatgaaatgtaggacagacatggatttatatgtcgtcgtaatgaaaaagtttgtgaatgtaatactactttagaaaagaacaaaaaaaatcattataacccagtacataagtgagatttataagatatccaacacagatactagtagaaattgtatcaaaacttgaaatacaactcctgatacaactagttagctcaaatccaggaagaaaattcatttaagaatagatacctcactgtattcagtcagccgaactctaacatcagttggagggccatcggttagactatcgaccaagcatgtggatggcattttcattagtttagtcaccaattcaatgctttgatcagcaaactttgagaaaccatgagacttgcttcttcctgagatatgggaacaaactaaactaaacgaccttctgctatataatcaatatttcacacacatctgtcatgacattacctgcaataaaccacagcggcaaaagactaaaacggacctgcaatataatttcccagaaataaaaaataatcctaaagtaagaactactgttccataaagctaaacatctatagtccagttttgtcctaaatttcttagaaaaattcatctatgcataggtgcagaccttctaaacgttacctgttccatcaagttgattgtgttatcttgactactctctggtaagtcagacaatcttccaccggcatcaagccaaataagaagtccatcaacaaggtccatctcactgtcagagtttagtcaaaggtgagaatcttaggtatgtttgcactgataagatacacaataggtacaaacttacctgtgtacagtcaggtgaggatgtttaacgcaccacatcaacaactcatatggaacatttccaaaatacttatcagatttcaccaacatctacagaggacaaaaggatccgttattagctaccaagactaccaaattggaggaagttagatctatcaaacataaggtcataattttctatcatacatcctacatatcattgagtggagtacacgagcacacccaagagctactaggaaggatatatgagaagagtgagtggtacatacgaaattctttgcaagataggccacacagagatctggcacaaattctccagctgtaagttatcaccaaatgaatcattacttagaaaaattagctaatctaacaactaataagagatttctcgccagattctaaccatgctcgagaccaaaactccaaatctgaataaggtcagataattctactttcggtaatgcgttgtcattcgatgatgccaacactgaaagccagtttttgcatatagagagaagcttctccaccccaaagtagagtgcagactatattcgccattcagaattcgataattagcaagtaacaagagaaaaagacaaaagatatcagaggattgatacaaaaagctaacctcaaatagaggtaagaaactactggatgtaatctctatatcgtaaccatacaaacacatgagaagattcaagaaactctctaggttccattcaacagagatatgatcaaggcctgattcactgttacaaatccaatttcaataaatttatacacacaacacaaaatggaaacaatatatactaagcagagacacaacatacctgaagcttccgcttagaaggccatggaaatacgaggattcctgaataagcctgcatagataacgaaaaaacaagaatcaatacactttttctaaacaaaacttgaaatcgcgattgggaatgaaacttgcctagttcgatgagctcgaacttttacacttccgtaagagagtatctctgacatatcccaggaagcaatttcagaagctgagatcgaaatctcttgaatcgaagaagatgcgtcgtcttgttgataacatgggttcttcacgacgagaatcacgaattcaacgagtgagctcagtgccattgttttctgcaatcggtgaatcaaaaaactcaaacttctttctgctttttaaacccaagtaatctggattcccaatttttaataaccggatcaaaccagtccatctcaactaaaccggtattaatagcactagctcaagtctagttctttcgatctgcaaaattgactctgcgggaagaacaagtctacttgaagcgaaaccaaacggtggtgatccgtgagatttcgtcatcatcggcttaaaatgcatcactgggttcaagcttcttcttccgatttcagtggaactcctccgcaagctcggaggtataattctattgtccttagctctcgatttttgaattcagctgatttttttggtgtttgtgtatcagtggacatacagctgtcaatgtcggaaaatccatggtggtggtgttcggtggtctcgtcgataagaaattcctcagcgatataattgtttatgatattggtatcatcatcatcatcctctgatacctttatcatataattgttttaattgcgatatacttgaagatgaattagatggatatcttgagtatctgtagaaatggtttctttctggtcttcgtcgttgatcatatgtgaaaactggttgtcttatgattgtttgttttttacactgtcgactagaaaacaaactctggtttgagccagaatgtactggcagcgagtctgaaggacaagtgggtcctacacctcgtgcgtttcatgttgctattacaatcgattgtcatatgttcatctttggtggacgttctggtggcaagaggtatgcactggtatattatttagttatagcggctttacattctattttcaccggtctttactagcttgtttctattaatcaatttcaggttgggtgacttctgggttctagatacaggtacgtatgtaagttttaacaatgtcgtgtgagacctgccttggatttattaatactctgctttggcacttctatgatatctctattcatgacagatgctaacatttgctgcagatatatggcagtggtctgaattgactagcttcggcgacttacctacacctcgtgattttgctgccgctgctgctattgggagccaaaaaattgtgttgtatgtatcaaactttagacgtaatcatcttcttaggtttaagtttaagcttgcctgcctgcattactaaacctagatcgttggcaggtgcggcggctgggacggtaaaaagtggctgtcagatgtttatgttatggacacaagtaaaacttcatttctctattctagttttagttctgcaataaacggtttttatttgctgataatgcttactctcttggtatccattagtgtcccttgaatggctggagctatcggtttcagggtcattgccacctcctagatgtggtcatacggccacaatggtggagaaacgattacttgttttcggtggccgaggtaggctacaccaaaactttgaaaattcttgctgctggcttctgaattcaccttgattcattccttaaatatgtttaggtgtttggtatattcagtacatagaaaatattgttactcaagttttttttccctttattttactgaacactggaactaataagtgtgattgctcaagagcagactcctgatagatataaaagtcaatgtcaaatgttactttgctattccgccttttcattcatcaaacagtgtttaggatgtcgatgtgtttgatgttcccatcgctgacaattaccaacttcatttttaatgaagtttcctgaatgggtgtattgatgatatatgtattgttaaaactctcgtccagtcctaaggattaggtcatgatcacagtttgtttggcttgagtcaataacaacaaaactgaatatattgtgtgatatggttatctttggcaggaggtggtggcccaatcatgggtgatttgtgggctttgaagggtctgatagatgaaggttcatccttaatttcttaaaaatgtattgaatctagtaggttacctcttaatttgtctacttttctgtttattgatcatattgtggtttacctttattgtggaagaaagagcgtgaaacacctggatggacccaactcaagcttcctggacaagcaccatcatctcgatgtggtcatacagttacatctggaggacattatgtatgtgtgttcagcttttgtttgctccgtgttatttctgtaatcaagatgctattcatatgtttttgctttcgagtatggatgggttgatgcgacctacatcactcacatcattgaatttgtttatgcagcttctgttatttgggggacatggaactggtggatggctgagtcgttatgatgtttactataatgatactataattttggacagaggtaggtttttgctcactcttctcatgagattgttctaggatcaagaatttttttacaactaatgaaatgattaactgtgatgtaatttatcatttttctcgctgtgcttttttcaattctttgttaatgtttctgctaaatttttgtcttcacattccagtaactgctcagtggaagcgcttaccaataggcaatgagcctcctcctcctcgagcttaccataccatgacttgtattggagctcgtcatcttttaattggtggttttgatggaaaattgaccttcggtgatctctggtggttagttcccgaaggtatttcattcttaattgtactaatgctttacctcaaaaaacttaccaactaacttatcattgtgtgtacacacatcatcattattatctttggatatattttatatgttaatattttttagtgtctccagataaactaatcatcctgttggtcatatattgtaggcaattagctactcttcaatttctagcacgctcattttctttctctagtttgtattcaaagttatgaaatttacgcatctgattgtatttttgtgaactgtttagccgtctgaaaatttcttatttgtgtaactgtgtttaaagaaataaatttatgtggaactctagatagagacctaactcaaaacgtttccactttcaccacaacctcaccccattcttttttgcttttctcagatgatccgatagccaagaggtcttctgtgcctcaagttgtaaaccctcctgaaattaaagagtcagagagagagttggacaaggtgattggagatcctacatatcatcttatgtgtttcttgccaatgcagtcaaaatagcttttgaacttgtttaaacagttgagagtttggtcacggcaggaaaggggacaagatggattcagtattgttgacttgcaacagaaaatgggaatatctgtttcatcagggttgcgccttcaaattcccgaggagtcagaagatcaagagtttgttgaattaggaacaagattaattgagggagatgtagttgatgaacgggcctctatgattcaggtgatctttcccttctctatttcagtatgtatgattgtgctatcctgtactaaaatgcttcccaatggaaagatggccgctcaagcacttcgtcagcattggaaacagtccactccgagaactttacaactaaaagagcttggttccttacttcgagattatcagcgacttgttacacgaattttcacgtgagttctttctttcaaaactatcgaaactgattcttttcttaaggttgtaaaagttttgttttctacgtcttctaaaagctattacatgttatgaagttttacatttgcttcttcctttccttcacacatgtttgttttcatcgttgtggcgagtgtctcagtacacagagcagcttaacatctgctgattttggcctccctggaacgaagacctttacgttttatcatatcaaaagttcttccgaggtaatactgcatgatttcctcctgttattacctctcttgaacatttgtaaccagttaatctatgtgttgcatcatcgtaaggacccttgtacggattttaccttgaattatgtggctgtctaaataatctatttttaagttgatttgagcacatgcactcagaatacccaatacactggcccaaaagaaatagatgttaccactgtgatgcataacagcattgacgatatgcattactcttatctcttccttatttttccgtctaaaacttttatgcatcttaacacacacatcgtttttatgatttgcacatgcactctgacatgtctaagtccattgatattctcagttgcggattaatgacatctcgaagttgctggaagaatacaaaactcttgtaatctgattgaggagtcgccacaaaactcacgaggaacaaaaatatctttaggtatgaatttcttaaatccctgaggcaaatcgtttttccattacattcttttacaccttttctcacacttcagtagaggaactttaatccataaatgatccaaaacctcaaacagttcccatgtaaaaggtagaattgattatcgcaaggacccaatagtcttgttgatctcttccagcttcttcacccttactctttcactttcagctagtagctgccaagaagatcaccgagattgcgatcagcatcacagctatacaaaaagctaaaagtcttagagaatcagagctgggataggctacaattgatttacctccattaagattgaaacaaggtgtgctttctctttgttcttttcgtcgaaagcctcatgtatctctttgtattccctctcctgtcatttatttatcatctggtgtgagtattgatggatataaaagagttgtagaggtaaaaagaagcaggattgttaataaagactgattatatgaaaccttcttctggcagctctgagacaaagatttgatttctcgatttgccatctcgattttctttcttaccatccccacttccttcctcattggatctcccatgatctctagcccctttgagacaatgttggtgttgcttaatacagatatataagttttcataggaagccgagtagctttcatacgcatttttaaagagtatggtttgcattggtgataatagcttgttttgaaaagtatgttttgtattggtgttaatagcttgttcgacttacttccaatgtctgtgtcaagcttcttgtggcttcctctgcaaacccaagtcgctgttgaatcttgtccttaaccgccatcttctttctctcgatctcttcttctcgggcttgaaagtttcgccatatctcttcttcttggttctcctccattggtatcttgcttttagtcgaagttgtagctcctgagttggtactgttcatgttcttgtttgttcgtttcggtttctctgctccaaacacttaaactctatttatctgctttcagtctgttttctttctttctttttttgggcttttgcttttgcttcaaccttcttaaaggagattgctttgccgtgacaccattccaaaacaaagcaagtcccgccaaaggaaaagtaaagaagaaggtttttctcgaaattccttaaagaataataggcacttggtattcgatgatggggttgtgctatatgttcaccaacttgggtgggattttataacttttattgctgccaactaattcctaagccatgcccatgaatcaatgatactgttactaaaactcttttagatatagagttgattcggattttgcctgtttcctaagccatcaatctcttattgtttacgatttcagttcagatccaaaacctaagaatttatattttagattctggatcagtctggtaaagtcgagaaaaaaaaaagagaggcaaaactttacctattagacttagaaatagataatagcttaaccagaaaagtttcctgtctctttagaccttattgtctttcactatcctctaaaacaactcgaactcaagatgatctccgatggctttacattcaagatacctattattcccctcaggagaagtcgcttccgtggcaccattgtcatagatatctggcagctcaggtggtatggcgcagcggatgagagcccaattcaatccttcaaagaaaggatgtcttttgatctctgcagctcctttttctgacccaagacgactctctggatccttcaccagcagccttctgatcaactcctttgcctggaagctcacgagcgggctatcaggaaacttgaggttctggtatacaacattggacagtgtctcctcattgtcataacctttgaaaggtgtcttcccgtacaaaagctcatagagaaggaccccaaatgtccaccagtctactgcagcaccatgtccttctcctttaatgatctccggggccaagtactcgtgcgttcccacaaacgaatttgatcttgcttcggttggttcagccacaagctgaggcaatgatctgaactgctgtgtcaaaagatcaggccttttcggttttcttggtttttggtttcttgcttgggttgataagagcctagggctgaaacatgggacccgacatgatggttcaatacatagaggttgtatgcaattcgatgtgctgtatggaccggacatccttgcgggatctttctcgggtggagaagttgatctgagaagagtcgggttcaccgcacatctgagtgagaggtcaaaatctgtaagcatgatgtgaccatcttctcggactagaatgttctctggtttcaaatctcggtatataacaccaagcatgtgtaagtactccagcgcaaggaggatttctgctacatagaacctgtcaacaatatcatcaattttactgtatattattaccactgaattttctaaccaacaaagactttgtgagcattacaaattcataacaacaatgtgaaatgtgatcttacctagttgcgggttcggagaaacacctgctgagctgtttctgccttaggacatgaagatcaccaccaggacaatactccatcaccagacacgataaattatctgaagtaaattgcgcatacaaggtaggcagaaaaggatggtccaacattttaaggattgcccgttctgcctgtgctcttggtgtctttttccttcgggccaagaactcgttgtccatgaccttgatggcaaacaggcagtttgtaccaaccagctcagcaagatagacagttccaatatctccacaaccaagctttttcaaaaggttgaaatgtcgcagtcctaaagagccatactgcaactttacatgcttaactgcttcccatctcacatccatagacatgtgaggtttattgccacagctaaacctgctcagattgctctcctcactcatgcttgtgctgctgctatagtcccctaggctattctttgagctcaacgagaaatcaaatttttcactggaagttggattcgctcttatctgttcatctgcatcaccttttccactataattgcttggagagacttcttgtttcatgacaatgacagcttcaccgctatcactaacctcacaagaatccgaggaacccttgctggcctctttattacacttcacaatgcgaatgagacgcgggcttgcgagtgattcttgatctgcttctatactgacatttttatcagtagtatgactagtattcgagggcgggtggttttcagtgctggtgctctttaccgcacagtggcacttctggcacagaagttgacttgcactaggctctaaggaagtatcgacttcctcaaccatttttgtagcagaatttacaacgatttttagcttctttttaagcaatatcttcttcttcggccgcggtttgggacgtgggatatttcttgtcaccttgcttaccagtttgctcttctctgttcctgaaccaggaaagttatccaactttccttttaaccctgagctcaaagctgttggctcacttttcactctagctgatgagacgatgctcttgtctagctcttcagtatcaactttgctgccagaacaagaaggcagcgaggtaacatgtttgtcgatttccactaattgatcttcaatgaccatatgaggaggagatgtatgattttcatctatctctatctcataatctccactgccagaactgagacaagatccagatttgttggatttacacagtgatacagtctccagcattccatatcccactgtctttattcccgacccatttccaagtacgtggagaaggatttcagcctgagatggttcagaaatgaagttagatggctctgtctcaaggacatcataccgctgaggtacactctgggaggagctgggtatatcgactaccggcgtcaaagatatttcaaccaagcttttacccttgtccacaggaagcccaggcttgccagcagattcattcaaaacttgtctgtaaagagtctttatcctgtctgcttcagaaaccctcggagatgcagctgcagattttgataaacgtttctgggaagccatttctgatgccttggagatgcaaagatctctcagagcctgcttcagagatattgaatcagagggaccaactcttggtgatcgaggggttcccatgggaaagggctttttcatagcgcctttatttgaagggcttgtgctcctgctcgtaccagcacttgcgctcgtctcaagatgatggaaagaagagcccatcactcttctaggtgatggttttatagttatagactggaaaagctgatcaatgtcatactccatagaaccttggtaccctgacttcaatgcaggacgctgctccatatctttacttgatcccaaaggtgacatacaatatctgctagaatgtttggctaaccttaccgcatccttctcctcaacaatttcacaagaacctgcaaaggattccatcttaatgacttactttacaacagtggacagctcctcattacaagacttggtttttgaaagaccgagagactcatcttccttggttcatcctaataattccagtacaacaccctgcaacaatcataagaagagaccttatggcttattttaaataactcacagagcaataatccaaaggaagagcagtgtctattgagtaaagggaaggagaaatgatgaacaaagtaaggaaagggaaacaacaagagatttaaaaaggaaatgaacagtgaaagtcattatagttatagactcaaatgatgaaccctacacaagtacagatagagattagctacttttagactttaattaacaaaaagaagacatttttttggtagggaaaccaaaacttttaatagaaagaaattcatcaaaaccacaagccaagttcaactcacttcacctaatgaaaatgtaatcaaaacccattaaatgtgaaatcaaagcaaaaaaaaaaagcagcctcgagatcccagatctcatgaagctaacataaacagaatgctaagaacactagcttaagtaaagattcaacttttaatggaagatgtcaaaatcttcaaatccttctgaaggaagagtccccaaatctcatcaaaagaaacaaatatcgaaaaatgcagaagcaagtacagatacaaagacgtacctaataacattaggaggcaaaataagcttctagagagtgattacagagctcaagaagactcccaaaagaaacctaaagcctaaaggcctgagcttgaagagaatctctcacagagatagagtaaaaaaaaaaaatggaaaaattttctttaaatttgtcggggattttggtgtttagtgtttcggtgtgatgataaagttgaaatgtgaaagtgtgggacccaaagcatatgttttggctgaaaattacgtccaaattcgtcgtttctttttttattttcttttcgtcttcattacatttcacatcaatctcttctccgataattgttgtgtaataaatattttgagttgatctatggtcttcgttgagtgtgtagtacaaaaataatatctaacacaaggtgaaattagtggcatgtggcaaaatgcgaatcttggctttaagtgcttgtgtctttttctcgaaagagacagacgcacaataagaaaagaatgttagtgggcctgaacaatcgttatcgaagcccaacccaaaaggaagagtcgaaacaaacacaacactaaaaaaaggagaatctgctatggttagctctaactgttacttacctcagttacctggctctagaacaagaacggatcgtggatacatcatgttttttcttatcaatatgacacaaccaaaaaaaaatgagatcattccaaaagcagagatttttcttcattgaatcaaggagaaactcctaagtttgcaagctttgcggcgaaagttagtttcttgacacacaatcgctgctcatcaacaaacaatgccttccattcgttgatgagctcttttcttctttcaactccaacgttttccaaattctgaagcagcaatttttgttgatatctacctaaactttgaaaaaatgtatcctccttaaatatctcctggagaacacccaactcaaccacatcatcttcttcactcttgtctttcacaccatttttacctaaaccttgaaacgatatcccagaatcaagtgtgtcctccataacacctacctcatccacaccatcttcttcgctactcatctcttcctcaccattatcaatctcgatactcacccgctcttgctcctcacaaggcacatccttattctcttgctcctcacaaggtacatccttatcgcctttctcctcacaaagcacatccgtattctcttgctcctcacaatccttactcaaaacaagaaaccaagatcaataaatcatgttttgaggtggtaataagaagatcggtagaaacagaacaaacacactcaccatggtttggtccaatttctctttctcaccattatcaatctctatactcacccgctcttgctccacacaaggcacatcctcactctcttgctccacacaaggaacatccttattcaaaacaagaaaacaagatcattaattcattgcacatcattagtaacacaattttttacatcatgttttaagatggtaacaaggagattggtagaaaaaacagaactaacacactcaccttggcttggtccaatttctctctcacaccattatcaatctcgatattcgctcgctcttgctcctcacaaggcacatccctatcgtcttgctcctcacaaggcacatcattagtctctggctcaccagaaggaacatccttatgcaaatcaagaaaacaagatcattaattcattgcacattagtagtctaagagattgttgaaaaacagaacaaagacactcaccttagcttggtctatattctcattagaaacatactctgattcattcttgtcccatatgatcaatgacaatttgaagatttcatcatcatcagtattagtaaaagaaagttgttccccatggttagatctcccctgattgtatgtaaactttctcttcatgttcttgaccttattgatgagctgaatcttcgaaaactttgcttctacacaatctttgatataacggtacaaggcatcccagtcagatctatagctcaatttcgtttcattctcatagtccacaatacccttttacacacacacacaaaatagagtaaaaaaagttagaagaggataaagaagaatatagagaagctgcaaagaatttactaactaaccccgagaatgacaagctcatcgtttttagaccagttcatctttgaagcagaggaagacaagctcaatggtgttgtcctcgtcgttgttgtcctcgtcgttgttgtccttagttgctttctcctactgagcatcgcctcaacttcaacctcacggttcctcgtgagtgtgtcatccgagttggtgtcgatggaatcagcaactctcttcgtaccaaccattgatcggtgatgaaagatcaaaactttgtcaagttatataaaactctcagaaagctcaaaaccctattgtcaaacagagtctctcgagtctctctatttaaaaacccagagacgatacgaagcaaaagcacgatcaatcctttggcggctattgatattctccaggcgtaggaactaggaagtccgagtgtcgaaaacgtaaatgactaaaatacccttttccatttttaaacattgggcttgtgcaagatggtttcttcttccttcttcagggttcaagatgcacaatggataagtctgaggtctcatttacaatcgaggacactcatatggctcaagagctgaaaagttgttgccttttgctctgtcagagtctttatttagttggctataaagacccttttgacaacaggatatgcctctcttattaacctcatagtttttggaaacctttatataggctacaaaaatagtataataattacaatgctaagatatattgatcatttttattatacatcacacaaggagtgtggacctatacaaaaaggtgggaggatcagagagagccttggttaaataggttatagcctgaaatgagggaactgaaagcaaaggcaaggaaggccaggaaggacatagcaatcgaggcacttgccatctctgtgaactcgtcttttccccagtttgaaacccaatcatcaacgcgagtgactgctgctgttgaggcagacataagcagatatgcaagtacctgattgcacaaacaaaacaaacctttcttattcataattccatctgtttttacacatgcttttgaaatgttttgcaggggacgaaagagatttcaattatgtaatgaagggagtagtttggtcaaacaagtataacagtcactttcaccatgttttccgacctataagataaatccctttccacatatgctataagctaaagcataaagaaaaagagtaacaatattggactttaaccacaaagtgttgttctttgattcacaggagacagggtaaataccagcagatggtgcaagtcaaagtatcaggaattatctatagccaagtttttctcatcacctagatgcaaccacgtagatcatacttcatacaagaacgaaagtaacaaaggaataccatcgagagtacagcataagtgttaatgacttgcctgatctataatgaactcaaacagaggtcgaaggtggtggctgatcaaatgcttctctttgacaagatggtacgctaagtcacatgcttgaaaactagaatatacaaaagcaaccacgttcacagacaggcaaaacctgtcacagatatcagaagatgacacatagataaatcagtttagtctcaaaatcaaaaatcaaatcatactaaactgacttcaaatgtttgaccaaaacaacaaaatggaaactgcaaatgaattcttacgatccaacaaatcaaaatcaatgtcaaaaggaacaaactttacttcttttaaggacttcaccaagttcaaccaaaacatagacttggaccacgcaagtgttaaagacaattcacatgtactaaaactaaagtaatccaaatttcttatcaaaaaaccaacactagtgatactgataaaaccctaaaccctaaaataaaccctgaacctaaattcaagaaacatcactatctgcgaagaaataagcacaaacacaacaaataattacctgtactccttgtaacgatcgaaagaatcaccactccaacctttagttttatcagcagccataattgagaaagatatcaaagccaacacaacctcactcaaccgaaaccctaaagctgaaaactttaccacctcttctctcctagaccttctcaaaatagccgaaacagctccagatcgttggccactacttctcccagaaccaactctcgcactctttctcgtcggaaccacttctttcacagagcgattgtgattatgaaccaccacaatcggagatggagtttcctcaacctttccaggattcttgtttcttctactctcgggtttacttttcgcatcttccttctccgattcactggaatgatcaagagaatgtggcggcgatggagaagaagagaagtgagtagtggagttatcgaaagctactatagccattgaagtatctgacggaggtggagatttctccgtggaaactgaagaaggtgacatcgacggcatcgtctttgctggagatctcatcggaaatatcaaacctttgtaacgaaatttaaggaatttgacaacgcaaaatcgaatttaggaataagcgttgaattgaagcgacaaagaacaaaagtgaagtctttgatgagaatcaaacacagaaagaagactttgcaagattctttgtctacttctccctgtattcttggttctttcgtataatgccccactattttagttttgacaattcgcacctaaaactttgatttgttctttgtggcccttggttttgactctagactagagtctctagctaataattattatttaagtgggtattgaaataatctttgtatgcattgttatgaagacaattgataatcatcatatatcattagaatggagaattattgcatattgatctagttgatttaaaactgtgaatcaggaagaagaagagaaaaaacagaacgccatccttgatcactgatatgaacattgtcccaaaagaagaatgattttggatcatcgcaaagagtgtacaactttttaccactcaagcttctatctccacaaaaggtacctcgttttgttgcacaacatgccttaaacggatccggaaatgtcgaaactcctgcccaaatttaaacatttatattatatatcccatctatttaggtatatgtatttctgtttaatctatcaaagacgtgatcggttatgtttggtcatatacagtgttggtatatatcttacgtacctgaaactcctttgttcttgaatatggtcacaaaggcattgtagagatctaacgtcatgaaacttttatcattattgttaatctccttatcgtttagttttatcagtcctttgcggagaagactgttgtggaggtacgtcgaggtgtcgttggtgtcgcagcctttaggagtgacaagcttcggcaaacatttctgcggtggtgataaagccactaacacctttcttactcctaaatccttaattcgcttcacatccaacaaaatctgtttcactactttccttgtgagtgctgaacgaccctgccagattttatattttcaaaagaaatcgaaaatgttaacttatataatatatggatcaaaaatggtcaaccagtaatcaattttgatcaaccctagtgggaaaagaaaaggtatattgtacctcttcagaaccattacgtctgtcgtaagtaaggtagtcattgccgatgatgctaaagaaagcgacggaagagttgagatcggccggtgaataaacgtttctcatgaggagttgttcaaaggaatcaatctgcacactagcggtaggaactaatttgaacattgtctcaaacgcgccggctccaccatatgcgaaattcattcctcttttcacagctagtctcggtcgtccgtatttcccccatttgtatgtgatcggcgttctaactccaatatacttcgctacatgttacaatataagtcaaactataagatttattgcataatatatgttttctatatatagggtataattactgttggcaaccgatttacgttaaactagagatatcttgcattttgagagagtgaaaacgttaaactaaatacttatatggtcaacatttaaaacaaattataatgaacaaaatttattgacttgcgtttcattatataagagatgcaatgcaaatgtacagctaagacatatctaatctaagagtttttcactgagctttgcaatctgtttacaatattataaatcttacagactcagatattgtgacagattaccaaacaaaacattatagttcaaacgtaccgagataatcagtggaaacacgaccatcactaaaccgcccggtaggtattcccgggaaagtgattccattgggaaacctccacgagggaacgatcaggaaaggtgtgtttccagtgtctgcatacgagtctccgaacacaaacaactttgtaggtttgaaaccaaaaaagccatcttcttgtgtttgctcgctagatggagaaattgagctgtttacctttatgtagtctagcacgtatatcaaaaggaaaaagaaattaatcgatgaaactgatttaatacaaattaattgctgtaatttgatatacgatacatacattaaacagatcaagaagaagaaaatgaaagttatagactaataatacctgatagaagaatcagacacgagaaaagaaaccaaggagtgagtttagtaatgttcatgatggttgaaattgttgtcttttttttttttgcatggaaaatatataggtgaggtttaaggtgtgtgtctcttaaattttaattatggcgaacggttaataatttagcggtttccattgaattaattaattgagtttgtttctttaattaattaatactcctatttcgtttctctggcttcatgttttagatatttttccttcttttacatttttttaataatttcttagcagtttaattttgttgaagatttcttttctatatatacacaaatctttaacattggtaaatgaaatatatgcaatatgatctagatatttatattatttttaaaacatttgttcataatttctaattttctttcaccttaatatgaacaaaaaaggtttatttatttgaccagaaaaagaaaacattgttgtcaaaaaaaaaaattgaactctactactctagttcatatttggtttgactcttcttcatccaataatggtcatataaaatatgaaagatatgttttgataagattaatatgaaatttatttgaagtattttcttgttttggaaattatacaaaaattctaaatatcacctaatacacacagaaatatattattacatttgaccacggaaataaaacaaacactagttttttgttggtttgagtcttcatcatcaagtggtcatataaagataaatatattttcgacgttttatattacttttgattattgtgaaaacttctaaatttcataatgtcaacagaaagagaataattatttgaagagaaaaatagtagttcatttgtattcattgatagatcataaatgtatgaaagacatttcaaataattttcaagtgagctgaaagatgtttgatggaacctccttttctttcacataccaaaagacaaatcaagttgatgatcgcttagcgaaacatggccacacattcgaagctattgtatcctcgtctttaccaaaatgaatccggccttatattatgcctaaaaagcttacaaacatttgaccataaagcattaagaacaaacaaccttagctaaatgctttagagatgattaggtaaactgattcagataaaagtctaaatcaactgacctaaaacttatattccattttcctcacaaatctaagaattaaaatcagcaaacaaacgtcaataaggacatgagcttcattttcttcaatgatctaacgttttgaaatgatcaaaacgtctttgtactgtttctgtcggtataaaacattatccaaaacgcgagacacaatttcatatattttcttttctttttcccaaagagaaaccctttttttttttacaagcaaaagccacacaatcataaaaactttaatttcttcggaaataaacaaagaaaataattaaaaagttacgaaaccatctcaaccttaatcttgcgacacgtgtccgtaatacaataacataatgaacggctgagatccaccgagacaatcgaaattttctcagggtaaagatagaaatcggtcaacggctccgattcatattttctgaagcttcgccgcaataaccaacggattagctttcgcgatctcttcacgtcccgccgatttgaaatcaaacgtacaaccatgaacctccggatacctatgactcccacaaaaagtcgtcccacaccgacacataaacccggttaacccgacccgtttcctacatacggtgcatcgattcggccgttgcggcggagacggttgctccgtcggaatttgaatcggttttttctcctctgtcttcttcgtcgtcgggatctctaactccgccgcgtagttttcgagaacaggtgcgatcaccggagagagagatgattcgacggttgatttcatggaagcttgttgttgttgtttgagacagagatcgccgtaacagtttgaacatagattcattgtcgctgagcttccgaagaaaccgcagttgttaacgcagagacggtgaccttcaggcgtctcgcatcgatgttcttccgccataattatttaaaagaacagatcttgaagaaagttttttggagaaaagtaatgaatctgaaacaaaacaaagaagagagaattaacgtgggaaagttttgaatatggtcaccgagtttttttgcagaaaagtttcctgcgttttctcggcaaccaaacagaaatgaagaagagattgggacacaaaaatataaaaagagagaaagagagagagagagagagagatgtgttaccttgttgttgttgattcactgaattctataatgggtggaaacagagagagagagaaacttaacggcgaaatgatgatgatgaagatgatgatggacaaacaaataaaataaaaagtattctttaattctatgatatttttgagaggtctatttttacaaaaaaaatgtttgtttggtggtgccaaattctattattgatttttgaaacagtgtttgataatgataccttggttaaaagaaaaaaaaaatcattcaattggatgactatatagttttatgttgaaatgtgtatggggggttacaaaaatgtatattgtgtagcaaagaaaaagacaggttggaagaggagccaaatttgaagtccatccactagtaatcttatcctcactctctctattttatatagttttgtgttcacaacttcacataccctttcgatgtcaccatatgggcacaaaaactattaatattttgcccaaaattggatgatatttgttttttatttccaatttttgataagttattttatatatcactgttgatacaaagttgcatttatccatatctttgtcaagctgactagtttctttatcactagattataatttaatggttcataaatcttagtcttcatgtgattttttttttctaaatataagttgtagaaaattgctttgtttacaacaagactctatagagtttttaaattagactaacatacatatacataggaacaaatatagttttctttttgtgagaatgtaaggtaataatagtatgtgcaaatgtggtagacaagtgttgcttaagatccacttccatctaatctaatatatatttagtcgagttagcataaattaaaatctagtaatgttttcagaacaatgagtagtaaatcgtttatacgtttaatcagaagtagtgtttaaacaaatagagagataatggagaaggttgggctataacaattggcataatcccattttcggccgccaagattctcgtccgtcccatgttcccactttactttccaagttttgtcaatttatgatatcttttgacatggaccttcattattggttttatgtcggctacaatttcatttgtgtgttttattattatttcagaagtagtgtttaatttatctaattatcttttacatgtgttcggccagatatttatctttccgactgtaaggtgcaagctcagtatcattatggcatgagcatttgttagtgacttggatagtgcgtggatattagtcgtctataaatgtatcaacctgataagttaaacatgtgatttactttgagaaagagattgcatcattatgttggtgctttcacagtcgacatacccatcaagtcttcttttcaggaaagtctatgtaacccattactgggtttatagtttaccctggaggaactactcataaccacccttgtcttcaatcattttacgtaagcacaacaatacaaagagagccgagagattatttttgacatgatataaacatagagacaaaatgaaagtaatatttcaatcagaaaaatatcacaaaccaacatcaacaaaacaaattaatataaacattactcttaagatgtacatatacttacacaactttaaataactttctaatgaagcagcatgatgataggttacctcaatatattgactcgagaagaagaaaaataaaagaagcgtaattgttgttagtaccgattttattttaggcccaatataatttgggctttttatgttacgtataagtaaaatttaagttttgaatgaaaaagtgggtaacgcatgcgtgaacgaaataaacgtctagtcaaaatgcgtcgttggtgacatattcaatccacaactgttgtagttgggaacatgtgacgtaacaggttccttcctcccaatttcccaatctaataattgttttacatatattctagttactgtattattctgtgggatccttaattttattatttgcttcaccaaaccgtcttaatcccacgaaagttacattttaatcaagaaaaaaacacatgaaaatcctttttcaccttataaattatgtcattatataaaaagcctagtaatcaattccttatttctaaggaaaatttgtagataattcaatttaagaaagggtttatcgtgaaagataattttagcatgattggttaacttataaatgtggcttaaaataaggttagattatttttatatatacatctgtcatcgcaaaaagagggaaaacaaaaaataagaaaattgtggctggacgactcagcaattcgtcgtcttctttccatatatcttgtttattatttcataactaatccacttcgattctgctttttatataaagttgaggtttttgagctattttttctcctaaaggattccgaaaaaagcttagacctttttgatctgatacgtatctataaatctggaaaggagctgagagtttcaaggggttttaatttcgctgagaaaacgtttaattatctttgtcgagatggattgtggtatggagaattgtaatggtgggatctcaaacggtgacgttttgggtaagcatgagaagctcattatcgatacagacccaggaattggtgagcttcttcttcccctgttttgattacgtcttttagtaaatggatcttcaggcagagtaggatttaacctcagaaagcttccaactttgtttaatttgaatagaaatatttagatggttatctcttgaatctgtttttgtgtgctcatttacttgtaaagttcaatgctttgcttaatagaaagattcaggggaaattgttcttttttgtgtgttgacttttttccaaatgactgttcaataggatcagttctaacattagtgtatgattagatgatagcatggcgatattgatggcgtttcaaacaccggagctggagatattaggattaactactgtgtttggtaatgtttctacacaagatgctactcgcaacgctttactcttggtatgtacagtacaatgcatcagtttactctgtcactacaacttttggaatgcgtctgtgatctctttctctttgttcattttgcaaaagaatagtgtgagattgctggcttccctgatgttcccgttgcagaaggaagttccgaacctttaaaggtaccatctttctctcctctcataaggattgaaactttagtttatgccatgaagatttttcagatctttgctatgagacaaaaagccaaaccgttgtgactttagcttgaattctggctttggtgtgttgattcagggtggaattccgcgtgttgctgattttgtgcatggtaaaaacggactaggagatgtctctcttcctcctccgagtagaaagaaatctgagaaaagtgcagctgagtttctagatgagaaggtcgaagaatatccgggtgaagtcaccattctcgccctcggacctctaaccaacctggcattagtaagaatcatgaatcccctcctttaatcttcttaaaatccgatttgtgtactgacgatgaccgggttttttcgttataggccatcaaacgcgatagttcatttgcgagcaaggtgaagaaaattgttattcttggtggagctttcttttctttgggaaatgtcaatcctgcagctgaggctaatgtaacccctccttgtaacctcatcttaatcttctgttaatgaaaaaggaaatgctggtttcattttgttggtctctgttctatatgcagatatatggtgacccggaagcagctgatgttgttttcacatctggagcggatatcactgttgtcggtataaacatcacaacccaacttaaactatcaggtgaagaagcttctcccctcatctcctttagcattctggatatcacaatatagcctgctaaaagaatgtgtctgtttttgatctatttcagatgatgacctcttggagcttggtaactgcaaggggaaacactctaaattgataagcgatatgtgcaaattttatagagattggcacgtcaaatctgatggtgtttacggtaagcaagaatctgtgatcaatcaaacatgcttagaaattgcagttttgattctcaagagtttgttgttactggtttcaggagtgtacctccatgacccagtcagctttgtggctgtagtacggcctgatttattcacatataagaaaggcgttgttcgggtggagactcaagggatatgtgttggccacacgctcatggatcaaggcctcaagaggtttataacttgtttttcaccaaaaaataacactctttgaatctttagacctttcactaagtaatggtttggttcggattgtagatggaacggaagcaatccgtgggtgggatattcaccgatatcagttgcttggacggttgacgtagaaggagttttggaatatgtcaaagcaaagctgatgaagccataaaagatgagtttcagagcacgttagagtgtgaatattcatttaaaatggcatcatcacattcatctcttctggttctaaccggaatcttatattcatctctgtatttgatctgtataaatgctatattcgattaaaagaaaagactaatgaatgaaaactatcttcgttttctcttatcgatctttgtttctttcctttagtctctgttcatgctgccactagtatatgtcaagattaaagttcaaatttttcttagaaaattatgatgagaaaaaggatagagtggggaacatggggaagagggtagactaaggaggagaggattaaatgaagatggtttataacacaagttgggctctcactatgcataattgtatctacagtgaataatggtggatgatgttgatcatcatcatcatgatgaagtcggggactagtactcatgagtacttcttctacctctttttattttaaccttttattaatgttgaattatttattacatccaaactatatgcagtaaatgtgtatgcatgatccatcaagggagcatactttgtctagccaatttttgtactttttaagtttggaaatgtaattcattgaggggaaaaaacctctatataatacaacatcttcatctctaaaactagttcgttggcatgttaacagtaaacattgcaattggattttatcactggtgtactattaaatgtccaattaaataattgtgttgttgttggctttttactcaataacttctcctttttctttgtcgtccatgactcaataacttccttaaatcatgaggtcagattttttctttttctcttttaccccttttcactaattttcagtaaattaaatggtatttaagatactctgaaaaagttaaataaattggataattgcactagttagaaaaaggaaaaaaagagaaagagaataaagagctttgtataattagagaggtttggtcatcattggatgctacagaagaaggtgtttattatgagactggcagctactcctacttctaattcgtgattacctaagacccattttgtctcccttctcttagcttttcatttattattactcaagtactacacgatattttgaatttctcaattcaagttagttaatcagatcatcatgtaacaaattcttacaaaagtttacctagagccaaatgatatgaggttaaaggttctattcacttcaaaacagaaggttgcaaagttctcagttttaaagtctctagaaaactttatattagatggatgaaatgtgatcctcatggaggatgtttacaaggaattttggtacatgaatacatgataatgattagtaaatgaaacatcacttggatttctagtttttgctaaacaatccgctgctttgttgcccgttctcggaatccattggaccttcatgcttgtatatctctgttgccatgcatactcttatttcctgaatcaaattactatggtaaacacgtttagttataaatttatttatttttcatttcttaaagataaatattatgaagttagtttataagaaactcttacaaagtcagatgcacattggtgataagaatttgttaaatcgatctttcttatattcttgcattcattacctactagtttccaaacttgagtatatttcatgcaattttattacatcacgcaaaatattgaacaccatgatcttcactttaacgagtgaaaaaaaaaaatctactttaacggtgtgaccacactctcgcatggatttaactctaacatcccttgtatgacattgaccgtctccttccatcgaacttgaaccacacttttctcggcacctttccagattcgtgtggtgggttccgtttttgttaaaggtttgtttattcaactactctaaaactttggtcatgtacgtttataactgcgtttttgcattttctctcggtatatataatcatttctaagtaatccactcttgataaaactagtaattacagattaaacacgtaagctttcaggaaaatcttccaaaaattcaggttcattccggtgaaaaatcattgttcatacattttgagtttgttatgacgttcactacaaaagaatattcattgtaggacaaatccatgaaagattatgaatttatgaatccacataatatggaaataaagatggatttgttacacctaatggtttatacatatatattaatataaagtagcgcatgtgcataaagatacaattttgcacgatagtgtaacacccagagagcaaagttaacacgatgcttcctctttatttctttctttaactcattttatataactttttctaccttttctgaaattaaatataactaacaaaaaattgtgtagacaaaacaaaacaaagtggaaccccaaaatgcagggcgaaagcgcaaagcgcttgaataaaaaaatctgaagcataaataacaaaaaaaattgataactaaagtataattttgaaatcttatttggttgagatttgtttaagaaaactaagccattgtcccgaatttaggttttatttgagggtaataatttatgccttcgcaaatgttagtcttgatatcggaactatataccaaaagaaatatattgtaccatgcagaattatatattaaaattttgcatggcaagttccacaaggccatgcaaaaacatgacatgatttgtttaacctaagtgggagttgctatgtttacaacttacaaggactacaaattcctgaaacaatttcttatatatataaaaatatcaaattaaattgaatcaacagaaaatgtatatatcacaaattaaatttttaaacaaattttttaagcatcacatataaaactatagaaagtgtatagatggattctcatcattaatttgtatttatattttcatatgtgtggtatgtctcacctgcaaaaagagcccgctatctctaaattaatatacttcagacctatgtatatcattagtgctccacccccacaaaatctttattaaataatcgttgtatgtttttaaaaattagaagatgttatgataatgtttccatgcaatgcaaatggacgcactttagcttatggagacccaaaacataaaaagaaataaagttctaaagggacgaaatgatgacaaattacaatgattaaaagttggaaacagtttcatactcacacgatctaacatactatagaccatacactttgatgtcctacacatacaacaaataaatgtagcataaatatttcatttatatatgtaatacttatttataccactattaatcaaaactatagtgattgttgaacccgtttttatttttatttcgataaaacatcaataccaaccttttttttatgtcacataacaatcatccgaccaaactgttaaggtgacttgtaaaagagaaaggaaatagagcaaccagtttaaaagacaaaagatagttttaaggctaatcatagttgttcacaaccggaaaaaattgaaagataaaaaacaaatgaagagaaccaaaccattttggggcaaagaagtcatttcaaattcccctaacaataagatagatgactcacacaaacacctccctacatattaattatcattgcctttgatgtaagcaagtagtgcaaccactatttatttttgcttccatttatttatttatttatagttccatttcaagacaaacatcataattatgagttcgaacttatgttttgaattttaaagtcattgaatgtttagcacaaaaggcaaaagaggaaaataacacaatcaccgttcacaaaacatgcattaatacgatatatcccgtgaataaaataataaacgccaaaaaaacctcacaagatttggtaaagaaaaagtaattataacgtgaaagtgcaataatttgtattattatgcaaccaaacaaggtccacgagggatgatatatggttaatgaaactaagttatatgatgaaaattgacgaaagtgcccataaaataaaaacaatccaccttgtaaactatgatgtttcacgctgtggcacactcataacccatggagagttataaaaaaatttccttatagttttttttggggtcccaaaactttcctcttcataatttctctctttaattttctttttaattatttcgatctttatctaaataagggatgatgaaaggaaaagaaataaagggtcatgaagagaatcggacacgaacaccttctaaaatgtgttattattatggcttatgatgagtattgttgactaaaccaatattgaccaaaccgggaaatgaaaggagtaaaagagagcaatgaaaatggtccaaatagaaaacttgaaattgaataatgaatcatgatggttcgaaccaatccccaaccatcattgcgaatctttgggggacgacggcctattaccctccccttcatcatcatcatcattttcactcaataactcgtttcaccttcttctttagttacttttttacccttccctcactacaaaattacccctccctaaataagtactaatccaagccggtctacgtattaaattttggatgtagtgttagctagggagaaccgtattttacaaacattatgacttttatttccgtgaaatgtcgtcttaattacttagtgttgtttttttttccaacaaaaaatgcattttcggatttaaaattcagtcagtaatacaatgaagacactaatatattcacataaatattagaccatacataaatttggagttgtaagatttggctctagttgttcgaaatagtgtgaataacatctataaacttgttggtctcatatcaaaacgataacgtgaatagatcatttggcgggtcgggaatgaacggctaatatatcataccaaaccaaaatgtgaagagacctttaaaatacaaaaaaaatatctcttcagagaaatttcgaaagagaagaaattttccctctaattttcttcttttatctttcctctcttctttagatcatcattcacatgacgcaacacaaatctttttttttctttccctcacaaatcattataattattaaaaaaaaacaaaagaaataaaagaaaatattgagctgcgaaatcggccgccatctaagcataacacaacacaaagcatgattgttgtgtcaggagagagaagcatgtccccttcaaacactctctctctagcttttggagttctatataagagacactatcttcattttgttctctttgtccctctaccttccttacatataacaatctctcttcattacaacataagctacttcatttcgattctaacaagtttcttcttcccaaaaggtaaccctctctcttcttatgtctctcctcacgtacaagcaacgtgaatatcatttaccataacaacccaactattttcttcttctttataatcaaactttaaattgttggaaaaacttaaagctttatccttttctttcagccaaaggcaaccgaataaactctatttgtttttcttttttcatctacatttttttttctgtttcaaaaactctctttttattttacgataaagatcctttgctcgtaccggctctgttttggtgttttgtattttgtatttttcgttttgaaattccatcattatacttactccatcatcattactttatttttgttttcattgttgtggtgtggtggctttatctttctttcttttttatcctcgcaaccaaaaagagcatgattgttcctccgtttgatcattgattttttctttaaagaaaaaattgacatttttggtagaaaacgaaataaatgcagtcatgatttttgcttaatgtaattcctcattaaacgtgtgaagctgcacaacccatgtggtgttgcaatgatttaaccgcaactataatcataacttagagagctttaataatctcccttcttctacttcttcttcttttttctttgtcatctaccataatttaactctctttttttgattaaacagaaccaagttttgtcgagatggagaggctaaactcgaagctgtacttgcaaaactgttatataataaaggagaacgagaggttgaggaagaaagctcagattctgaaccaagagaatcaacaacttctcttcgaactcaaacaaaagctctcgaaaaccaagaactctagtggatcaaatcaaggaaacaacaacaacaacaacaacctctcttcatcaagctctgcttctggataatcctgatgcaacaaaactctttaggacaagacttggattcggataattaggagaacccatcatttttattttttattttattggtgtaatgtaagaaaaattagctaagtaatagtggttagtggtagtattattaattatggagtagtttttatatttttgttgggttcttctaattaaattactacaaaaaggacagagtgttgtatgctctctggcctatcttctgagggatattttacttttgtttccatttatatgttaattagattttctattttgccttttcatgtggggtttggttgtttaggacatggtggattctgggactacattgtaccttctgctcttctcttaaacaaccagtatctttaaattatttatttatctcttttattattgggttctacattttcctttatcttttataaatttcatggtcttgaaataacaaattgtgaacaataagattggaaaatgtgacttttattattcagttatgttagttaagagttttctaatctcgaccagatttattttcaaggtaccatgtaattgatattaacaaatttgtaaagtggttgttttcttttaattattgaaatttatatatggataaagtagtgataaggtccataaggatatcagaagatacgaaaaagtgtttaggagaacataggtttaccaccaattttaaatcacgtgatcaaagttgtatcctattgactgtatcatattaaaacgtcatttattacctcctttacaaaaaaacaaatatttcttaatgaaattttgtggtgtattttgcgatgataaatttaaaatgtaaggtaaataaatattttgaattttactcacttatttataatataaataaataaacgtaaattaacataattttgcaaatttttagtattagtgaaaatttagttgatttttctttttgtattagttccctttttttaacggtttgtattagttcaaataccagcaatatttatgctctctattataaaagctcaacttacaactataaaataagaataggatttatgaatagatcataatagtattggtcttcatctttttaaaactatccacataaacaatagtaatgaatctcactagatagtagtagtgtatagtttgggtaaaatacattttagagtagattactgcatattggttttgtcgaggatgattttccggttcaacaaattctgttatatgcaagcataatcaaccacatcttctttatgaagagatcctctcccgttaaatcaccgtttacttcacacaaacacaatatatgtgtagtgtacagataatttattgaccataaattcaactatccaagcttcaaatttcgtaggaatatgacatagtaatcaagtggtggtgagaaaattactgagagacctacgaatcctagaaacataattttcgtaactcctaagtgaaaatcatcatcataaactcagactttgaaagtcaactttgaaatataattttcagaaaattatatccgtttgatgattacccccaaaatctctttggatgatcatcaagcaagacatcatcttctgaatctctgatgtaagattatggacctatgttcaatttctaatcattgtttctctatttttatatataaatcaaatgaattttggcgtgttgacattggacaatatagtttaggttagacttggggatgtagatcatccttcttcctgtccctcctaggatagcaagagaatcattagggataataccggaaaaaaatggacaattagccaacactaattttggagacttgaaccaattattattattattatatatttacaaggaaaaaactacataaactatcaagaaacattagcttgcagtaaaagaccataattccaatattgtgtcaaaaaatagattctaagacatgatgatatataaaaaaaaacttggagaagtgtcaattccacaaacaatagccaagccaacacggacaatcgttggtactatcgttgtacatgagaggctttgttaaaggaaagagaagtaagacgaacccaaccacaccgcctaagaacgctgcactcaccaaacctgagagaagaaccataaccatgtttagcttattcttttgcatttgcatttgttaacaaccttgaactttatgtcttaccttttccatttgcgtatagcacaggcaatcccatgtagttgcaaaatatatgagcaaacaaaggagcagcaagatgtcctgtaaaatttacacaatgcaggagacaatcatccattagaaaggcttttacatgtataagatatataaatgcctggaatgttaccggttctgatgaagagaaacgatgcatatgcaccaaaaatgactgtgtagccaagctgaagacctgatcaacggacaagtgaagctcaggactgatcaacaaacaatattattatgattatggatggcaaagacataccaacaataagtgaagcccggagatagctgcggttatgcctgatgtacatctctctaaaatggtttaagtgagctacacaaaacatataaaagtcagacaaatccagtaattttcttttcactcgagttgtaaactgttattcacagagagagagagagagagaaagaaacaaacccaagctaaagagaactgggcacagaaagatggcagtgttaatcctaaacccagcacacagaagcaaaggtatcatacatgatcggaaaaccagctcctcagttactggtgcctgcaaatcataagaaacgccagctctaacagattataacttgttcgatttagaacttacttatacaccaaactgatgcatatagtcctcagacaattagcaagcaatgccttatgcaatttcaataaagaattgacaagataagcacacagagatggcaaacatatgattaccacgataaaattgcgccaaacggaaacattagaagcacttgtcaataccgaagcagggattgtttggaaaaagcttctgatgtaattaaaggaactacatcctccgccattttccttccatgattccaggagagtaaacaacttcaacaccaaagacccagcataaacgagcgaggtcaatagaagaggatacaccactccttgccactgttccatatcacaaaacataaccattttaatatgaatagtgtacaataagctacgagtaaacaaattgagacaaagaacttaccagatgatctttccttatgccataaactccaagtatataagaggcctcccagctttttatctaacattactcaagcaaaaaaggaagacaagtttcagagattcctgtaactagcgttgaattgtaccaaacacaacatagtcaccaatatttgagtgttacattcttagagacaaattgtgtgaacctacaacaactagtaaaagctaattcaactctcaacaaagttacaaatacatcaaatttctttacttttagtttaactttcatcaaaacaccaaatgcatctagatttggacctaatttggttacagatcaacggagaatgaacttcaaatcgagaaatggcggtactcaaagaagcttaccggaagtataaaagctgtgaagacgagagatgctacagtacaaatggccgcgcagatgaatcgccgaatcatgaattcggtgtaagaagaagccgacgggagacggagtatcacggtgggaacgtaaaggatcaaaacgtagaatagtgccatcgcgacgcaggtagccaccgccaacgacatcgagatactctcgccatcggtggccataatcgttgaggaagctccggcgaagaaatataccggctaataagtgtcgaagtcaccgctggttaaatcttagtccggcggtcttctaatctttaaccaattacatcgtgccacgttatagactaaaacggatgactactgggccgaacagacccattgggccaatttcgtttataaaagagggtataacggtaatatcatcagaagatatacgtcaccatgccagtttcgaagaagcctattggttatatttcgtcattaactagacggaatgacgaaactaccctcagatgccttcttctaaagttgtctcttcactgtcaagaagaagaagagaacaaaaaaaagaaaggaattttctctgaaacgtcacgaacgtgtgaattgggttaaaaaattcatctcattgatccaaacttgaaaccctaatttcgaatctctttgctgatttggtgagatctcaatttcggaaagaagatgacgaaggatttcgcagttccacctgtagttttcccctccggtggatcttcaggcggtgctaatgtccagcaacgaagattcccagcgacaccgtttcaaccgccgcgtccctcttcttccgcaatccctttcatgtcattcgacattggatccgcagccgcgtcttccgctacacctgccggaccattcggcgggacaatcgcttcctcttcttcttttggtggaggttcagcttcgtttgaagatgaggagccattactcgacgagctcggtatccatccagatcaaatctggaagaagactagatcgattctcaatccttttcggattaaccaagctgttcacaaagattcagatctatctggtccgatctttctgtaccttgcgctttgcttatttcagttgttagctggtaagatccagttcggtgtcatacttggatggatcgtcgtctcctctatctttctatacgtcgtctttaacatgcttgctggtagaaatgggaaccttaatctccatacgtgtacgagcttggtcggatactgtttgcttccggtggtggttttatcggcggtgtcattgttcgttccccagggagcagggccggttcggtttgtgcttgcggctttgtttgtgttgtggtccactagagcctgctctacattggtggtatctcttgctgatggtggagaagagcaccgtggcttgatcgcgtacgcttgtttcttgatctatactctcttctctcttcttgttatattttgattccatattgatagatcgtgaatcacttccgatgctgtgttagcaagtagcaaaaaaaggctgcaatataagttctttgatgtgaggttgaattgggtgggaatagcacggtgtgtaaaggcttttttggataaatttagaaaggtgtttaagaaatttgattcaatgtttgtatctgtcacttgatctttaaggttcttacttaagaattatttatacaatttggtcgatatgtcttttgacatagtttgttcctggacattagatttgtgagagtattggaattgatgttgcggatgatatgcttctgtactaatgcagaagaggtttatatgcttcctatttcatgtttattttgctatttactttcccggtgtgaggctatgaagatgtgctgacttcttgcttggattatacttaaaggtcccaagttttaggaatgattggcattagatttgcttaaagtatggctccatgtaggtagagtagaattttgagttggttttagagctgttggaaacttaggcatagtctaatgaaagagtgattagtatttagtggtttgctcggtgttggtatgttccctgattaggtggcatagataagtagggacatgggatcttggcttcaggttcgtcttctactgtcaatcccagaactgcacttacttttcctgatagtatttgctgtgtcacggaaattagagagagatttatccgcaattcatactctcttagatggaatttgttttaatgtgtcgagaagaatcagctatgtccaattgagtgagcatagtatttgtcagctttaccttctcctaaaacattcagtagaactggtgttagaaatgatctctatattttcgtgttgcaacactcgttccgagggaaccatttttgtgttccaccttttctttagaatccaaattgactcaaaggggagtaggcaattgttttaaacatacaatgtaaagatgtaaaatttctgatatatctggtggatgtacttaagacataccctacaatttcgatccttggactcaattgaaaccaaacttttaggcggcttggtctctcccttaccaggatcttgtcaaaggaaaccatatatactcatactcacctagttcttccatgatatccagatagtgataaaccatctgattaaacactcgtaacacttgcatatattgacaagattatctctcaagtgtctataagatacgtatttgtgtttcaaggtaaaattgtaagatatacatctgattaagtattcttactctcaattctttgattatcaacatagagaacccctctagaccaaaccaaatcactccaacctcttgatgttgccggtacggcattagagatttcggcagctggtaatagacagttggccagtaaaacgctacctgttctcgccggtaatctctggcaatcatacggtggagatgtggccgtatcactgacggcctccaggtttatctcgaacagatcatcttcgccgtcttcttcactacttccctcgccatcgtgttcaggttcgtttgcttcttgtttctcctcttcttctgttccacggttaaccaaaccaacacaacgtgtcattgttgattttgaaataatttccggtttaagagtccttgtggttttaaacttgattatgtggttaatacgtatatataaaggtgattaaagtagaaggtgggttagtagaacggtcctcaacgaatatacaactatctttgttgggaatttttgggtcttccaaaagattttttttatacaaagaagaaagtaaattccaaaagaaatttgttatagactcgtgacttgagatcgagaataataataacttgagtacattaaatgtgtacggtgcaacagtcactgtttagatctaactatattaatagctacttccgaataatatatgtttaggacttaggagcaaatgataacttctcttattgtttctcagttcgttgccacaaacatgtagtcaccaaaacgagtctatttttacttgtgactatagcacaacatccaatcgaattacacgaaccggttcaagatattgaatcctaagcttttctcaaaagtcgattccaattccgaatgtaattgtagagtgcatcaacgacatcattgtcaaaaataaatgataataattatataatggtattatactataaaaggttttatggaggagaaggtacacctaacacgaatcaaatatatacctaccaacatataaacacacactcttttgtttaataaactttgcacaatttttattttcactttttccgttttttcgggtctaattttctatttcggttgtaaagataataactttttttctattataataatttactcgtaaattaatcaacgaattacgtggcttaaggatattcacatctcaatcctattacgttgggttaattcacaaacaaacaaaacaagacacgaccaaagttacaagtaaaccaaacaaaatctaacctgtgcgtgttaattagaccaaacctctctcttctctcacttcccagctacttctctctctcgcgctctctctttcttttttggcaatggctactggatcaacaaccgattccgccaggtctccttcctcaggtttgatcttttgtctcttccattataattacgcccattagattctgatatttctttttttttgtcacttacaaagaaaaaataccatatatgtggaaaattttctcaaaaatcgcagacgaagattccagttttgtacttcttgaatttcgttcaaaatagtaatcctagctttaaacacatacaaaaaaagttccagaattgggtcagctgatgtgaaatgaaatgattactgttgttgaactttagacaatgcattaaatgatggctttcaatcacataatcctagctttaaatttcgttttattagtaaagaaaaccaaatcaatccttgcccattttggtggaatttgattgtttttttttttaagttagatagtaagtataaacatgttacaggttcatgatttgcttatgttcggttttatgttgcaagaatatttgtttgaggaatcttaataagtgcccatgagtgagacttcacagcttgtttcttgcccttgaagatttcctttaagagacaggacaataatctctgtttgtctctaaatctgattacaggtgttctccaaaagctgttattactattctctgtctgtatagctacttcaacttataaagcaatccagcctcctccatcaaagctatgtggctctcctgatggtccatccatcacaggaccaaggattaagctaagagacggaaggcagttagcttacaaagagcatggagttcctagagatgaagctactcataaaatcatcgttgtccatggatctgatagttgcagacatgataatgctttcgcagctctactatcaccggtactttaaaaaaccctcttgtgatgaaagcttcactaattgcttacagttttaaagatgtaaaaacttttgatatcaatgtttgtaggatattaaggaaggactaggtgtgtatatggtttcatttgatagacctggttatgcagagagtgatcctgacccaaaccgtactcctaaaagcttggctttggacattgaagagcttgctgatcagttgagtctaggatcgaagttctatgtcatcggttactcgatgggaggacaagctacttgggcatgccttaaatacattcctcacaggtattacttttagaactaacatatttcttgaagggatgattttgatgatatgtgtgaatgtctctgtttgattcttcttaaggttggctggagtaacgcttgttgctccagtggtgaactattggtggaagaactttccatcagagatctcaaccgaagcttttaaccaacaagggagaaatgaccaatgggcggttcgtgttgcacactatgctccttggcttactcattggtggaactcccagagctggttccctggatcaagtgttgtggctcgcaatctcggtatgttgtccaaagcagacaaagagatcatgtttaagctcggtgctgcaaggagccaacatgaggtatatacaacattcttcatgacttctttttcttcacctacctatttgcatttatcaaatctaagtctctatgaaggcacaaataaggcaacaaggaacacacgagacattgcaccgtgacatgattgttggatttggaacttgggagttcgatccaatggagctcgagaatctgttcccgaacaatgaaggatcagtgcacttgtggcagggagatgatgatgtgcttgtccctgtgactctgcaacgttacattgcgaagaagctgccatggatccattaccatgagattcctggagcagggcatttgttcccgtttgctccaggtatggttaataacattgttaaaacgctcttaaccaatgatggagtgaagaagtaaacgatgtcttctctctcaaaaagttggctagttttggttttgtaacatgcattgctatgatattttgaaccgggatcagagagattcatgagaatctcaagtttctcttggttgctgatatatattgtgggtgattagtaaagagttctggtacctatgtaaaacattctcagcattcatctcaaaaagctgtttctgtatatcacccaattttaggctaatgtcaactagtttaatattaggcttagacagccattaattgtgagatgtgtcagaacaaaattaggtgtattaattgaattatgggccacttgtgtttgtgtttgcatggtctaaaaacaatcaaaggaaaaaagtaactaaagaggccaatatgataattaatagttaagtttatataaaaccgcattaggctaattagcatcaatccgaccttagctcagttggtagagcggaagactgtagtagttgctgtaatctttaggtcgctggttcgattccggcaggtcggataatcttttttatttttgtttttagttttttggctattagaaacacttgataaattaagcatttaaaattcgatagtccttatgcagtgaatagtccacgtgcactcccaatggaagttcggaatcatgtttttttttttttgtcaaagttaaataaaatatcttcgaaaaaaaaagtaaaaaaggaagaggataatttctcgactttgatttgttttaattctttaataagtttttgtctcactaaacgtaattctattcaaaatctaacaagtctactttcaccagctagaagctcaacgacaaacaagtgtttacaaactttgactatttctttcataacatcttgaatctaacctaaatatgtttttaccaaagtaaatcagtattgatcaatcaaattaatccgtcaatttcacaaaacaaatcatgaaccaatatgtaaaaaaagatcacactttaattcgctcttctaatccaaatttcacgttcttattatcttatatatgcttaaaagagagaaaatcatgtctagttttagacgtaaaaaaacatttgtgtagccgaagtcacacgtgtcgagcctgtgagaagacactgcaagaaacagaagagagacacgtgcaggacacgtgtcgtccgcagccgaacggattctttgtctctgatcatgggcctggacctggacctgtctaagttagcattccattggtcgaaagataactttagacaaaagatgttgaccttcacgcctctcttcttagaccccacgcgccacactctcacggtgagaacataaatatcaatctctcttttaccgcctcctacccatttatctctctctttctcaaaacctttcagtcaaaattctccggcggcttttaaactatgtgaaggaggagaacctccataacaagaagcggattctctcagttttccggcggcggaggaacacaaagccaccggtttttagacacacagatttcattttcaggttaacacttttcttgttttataatttttcaagatcttggattagaagactgttaaataaatctatctctttatttataagtttaggtcttcgttttctggtccttacttatctgcgtattaccaaatattaaactttgtggtaaagtgatacttagtaatagacggatataatgatgacccaagctaatgattaatttattttactaatcatcaggttaagctctagattatcttttgtttaaaaccgtattaataaatgattaaagaggaaaaaaatcttgtgttgataagttcgctttaagaagaaaacgagtgggttaagatattttcctcttttggtaacgaaaactttattggaagagtaaattattagtttatttattgctaattttagtatcgtttgtcgctgtcacgatgtggaccgttcttctttattttcacgtggaccgacttaattaccttctttcattcttgttatttcaatattttttacgtcatttaaactccactttaccaaaataatttatttcattctttgagagcatcaattatcaaataattcaattgtcttttttcgtgatagttgaataagggacaactattaagtgagtttcgtgaatagctgaacagggacaagtaactgaagtttggtcaaaataatacgatgaatttaatatataagagacaaaattgttattgtcgtttaggtggtatccatatttcaatatagtttgtgtgaatacagatataaaaatggttattgttgtgtatatgatgcagttgttaaatggtaactagagaaacgaagttgacgtcagagcgagaagtagagtcgtccatggcgcaagcgagacataatggaggaggtggtggtgagaatcatccgtttacttctttgggaagacaatcctctatctactcattgacccttgacgagttccaacatgctttatgtgagaacggcaagaactttgggtccatgaacatggacgagtttcttgtctctatttggaacgcagaggagaataataacaatcaacaacaagcagcagcagctgcaggttcacattctgttccggctaatcacaatggtttcaacaacaacaataacaatggaggcgagggtggtgttggtgtctttagtggtggttctagaggcaacgaagatgctaacaataagagagggatagcgaacgagtctagtcttcctcgacaaggctctttgacacttccagctccgctttgtaggaagactgttgatgaggtttggtctgagatacatagaggtggtggtagcggtaatggaggagacagcaatggacgtagtagtagtagtaatggacagaacaatgctcagaacggcggtgagactgcggctagacaaccgacttttggagagatgacacttgaggatttcttggtgaaggctggtgtggttagagaacatcccactaatcctaaacctaatccaaacccgaaccaaaaccaaaacccgtctagtgtaatacccgcagctgcacagcaacagctttatggtgtgtttcaaggaaccggtgatccttcattcccgggtcaagctatgggtgtgggtgacccatcaggttatgctaaaaggacaggaggaggagggtatcagcaggcgccaccagttcaggcaggtgtttgctatggaggtggcgttgggtttggagcgggtggacagcaaatgggaatggttggaccgttaagcccggtgtcttcagatggattaggacatggacaagtggataacataggaggtcagtatggagtagatatgggagggctaaggggaaggaaaagagtagtggatggtccagtggagaaagtagtggagagaagacagaggaggatgatcaagaaccgcgagtctgctgctagatctagagcaagaaaacaagtaaatagagaccttcttcattccttttatgatgtttcttgttgaaaaaaatctaatgtttgttgttgttgttttgggaaggcatatacagtggaattggaagctgaacttaaccagttgaaagaagagaatgcgcagctaaaacatgcattggtatatatttactcatctcgttaaagagtttattctttttgtgaaagtgagtttgtaacaatttagcctttgttatgttttcatcaaggcggagttggagaggaagaggaagcaacaggtaaagacacctattgagtttgcattactaagatggttgcagtattttggtcagaagaaaactacaaaatggaattgttggtttatggttgcagtattttgagagtttgaagtcaagggcacaaccgaaattgccgaaatcgaacgggagattgcggacattgatgaggaacccgagttgtccactctaaacaaacaataggaagatggagaagaagtcggagacagaacgagggaaaaactgatgattttctacgttgttgttttgtctttgaggaatgaggttatagaatctttatactttgatgttttctgtgttggtaggaggaacaccatctgatctgctttactagtgttccctgtgaacaaagaaagtgattctgtgtttcaacatcatcaatctttggaaaatataacgagtgttatgctcacttgtagatttaggtacactctgtttctgtgcactaccatgaagagtcttaatttggaatgacacaatgcgcaagacaaaagatactcgggacacaagtcagatagttaaacctagtaacctagatagatcaagatgcaaattacattagagtactgcttaacattcagtaatacaaggagagaaagagcaaggaacaaagtaaacgtgagagagagagagtgttgtcttcttcatgttgatttgtctattgcattctctgtggaacacactcttctcgagtcatataccttctccacttcctcttctagctgcaacaacaacaatcaagaacaagagaaacaagttagttagtgattgaaagtagggtaaattttcttaagattaagtcgaagaattaattagaaccgtttcggaagagcactgagatcgtcttgatcagtgtcaaccgtgttggtttggaagactctgtaatcatgtaacttacaaaatcaaacactctaaaatcactaataacccgtacgaatcaagtaaactctaaaccctagaaaactctcaattccgagagaacagaaatgcttacttggcttgacaatggatatggatctcaatggatgtttggcatgtcttgatggatttaccacgccagccctgtttcttcttgcacacagttctctcaaccttcttgatgacgtagcagccgtcggaagtggaatctccgagctgttgatcggtgatatcgtcagaggaggaggaatggaggatgaatctttttgccagaatcttttcttcttcttcttttgtgtgagtgagagagagagtgtgagaatcttgtagaggaagatgtttgtgttttaaagtggctgactttaaccgggctagagtaatcaaccacactcacatttctacccacttttttttaccaggcttcagtgtggggtttttatttatcgtaaaatgtttccgacttggccaatttttatgtcggagttatttttgatgtcaaaatttcattggtttgttgaagtcgtaagaaatccagagtaatacgtagaaacgaaacccatttccacacacacttattcacattacattaaatcatcgcaaacgtcgcaaattgcgaacctacacggaagacagccttaagatagttgtatttacaaagcaaatttcatcgactactgtggtagagtaatagagttatatatgtcttattatgttatatgtgtaattttgcctttcatgttgtcgtgaatgactcaccacatccacactttgtcgcgtttggattgacgaacacaaactcagacctgtgccaatacaatgcaaacatgtttaccatgaataaagagagtgtcaagattggcacgtgaaagggcacaaacctaagcttatcgtccacgaaatccatctctgtcccaatcacatgcatcaccgcctttggatccacaaggatctttacacctttctcctcgaccacctcatcaaacttccctttctcctctgaaaacaaagatcatagcagaacaacgccaaataggaagcctcaggagtcaggacacatttaagtcatctattaaaagttctcaaaagtgctacaaaacaaaaggtcttaggttcctaggaaggtgacaaaacctaccctaaaacttgactctgaacctgatagaatatgtgcctttaattattacatacatctctctaatcaatatgaactccctcctcatcatgagcatcaaatatatatcaacataatttatgaggaaaaaatcaacaaaaaagaaatatatatgtgggaaaaaatggaaattacgggcgtaattgaggacgtaagataggccattgcatcctttggcttcaacagcaaggcggaggaaaggtttttgctgatgctgcagaagttggcgaatcctcgcagccgccgtgtcactcaatgctaatacttgctttctcatcgccgaccaaatattcgaggatttcaaatttgtgctaaagatttttcagagaggaagaagacgtccaagcaaatttgttacaagttgatatttaaagagccattgtactttaatatataatttagtgaacaagtcttaagaactgtttaggcctgtaaagcccgaaagaattagtattagtaatatataaagtttgtattgaatatgggatgatgaaacgatctagcttccagaaaaagtcttaattacacaacataataataactaccaaacgtgtcaacgctcccgtattcgtccactaacattctcccatgaaccctaagttataagtcctccaaggctacgatcacatttacaagcggaaaattgttgtgtttgatttgtttcttgttttattctcactctaagcctctggttatatagcattttttggcggaaaagctaatcgcaaaacatgagattataattatgcgacatgtcaaattgttatgaaaacattttatataataagaaatttatttggtatagtatcatatgaaacaaagagtcaatacaatatcaatgtcattatatgtgctcattatgttaagttgagtcaaggcactttactaagaacacttcaataattatatttaactatttctgtgtattcatacgtatgatacaaggtttggtgttctatatactttatcctcatcccttgaattttagttgggccaaaataatgacattaaaattataatatgttgctatataaaaaattgttacaatttggatgcaacatagagagatcattagcgagacattgggtggatcgtgcaattcatttctgttttgtcaactagcaattcaaattatggcgacattatatacattaatccatattacacaaaaactaataaactatatatgtcttggattcaaatagaagaaataaaagtcaacgagtttgccctataaatgattctatgctttcaaatagttagctacaagctcatcaatctctgctctattaaaaaaagaagaagaagcaaacacaaaacaacaacaaagaaatatggcaaagctcatagttaacttctctgctctcttgatgatcatcttgttggtttctaatggtaattttaagattttcttaacttcctttgtcctatattaatatcgatatggatgtgaaaagattaatgtgagaatggttaaaacaggactcccaaaggcggtagcccaaacatgctttaaaggtgaagctcaagagggtgtgtgtgttaaagttgacggctcaaaattgtgtgaccttctttgcagggcaaccaacacaacttggtttggggcatgtgaagtggaagacaacgagacgcactgtcactgctacggaccttgttaagtatctcatccggacgcaaaaccaaatatgaaacgtgaataattgtgtatcagtacctaaataatgtgtgcattgcttatgatcaatgtcacatatctacatgtgtgttccatgtttgtgtgtttttattttatcgctttcaataaatttgcatcagcaccgtaaatgtagctgatgcgataaatgaatgtaagattaaatctgtttattatgtttgcttttggtgttccattatctctcctatatatatgtcctcttctttttcttcattcttgtcattaatctatatgtatgtgctattttttgttgaacaaaggctaatgagtcttatctataacaccaaatcaactcctaatagtaatagaactcttaacctaaactcaaaagaagtaaagtacaaggaaaactctaatcaaaagttcaaaaccatattcctaaaccatgaaacataaaggaatatcacaacctcgaaactcttttgccgtaacgactagagttgctttttgtttttagttaattcaaatgatgacattattgttccaactatgtaatgtagccaccacatttttcttgtaattttttttgtttccttcataaaattcatttagcaaatttacacaaaaaattcaatgaaagtacatgaaatgaaatttaaagtacaatcatttcccatagttttttttcttaccaacaccaacataacagtgataaattggaacaaaattttaccaaaataaaaataaaaattttatgaacaaaagcattttttatatattttttaattattgggggtttaatgaatttgagatatttactagtcagaaaacaccaaaaccctccgtttcgtgggtttcctccagaccttgagctccttgttcaattcacactttttctctcccaactcttcttccaggtttcctctgctactctcaggtttctcttctccacttccctccagctttatccttttgatttcgtcctccatcttactgtatttacccaaaaatctaagcttttctcagtgttcttccatttctctactttgttttcatgtaatgctgcaaacttcgcaatacccatcttcaatttcttcaattcgtaatgggaaaaagcattttagtttaatttgggttttgtggttcctcacttgtttcattcttctaagtcttaaaccatccactgattctcaatttctgaggatttgatatctattgctggttaacaatggagcatagatgcgactgggttttgtttatgttaactttatgaatgtaaatcacactgctttgtggctactttgtggatttcgtgttttactttgtggctgaatcatataactctaaattgagagctttgggtttgaccatttagctttttatgaacaggtcttgttagggaagtaatcagtggaattggatttagtcttttggttctgaattttgtaaagtcctgcagtgattggtctcattatggcaacttacgtttcaccgtgttttactccttcggattctcggttactaactgttcttagaaagaatgttttaccggagaatcatttaggcaggttgaactccattagaacgattgacagtaagaaaaaccgagttgttgttgccgctcagaaatctgaatcttctccaatcagaaactctccacggcattaccaaagccaagctcaagatcctttcttgaaccttcacccggaaatatctatgcttagaggtgaagggactagtacaatagtcaatccaagaaaggaaacgtcttctggacctgttgtcgaggattttgaagagccatctgctccgagtaactacaatgaggcgaggattaaggttattggtgtgggaggtggtggatcaaatgctgtgaatcgtatgatagagagtgaaatgtcaggtgtggagttctggattgtcaacactgatatccaggctatgagaatgtctcctgttttgcctgataataggttacaaattggtaaggagttgactaggggtttaggtgctggaggaaatccagaaatcggtatgaatgctgctagagagagcaaagaagttattgaagaagctctttatggctcagatatggtctttgtcacagtatgtcctcaaatctttattattactattgcatttgttcttcttagttataaactttgattgtagaaaaagaggtatgtgtcatttgtcaatcacttatcagctagttctggtctccatctgtccaaaagagtgaggtttatatgtctcttcatcattttataggctggaatgggcggtggaactggcactggtgcagcccctgtaattgcaggaattgccaaggcgatgggtatattgacagttggtattgccactacgcctttctcgtttgagggtcgaagaagaactgttcaggctcaagaagggcttgcatctctcagagacaatgttgacactctcatcgtcattccaaatgacaagttgcttacagctgtctctcagtctactccggtaacagaagcatttaatctagctgatgatatactccgtcagggggttcgtgggatatctgatatcattacggtatagcttttcttatgggcatcctgtgatcatttttttgtgtatggcaaatgatttaccagctacgtttgtccttgatttgtagattcctggtttggtgaatgtggattttgctgatgtgagagctataatggcaaatgcggggtcttcattgatgggaataggaactgcgacaggtaagtttggaatgatggataagctcatttagctgcatagtttcataagcagaaccattagtcactagatatgtgtcgaaatagtctaattgaactaatgagctagtagattggtgtggcaaagaaaccagtctagtgactgggatactgaaaatgaccatattatattcactgttactcaactattgtgcatctatgtcatgatgtaataatcaaagtcatgaaccttgaacttcttttgcgcaaggttttgttttgtttgcaacgtgctgattctttcatgctacttgtaatcattcaggaaagagtcgggcaagagatgctgcgctaaatgcaatccaatctcctttgttagatattgggattgagagagccactggaattgtttggaacattactggcggaagtgacttgacattgtttgaggtttttgtctctctctctcatctttgtttcttatctctatgtcgatagatccataaacaataactggatcttgagagacgcattgacagggtgttaaaatcatttattttcttccttccatagacaacttagagcaaagcctgattttgcttcatacccctaagatgctctatagtttttcatacactttggtcttgtgtaggtaaatgctgctgcagaagtaatatatgatcttgtcgatccaactgccaatcttatattcggtgctgttgtagatccagccctcagcggtcaagtatgtcctttataatgtttcttctactaaacatagataagacctctagagatgatagaattgatgttttttttggtaaaaggtaagcataaccctgatagctacgggtttcaaacgacaagaagagggagaaggacgaacagttcagatggtacaagcagatgctgcgtcagttggagctacaagaagaccctcttcttcctttagagaaagcggttcagtggagatcccagagttcttgaagaagaaaggcagctctcgttatccccgagtctaaagcccaatctaatcactaccctgcacactgcagcaataacaaacgtgtgtgtactggtagtctggtactgccttctgggatacagcaagatgtgttgatgtatgatcaagaatctgtgtgggtgtgtatatgttctgtcactgcctctggtcgtgttcttgaataggttgttttagaaatcggagtttctctctatgtcacttccaaaacaaaaaaggagaagaagaatcacacttctcgaaccataaacatacttataagattatgagagttttagcagaaattattgtcatttttcattcagttaataaaaaaatcaatagcgatataccagcaaacaactgtgactttcgaataaaaaaagttcatctccgacgcatgattctgtggcaatgtgcagcaaccaaacaaagaaccaacttggtttccatttcatatgttcaaaataaaatttgttgatacatagatatagcttgggtctagtttacacagatcaaacacaggttacaacatccggacttgtttccttgagaattttccagtgcaggacaagccatccatcaatctattatatgtaaagatatcaggcaacatatctttatccaacatctcgttcactagaacttctccttcctttcttctcccttctttcgtgaaccccgaaaccaaaacatggtacgttgtctcatcgggttcatatcctttgcttgatgccaaaagtctcaatctgtttgcatcagtagaatgatcagaactgcagagatcccgaagaagcaagttaaatgtcacactatcgggaagaattcctgcattcatcatcttctccataaaccctgacgctttctctgttcttcctgatttcctcaacccttcgacgagtgtagtacaagcaatgaaacatggggtttggcctttcttccacagctcctccatcatctccattgctctaaccgccttgttttctccgcagagtttctcaaccaaactaccataatcaaactcactaggtaaaaccctcttgttcaaaagatcgagcaccaatccacaagcatcgtcaacccgaccttctctacacaacccatcaacaagaatctcacaagtagcttctgagaatctacaacctagctcaatcatctcataagccattttaacaccttcctcgattttaccactgctcaaaaaccctctaataagagtgttgaagctaaccacattcggttcacaacctttctccttcatctccctgaacaaatccaatgccaaatcaaacttagagcttctacaataaccattgatgagaatgttaaacgtgcatacatctggctttgctctttcctttcccatcctctggtaaaaccttaaagccttatccatatctccagatttcacatatccattcacaacagtgttataaactccaacatttggtttaccatcgatcaatctcttcatagtatcaaacgctaacaaagcataatccattttcctagctctacaatacgcatcaatggcggatcggaaaataggttcaagctctggacaagagaatatacctgaggaacaaggacatggattcgcagctacaaaagagagaagacgataaagatcgtcaaaccggtgcgtggcggcgagtgatctcgacatccagaggaaagaatcgtgatcatgacggaaagtgtcgagtgtagctgcccaattaaagacggcgaagtcataatgagcgtagagcggatggttacggatcttggaacggaggaatccaagaagagtttgtggcgttagtgtttgatggtgagggagattgttctcgaggaaattgacgaaattggagtgtttgggagatggagagagcgtaagtgtcggaggaattgagatctccggaagctttggtggaggattaggtattcggtaaatctcaggtaacggtggcgtaatcggcgccggaagatgatgagactttgagacgagactgataacgttcttcttgttccatcgcatcactctctgtttgtcaaacgaatcgataaatgttgggcatttttatcgatttccaattttaaaccaaaccggaataaaccgatatctaaaccctagaatatctagaaccagatacgtcactggtgcttactgattacagtttcagttccaaagatgagaactttgagctcccaattatactccaatggtggtctcacttggttccagaagaagaatcagagctctctgttcatcaagcatctcagagtctctaaaccatcgagggttcagctcatatctgctgttcaattccgtccgtgcatcgatattcataaggtatgaaatcaatttcaccgattagaaaatcctcactggctgttgagtgcagtgaattcatttatggatctatctctgtgtgatgtgattttcgatagggaaaagtgaaacagatagttggatccacacttcgtgacttgaaagaggatggttcagttctcgttacgaattttgaatcggataagtctgcggaagagtatgcaaagatgtacaaagaagatgggcttacgggtggtcatgtgataatgcttggagcagaccctttaagccaagctgcagctattggagcattacatgcttatcctggtatgtgtttagttgaatgtcacatggtgtttgttttatattgtttgaatttgaaatgtaaagttttgatgtgttatatatgatacaagatgatgaattctaggcggtttgcaagttggaggtggaatcaattctgagaattgcatgagttatattgaggagggagcaagccatgtcattgtcacttcggtatagctgtcatctagcttgattgaatatgttatcatagtaagtatagctgatgataattatgttttcgttttgtatttcagtatgtatttaacaatggaaagattgatcttgaaagactcaaagatattgtgagcattgttgggaaacaaagactgatattggaccttagctgcagaaagaaggtgattctctgactagtttcatcttcagtttaatgttattggtcatgaaaagaagatcggcatttgaggtatttatatggttattttgttgcgcaggatggaagatacgcaattgttactgatagatggcagaagttcagcgacgtcatccttgacgagaaatcattggagtttcttggaggattttcagatgagtttctggtgcatggcgtagacgttgaaggaaagaagtaagctttaaatatctcaacgctgtgattttagtgtcttagagtaaattcgttttgcattgaaaatacagtatttagtcagtatgtactgatcagtggtgttaacacttcttctctcaaaggctagggatcgatgaagagcttgtagcattgcttggcaactactctccggtgagtaataacatgcagtttcttatgattcggaactaatcttatggacttaacgataattaacagaacttcactctattcaaaatgcttgtgatgttagtgaaaccggaattggattagatgtagtcgttatacttcactttagacatagagataagctcgattgcaaacttgttcatttgagcttgatcttaaatgttttttgaccttgacagattccagtaacttatgcgggaggtgtgacggtaatggatgatgtagagaggatcaaggacgcaggaaagggacgtgtagatgtaacagtgggaagtgccttagacattttcgggggaaatcttccatacaaagacgtcgtcgcttggcatcacaagcagcactcactccattgatatcgccattttcacctttgctcatcttttttatttgcattaccccaaaccttaagcttcaatatttgcaacattaatcttcagctttaaacttttgtgcttctttctaaactcttcaagaatttgtcaattttgaatattttttcgattaatcaagtttatggtttggtttgactactactcatcaaggaaaatcgcattccaacaacacgtaaacagaaacaaatacattttgtttgacaatagcatatacagatataataacatttaaactgaactatttacaacggaaactagaagaatacaaaaacagtgcggtgggtgtgaaatcaccgctttcgcgttgccgtgtttctttctgaataaaaacgttgatcagctgccacgtcatcaccaacgacttttcaaaacgagttccactcaaaaaaatcagacaagacaactaaagtactatttcttctactttccccctgggacttaaaacactatataactggaccccacatgtattacacttgtcatccgccgcgtcaacatcctccaccacccaacaaatccgctcttctaccagatgcgaaacgcgtcatcccacccaaaccgggtaccaccggttctccgccgtcgaataccgacttctcatcagcttccgcaggaagtcggctcctgatgtcgtgtgtgtttctcgtcgacgtgtgagtctcacgcgctgacacgtctttgcagccgcctttgatcctgaaaatagctctgaaactcgccataaacccgggtttcttaacccggtttaccggttcgacccgacttgatttttgacggtgcatacggcggctgcgttctcttctggatctcactctaccgatgcaagagactttaggagaagaaggttccagaagcgaaatatccgtctttatccttgacccgacccgtttcaagatgacccggttcttgcccgcgtgtctccgttgctttgcctcgttgaaacacgttttctgcggtttaggcaaaccgatgatcgacgctttggattttagtaagaaccgttgcgagcttggattcgagttgggattagaattgagaatcccagagtttcctttttgtgagtctttacgatcaaagaaggcgttgtcgctgagccactctagctgagcatcgtttgacaagaaataagattccggtgggaaatcactcggactaacggcggagttgttgtaataaggtgggatcgttgagtcgtcggcgagggtttcgcatacgatcttgcggtggtcggagccaccgatgcatactgaagaaacaaaggcttctatatcgacttgtggcatagagagctttgtgtagagagagggagatattgtaatgtgaaagcttttgatatttttagtgagaagaattagaggtgaagaaacgttggatgcgagagtagggctttttatattaacaaagagcaaaggttctttttcagattttatttttctttttgtcttcttattgtttgattaggacttgtgctcggaaaacccggaggacgaagtgtcgacgtaatatgcaaaattgaaaatcaggaattatataatatgatttttttaatattataaaatatgatttggatatttgtaactgttaagaaatgactaaatcgggaaaaattgttttgtagataaatataattattttcgatagattttaatatttttttataatctttcttcatgtttcgtcaaattagtgacaaggtttttttattcagtattatccaaagctatcagtttaattgattcaagttggaattgaaaaaaaaaaaacccagctaaacgatgctaactaactgtttgtattttgatttttattttctgaagtatagaactatttatgattagttttggctcaattacgtgtgtatacattcataatccagcatgataaaagattcggtctcatttttttggcggccgattcttccttttcaaggggttggatccagttaactgactcatggtatgatgccttcttaattaatttggaatggcaccaaatcatttggaggcttctaaatcaattccttattttcaggtgcaatttttgtaatataaacgcataaatagtaagataattgacccgcattgtctagagattgataatacggaaaaaaagatttgttgtaatttgtaaaacaacagtttttaagatattataagatggttagacaacgattttacaatagaaaaccaagaaagacataaggtagacccatgctaaattacattttccggctcaaacattatattatgcaaatcaattcatcttgttttattagttgaatgattcatcttagattaaaaaataactttggaccattgtgaatttaagcgtgtttaacaaccaggaataacttaaataacaagattatattttataaaaaaaaatcaaaagactagtatgagtttctgtttaatgtcctctgctttcttccaaaatttttaccacaaacatatttttaacgcataattttgagccatttggatcggaataataagatgcaaaacgagtagaccacatacccatatgtgtctctagtagaattgtgtattatcgttttccaaaaaattcagggaaccgaaaatcaaataatactattacttacccaaaactgattgatgcaaccgactagaacatttggcctgtcctgtgcagtccgacaaatcacatttcgtggggtcctatacacttcgacttactatgacatttcctctcctctattaatatattagcctatgaagatataacaatttgacgttgaaatattagtctcgattggtgagtggtgacgttgtatcgctagctataacgcaaatgattgttgcgataaaatgaagcggtataaataaggtggtaagaaaattactgttagttttgtactgctatcattttaaagttgatatatgtatctttagtaacgtgttattacttgcaatcttttatatagcatcatttgatcgaatataaaaatcaagtaaaaaagccaaaaacgcagactaatttaatatgctttataaaagttgtccaaagcatagattgcaatattgtttaagtagcatttccatcctcgtggtatctgtctattagttttttcttccatatttaccgaagtattggtcaaactttgaggattcgtgtttttctttcgtaatctaaagcttcgaatggtgattgcgttttgcggtgcgggagaagtgtgatgcggttcaaatagtactgaaaatatataaatatatatatgtatatatagagattttgatactattacagcactgttacgatgcggttttgggtgcggttttggtcaccatttacagccttaaaaactaattatctagaaaaaaatgtttctttattgaaaaatattaaatactgagtcaaaccattatatgtagtttatcgaatgcccaaaagggttatttgcatgataaatctaaatagtaaccaagaatattaaaccaccttttctccaatttcttatcaatattttggccgttttcttttgttataaaaaacaacattgatttttattttgaagaaaacaggaggattggctacggttttcgattgagtcattgactaagcttacgtcatctctgactaagataagagcgtcgaaggatttgaaacttgtttgcagtcaaatgtccaaccattggactaattaaaaatacatcaagaaataaaataaaataataaaaacgagtatggaactcgatcctttctacggcacaatatggtttctagaagttctctttgccctttatcgattaaaaccagctagatagtgatttttcttgtttactacaaaattttgtcctaaaagctcagaaagaagataagtaatgtttcgaatgttctagtcacagttgagctctccacacggaccacactccacagtttctagaagctaatttatttattgcttatcctagttgtcttcgtcacgaatgacatatttgactaattcagttcccgcaccatgaacgatttttcaaaatgtatacgaatatgattcattcgtctacgtgtttcgtgtttctgtgtataaagtcagttgcctagaaggcaatagaccttaaaggtaaacaatatatatcgactgtataagaaaaacgattagttacatttgtaaaagtatagtttttcgacttggatcaaataaaacgttgaaccagccaaccagggccactttttgtcttggagctacaaaatttgttgggccgggcctgtgaagatatgcatcaatttggtgatatgattagttttgctttccgtacccaaaacaagttagaagaaacaaaagagaaaatgagaaatcacatatcaaaaatgtgaatgaatcaatactaaatattgggaaaacagtctcaactcactatttttttttattagttggaaactcattgttctttacaataaaatttgacgacattaatcaaagagaatacctccataagcaaagtcacggttgtgctagtgaagtacgaaccataattacaatgactcgatggtttacctttgactccaactcaagcatcgattatccattgaaatgacatttggtccaatcaccaataacttttaattattaataatgtgtagtctcaatgtattttcaaaagttaacaaacttatattaaacataaactgtgaatatattatatatattaatttatcttaaatagctacattcacttcaatttgaaaatttctgatcgagttatactcaaaagaccgattggtcatatacgaagaccacaaaagcataagaggcagaaacaacttcaaagcaaagagtcatactcatagcactagcctagcgaagtacattttggagtgtaatctcaaattcaattcatgtgaaggaaagagcatatatagtccacaaatttttaagtagtagatcacttgagttcaatgggggcctactagaagaatttcgaaaagctataaacctttgactttgtacaaagtcaaaagtattgtggcccaatatgctccaattattcttcctcttgtctccaccacctctcttaacagtttctagctccaaaccatctttttttctttacttgcctctcctacatatctttcactacaaattaagatttatcgcagaggctaactagtagcaaatatatggtgtacaaactacaaagtaaagccttgattgtttttttatatgtttacatgttatattatagcttgtgttatcgagttgtggatttgaaaataaacttgttgggtaactttttcgattgtttcaagcagagtgttcattgtttgacaaacagtgtcgtgacgatgcaaagcactagagataattcataatcatttaaacgaaacaaaatacaaagaattatgtttgattcttaatatcttattaattatatgatggtattagtctaacaaataattaaaaaaatcctgtaagtaagaatatggactccgaatttgtataagtaaaacaaatcaaatgagtgtttgacaaaagaaaaaaatcaaatgagttttcttaaattcttttttcatacccactttggtagatattctcgacctatgcctatgaggttggtgttgggcattaccaatccaatcattaactggccaataacaaagttataataacgattgaatcaaccgttttagaaatcgaatataaaatttgatacacttttgttttcttcttcatgctgaccttaatagtcagcaggaagttattaatatgaatttaaaaactgggataacaacaactaattaaattatacaaattaacacagataatggtaacaactattaagttatcatcagctctcgttgtatagaagccggcatacagagccggctagagaatcattcttttctacaaatatacaatcatatgtctctctctagtcaaatatataaaacataatattgttatgattttacttaacatagatgacacataatacaatatttttgttaaaactatatgacatatgagattatccactttatatcgacattgaatcatcgacatacctacaaatttcagtattattcgacataacttttcgttatttgaagaattattattattatttttaagacacaacttagtacttaactatggatgatttggtatttacaaaacaaatttgtattctttataaccactcaaactaaccacatttgaatgatgtccggtttctttaatgagatatcaatcaacaaattcacgcatatatgtcaacatgcaattagtgactccaactctcatattattatataggtaggtatatcttatacacttaaatacgacactactttatgacatcttacctactactaaaacaatatgttcatgcttagatgcacatgcaaatatgtaagaaacatcacttaaaagaaaaagagttcatcaaaacaaaacaccatattattatatggattccataattttgttttcatccactaatttaaaataatattcagcttatatttatgtatatatccgataagacactggatgatcaccaactttttactcttatgtgaacttgaatattcggtcatcagaaaaatcattaataactattggtttatttttgtaaaacaagcaatcatgtcgatgattaaagggccatatatttaatcttgaatcaggaatgacaattcatatattaaactaaatgtcacgggccgtatatacgaatacgtacgaacctccgtgataacctatcgcttgcgtaaggtactaaggtaaaataataggtggtgcaattttagtctcaaaagacacatatcacgtaaccatgatttgcgacgagatatatgcattttgattatcaaaactatataataatttgaaaaactacatttctctctgccaagaaatgcaccccactattcgaagtcaacacagacaaaaaaataaatacgaacacaaaaatgaattaaagtcaaaagctcgctagttctctttttattatattgttatacatctcatctagtatataatcaccaaccatcttcttcttccattttcttcatcttcataatctcatttcctctacgagtttctagcgtaaaaaaactaaatacttgtctttaaagaagaaaaatgctaggaaaaagaatagcttccttcaagaacttagcaaagaaaatgaagagcatcaacacgacgacgagaagcggaggagaaggcggctcggagtcaacttataacgagtctcttctgatgaatgaggcggacgaggcggcgatgatggcgtcaaagacgccgacggggacgtttgcggtgtacgtaggggaagagcgcgtgaagcgcgtggtaccaacaagctacttgaatcatcctctcttcaggatgctcctcgacaagtctcacgacgagtttctctgtttcgagcagaaggttatgttggtggtcccttgcagcctctccgttttccaagacgttgttaacgccgtcgagtcttgtaatggcaacttcgatttcggcgagtttgtcgaggagtttctataaatttaattccgacttcttcttcataattatgatttgtcctcaagacattgtcttaggtctttttttaggaaactatatattcgtaggattgatcgattgattgtgaaatttgtgatacattgtaacacccctttgttgcgtggtgtggaatttgtaaatttttccataattatgatacatattattttactttaaaacatatattagttcaaaaaatcaaatacataaagttttatctatttgtgtttcccattatcgagaaaaaataaaatctatttgtgtttcctagccttcttttgaccttaacgtttggtcccttttatggttcaaacatgttggtgagttgagtcagaagcttgtctcgaatcgtaaccctactccgagtctgtgacactgaaaagtttgaaaggctaatgagagttgagtcagaagcttgtgtatgtttaagtttgcgtttacaaatttataaaataatgtttcaaagttttttaaacataaataaaacagagacacatacatcaaaccttgctttttgaaacaatctaatcttaaaatttcatgatcttggaactttatttatgtttggaataaaaaattattagtacaacaaatatgaaaagtgttaatagattacaagatgcataattgcataccacgcagttcacgctaagctacttgccgatgacgactccaaaaaagttatcagcagttttttttttttttggtagcatcagatttggtttgacaaaaacataaatggagtacttgttccaacttgacaacttccaaggataacaaaaaatctgctgacatttgggccttaatgggccaatacgtagaatatggacattaggacacgtcatcgtcggcatgtagaaggaaagggcaaaatggtaaaagagtaatgaagaagcgttaaaattcaaaagagaaaaagaggagcggctcttcaaataatttcaaatctcatatccaccccgctctctctctctctacacctcagattccgtcgccggtgagacagaataagagagaatttcaaatatcgaagaaatttgggatcttgctgagcagtacaagtaattggattttgaaaatcagtctcactggattcgccgtccgttcgccgtttaaaaatgtctagccgccatgacaaagagaaaggcgtcaatgttcaagtcctcctccgatgcaggtaataccttcgaacaattcctaaattcaatttaggttttggtttagattttgggtctaaccccacatttcgatttgatttcaagttttatgttcaaattgaatttaggttttggtttcgctactgtgtttgttttgtattgacaggccatttagcgatgatgaattgagaagcaatgcgcctcaggttctcacttgtaatgatttgcaaagagaagttgctgtttcccaaaacatcgctgggaagcatattgatagggttttcacttttgataaggtataattagttgcgtctactcaaaaattggagtatacttagtatctacatgttgaatgtttgtgtttatatgttgaacacaggtgtttggaccatcagcacaacagaaggatttgtatgatcaagccgttgttccaattgtgaatgaagtacttgaaggttttaattgtactatatttgcgtatggtcagactggtactggtaaaacatatacaatggaaggagaatgtagaagatcaaaggtctgtatattgttgcagtgtgtttgatttttaaggttttctagtgatggttcattatctaagctatgtacctttttttttattgggacagagcgcaccttgtggaggtcttccggcagaagcaggtgttatacctagagctgtgaaacaaatatttgatacgcttgagggtcagcaagctgagtacagtgttaaagtcacgtttttggaactctacaatgaagagattaccgatttgcttgctcctgaagatctatccagagttgctgctgaagaaaaacaaaagaagccgttgcctctcatggaggacggcaaaggtggtgttcttgttagaggattggaagaggaaatcgtgacaagtgccaatgaaatctttactttgcttgagagaggttcctctaaacggagaactgcagaaacattcttgaataaacaatcaaggtaatgcatttgatgcttttgttcgttgctcattagtcgagatttcacttaaataatgaaatccttcacttgcagtcggtcacattctctcttctcaataacaatacatatcaaagaagctactccagaaggtgaagaactaatcaagtgtggcaagctcaacttggttgacttggcagggtcagaaaatatatcacgttctggtgctagggatgtaagtagtttctcactgttcaatcaagtttggaatgtctttcttctatgtttctagatttcatttctggccatgtcagatttactcaatagcgtttctctatctagggccgggctcgagaagctggtgaaataaacaaaagtcttcttacattaggacgagtgatcagcgctttggttgaacatcttggacacgttccttacaggtttaacttctattttttctttttcttacgttagcgatcacatagcagtctttcaagttatgctgaatcctataattgtttactgcaatgaaatttagggatagtaagctcacccgtttactacgtgattcacttggtgggagaacaaagacatgtatcatagccacagtttcacctgccgttcattgtctggaggaaacattaagtactcttgattatgcacacagggctaagaatattagaaacaaaccagaggtattatctctcgattccatttttcttgtttccattcaggccaaccattgaaaagtactcttgtacatttttttttggcaggttaaccagaaaatgatgaaatctactttgataaaggacctttatggtgaaatagaacgacttaaggcgggtaagaggatttttctctgtagcagtgaatagaatcattgtagacggatgactgatggagtactttcacttagcttaacaaaattactcgctacaaagtctcctgctctgactcctttgtttatctattactcatatgctttcttttttgtctatttagaggtatacgcttcccgtgagaaaaatggtgtttatatgccaaaagagagatactaccaagaggagagtgagagaaaggtattgagtttattggttgaagaaactaaattttcatctgaccttagtgtaactgaataatctctttgcctcctccttactttttactaatattatcttttttttttgctttttttaggtaatggctgagcagattgaacagatgggtggtcagatagagaattaccaaaaagttagtttcttcttactctgtagatcaaaattttacacttatatgtgggaattacatgtgaacaatggttatttacatatttgttgtgaccagcaacttgaggagttgcaagataagtatgtcggtcaagtgcgggagtgctctgatctgactaccaagcttgatatcaccgaggtatatgatactttgtttggattgaatgttgggctttatgactatatcaatatgctctgagactttagctgtgctatctagaaaaacttgagccaaacatgcaaagtgcttgcttccacaaacgaggaattgaagaaatctcaatatgccatgaaagagaaagatttcatcatttcagagcagaaaaaatctggtatattctttgacattactcttattaaatgcttaaaaagttttctaacatgttgcattttgccagaaaatgtactggttcaacaagcttgcattttgcaatccaacctagagaaagctactaaagacaattcttcattacaccaaaagattggtatatgtatttactattttttagctgtcttttatattaggaatttcataagaattgttaaatgtgatctcgatttgctgctttgcaggaagagaggacaagcttagtgcggataacagaaaagtggtggacaattatcaagtagaactttctgaacaaatttcaaatctgttcaatagggttgcttcttgtctctcccagcaaaatgtacaccttcagggtgttaacaaactgtcccaatctcgtttagaggcacacaacaaggtatcatactgttttgttcttttggttttacagcaatcaatgagttatgtgttgtctgtagcataaaattatgctggaagctgttagtgttctaacagttgtctaactttgtaacactatttgcaaatatgtttgtctaggcgatcctagaaatgaaaaagaaggttaaagcttcaagggatttatatagttctcacttggaggcagtgcagaatgtagttcggttacacaaggcaaacgcgaatgcttgtcttgaggaagtttcagcattgacgacttcaagtgcatgttccattgatgaagtacgccttgttaactttcttccttttcttttagtgacttatagtgtgtgttttaaagtagttgtctccttgatttcagtttcttgcttcaggagatgaaacaacatcgtcgttatttgatgaacttcagagtgctctctcgtcccatcagggagaaatggctctctttgcgagggaactgagacaagtcagtgcatgagatataacattttgtagctatttgatatattggccttggagatttacaagagttgataactattgctttctcttttattcctactatgcagaggttccacacaacgatggagcaaactcaggagatgtctgaatacacaagtacgttctttcagaagcttatggaagagtctaaaaatgctgagactcgtgctgcagaggcaaatgatagtcaaataaacagcattattgattttcagaagacttacgaggtgatgatactacatctcttcaagtttcacactaaacatctttgcttgatcccatctataactgatgtgtgttgtgcaggctcagtcaaaatctgatacagataaacttattgcagatttaactaacctagtctcaagtcacattcgtcgccaacacgaattggttcgttgcttcctccttcatttgtttctctctctctcccgttttgtgtcacataaactgtatgttttgctcggcaggttgattcaagactccataactttaaagatgccgtctcttccaacaaaactttcttggacgaacatgtctctgctgttaataatctgacgaaagacgcaaaaagaaagtgggagacattttccatgcaagctgagaatgaagccagagaaggtgctgatttctcggctgcaaaacattgtcgaatggagttactgcttcagcaatcgtaagttccttactatgttttgcaattcctttgagatacaaatcttcagttatgcattttaacctctctttatctttttatgcgttagtgtgggtcatgcggaatcagctttcaaacactgcaagataactcatgaatctctaaaggagatgaccagtaagcaagtcacagatgtctcttcacttgttaggtaagtggtttaagttttgttctgaattcatttcatctacatgtattcgcttcttaacgctggctatatttaattttatggttctcttcatgttatgctaccatacattaacttcaagtttggtttaggtctgcttgtgatagtaacgagcagcacgatgccgaagtagattctgcaaggactgctgctgaaaaagatgtaacaaagaacagcgatgatataatccagcaaattgaacgtgagctttctttcttgcacatgactgtttcttagataaaagagtttcttggcatgatcattaatctcccaatcataaaccgatatccttgtaatctttcaggcatgtcagaggatgaaaaagcgtctgtatcaaaaatcctggaaaatgtcaggtcgcatgaaaaaactcttgaaagtttccaacaggatcagtgttgccaagccagatgcatcgaggataaagctcaagaaacttttcaacaacaatacatggagtatgagcccacaggtgcaactccaacaaagaatgaaccagagatcccaaccaaagccaccattgaatcactacgagccatgccaattgagacattagttgaagagttccgtgaaaacaactcttatgaatcctttgcgaccaaggaaacaaaaccgcaacagctaacacggtcgcctctctcacaagtcaactaaggaaccacctctgttccattatatgatattttgtttttaaaaccctcaaaatcagtgtctgtgtctgtatcatcactatgaatctatgtatacttttgtgaaagtgtgggatcaatcaatgaagagtcagatgcttctgacacatttgaaatattcatcattgtaatctatgatttcttattcgagtagttgaaattctcttacagtaatcgaagttctcaaagacggtttgttctactattacataatgcgaatcttggaccctttttggttatgatggtttgtgatatgtgcatgcatataccacttgatcactttctatatatgactcaaccatgaagatgctttaaaatcccaacaatgaacattttaagtgggaaatcaagtagaattttgtgaaatcagagtcactgtgccactcagaaaattcatctttctcacttcccatgagaatttctaaaaaccatgagcatgagagattctcatagaatcatcttttaccattttaaaaaaagaacaatcatgaaaactcttttagttcgtgatcaatttccaaaacttttacaactcagcaactactattcacttgggatttttattacaaatcgcatttgtgtatatataaagctcaaggtgacatgtaatgatactggtaatgtcaagtatggtttctatatcaagcttttaatgttaggtctttcattttagaaagtggaacatcaatatagtggaattatacatccaccaagagaaatttctttcattcaaatatatgtatggtaacgattagttaagcatggtgttagtcactgcaggttcatatacacaaaagatgcaagcaaagtgttgtagttgtaggtgatgtttcacaattatagaaatggaatcaacatcactagccaaaaagttgtggcagtatttctagtttttaggcacaaccggaattttgaagaaaacaatattctgaatttgaagcaaaccggagaattgggtttattgggggaagtaagtgcatatattgctgaaaatgtgaacgtaaactgcgggaagactctttgattcactttttggcgttatgatgatgtgatggcaaattgctcaaatataaccggacatataacataagattcgttatgcctcaagcattgtctctgagagttcacctttgaacccgttcttgattagaccgattatattggaagcgatacaactgaattttaaaataattttttaaactaatgctgcttatcaattttgttttggttgttctactgacataaacaaaattgataggaagcattaattaggctgatcattatcagaattaaccactatgcaaaatttgaaaaaaatgttaggcactattgtggtgccttctgaaacactttagagctcaagccatacaccaagatttttaagagtcactttaagagttttactatataacccacctaattggagtatatttgggtctgaatatttgaactcatacgattctgccaattaatccaagataaaccaattagttacatagtggataattatctcctacttctacggtcaatttataagaaaagataattaccgaaactataattacataatttgctatccacaaagaaagatacttgcatcacttcttaaaaatgaatcaaaaatgagatactaattaaatatttggttattaaatccttatattttggatttccgtttccattataattccatcagttgatatcgtgtggatttttttaatagaaattaatgattagttgtgacaaaaatatagtttgaaatttgctaaactaaccacgttaaattagaagaagaaaaaaaataaactataatatataattcttgttagatttttttttaaaaaaaaaaaatattcaagccatgacttcatttgagcaacggaatcgtcaaagaagttatgaaacctaatctatatacacatattccagtaacacactttaattaaaacatccattaagatatgtttgattacacatgagaaaaccctagatataaggaatcaaaccgccgaccaaacatatttaatttcaaccggatgtatatttctctaattatagtgagagtaaaaatcttcggatcggattaacattatcctaaaaattatctatgtttctgttatcttcctcctcatatttcgcctatataaacattacaacaaactacttccacttatcacattctctccttattcaacttaaatactacacggccaaaaacatttaacaaacgccactcagatcctgagtctttggatcaatggctatttcaaatgttatttctgtcttattattattgcttgtactaatcaatttaagcaatcaaaatatcaaaggaattgatgcatttcatcagatttacgaagaattgcaatctgaatcagtcgagtcagtgaatcatcttcacagacctagttttcactttcaacctccaaagcattggattaacggtacatttgatctctccctctcttcaaaatttagttggaaatatttgtttcttttagttttcaatgattttggttttggtgttagtttttatttttcttgtgaaatgaaagttgattccacactaagaagttatttgcattgcccgataagagatctccaaattcttcaaatccttttttttgttggttatagtttgtgcgatacaacaattaatacaacttcttcaccgatctaggtcaaaaaaaaaaaaaaaacttctccgttccttaataatctcacgtatgataattacgtcatgaaagtgcaggggagaaactaatttttgcatgggctatttatattattccttgttgcctatgtataatttttttgtatatagaatattaattaaagttatatctttagacattcacatttcaccaatataaaacacagcatatataacgtgagaacactgctatgtttgtttttttctatggaaaaatcacatgaaattaatttcatcttcaacttgttctaccaaagacttcaatttcatgtgatttttatgtattctcgaatcctcttgtcttatcttatttccctcgaaatcataatctaattatgatgaactcaaactaaactaacctcgtttttgtttttgtttgtttccatgtggcattctcaacaatccttatatagatccaaatggtgagtttttataatttttgggtcttattacacatcgttaattgcatacgagatactctagttaatttatggtttttcgaaaacaggtccagtatactacaaaggtctctaccatctcttctaccaatataacaccaaaggtgcggtttggggtaatattatatgggcccattcggtttctaaagacttggttaactgggaggctcttgaaccggctcttagtccttcaaaatggttcgacatcggaggtacatggtccggttcaataacaatcgtaccgggaaaaggaccgattatcctctataccggtgttaaccagaacgaaactcagttgcaaaactatgcaatcccagaggacccatcagacccatacctaaggaaatggattaaaccggacgataacccgattgcaatcccagactatacaatgaacggttcagcattccgtgacccgacaaccgcttggttctccaaagacgggcattggagaaccgtggtagggtcaaaaagaaagcgtagaggaattgcttacatctacagaagccgagatttcaagcattgggtcaaagctaagcacccggttcactctaaacagtcaaccggtatgtgggaatgtcctgatttcttcccggtttccttaaccgatttccgaaacggtttggacttggattacgtcggtccaaacaccaagcatgtgttgaaggttagcttggacattacccggtacgagtattacacgcttggtaaatacgatcttaagaaggaccggtacataccggacggtaatactcccgatggttgggagggtttaagattcgattacggtaatttctacgcttccaagacattctttgactacaaaaagaacagaagaatcttatggggttgggctaatgaatctgacaccgttgaagatgatattttgaagggttgggctggtcttcaggtatctagctaattaatttaaaacccatacctttgttaatataatgaaattttatgttaaattatgtaatgaatttataggtgattccaagaacggtgctccttgattcaagcaagaagcaacttgtgttttggcctgttgaagagatagagtcattaagaggtaactacgtccgaatgaacaatcatgacatcaagatgggtcaacgcatagaagtcaaaggaatcactcctgctcaagccgatgtggaagtaacgttctatgttggaagtctagagaaagctgagatattcgatccgagtttcacgtggaaaccattggaattgtgtaacattaaaggctcgaatgtgagaggcggtgtaggaccttttggtctgatcacattagcgactcctgatttggaagagtacactcctgtcttctttagagtcttcaacgacactaaaactcataagcctaaagttctcatgtgctccgatgctagaccgtacgtttccatgcatgatttctctctctctatatatatatgctttataattacatactattatacaatatgctttccattagttataatgtaacattatatttttgaacttctttgttataggtcgtcgttaaagcaagacacgggtttactcgcaaaagataggatgtataaaccatcgtttgctggttttgtggatgttgatatggctgatggaaggatctctctaaggagtttggtacgtgtatatatgaacgaatctttaatatttttgcttgtttatgttattatgtaacgtgacataaaatggaatttaattgttacagattgatcattcagtagtagagagctttggagcattaggtaaaacggtgataacatcaagagtgtatccagtgaaagcagtaaaagagaatgcacatttgtatgtctttaacaatggaacacaaactgtgaccatagagagtctcaatgcttggaatatggatcgtcctctgcaaatgaatgatggagctctttaatttagctcttctctctatagtttagctataccgtcttctctctttctcactttttcttatattttcatcttcagtatagtaactgagagatactgtgaaattaggaagaaaaatgtgggagtttctgtgtttacgaacaatttggttgtgatgtccatactttatgtatcgactgttgtatctttctgtctttagtctctcaataaaaataagtttagaccaaacatcaagaatatgtcgttggttatcaatcaggtgcaagtgttttaacaaataatctactaacatggttaaactattcgtttttgtaagtgacatttttataatgcgcttaagagatgtatatgtaacagagatttgaaatttattttaagaaaataataattataggaagaagcccactatcaaatttttctaatataatcttataaaattaaatcatgtgatgatagattattaaaaaaaaaatgttttcaaaacaacaagaaaaataggaaacgatctttgcgttttctattttcaaaaaccataaagtttattatttttaaaaaagaaatagaaatttatgtaaaaaggaaatcacttcacaaaaccaaatcttttaggattcaaccaaatcttttaggaatcaaaacaataacattcgttttctataaatataaatactaaggttttgactttctcacaaacaaaaattcaatatctatcaccataatattactcattcaatgtctatggcagagattttcgaaagtgttgacaaaaacaaagatggaaaaattttatgggacgaattcgcagaggcgattcgcgttttttctcctcaaataacatcagaagaaattgataagatgtttatagttcttgatgtcgatggtgatggtcaaattgatgatgtggagtttgcttcgtgtttgatggtcaatggtggaggagaaaaagataccgaagaagaagttgttatgaaagaagctttcgatttgtatgatatggatggtgatggaaagatctcagcgagtgagattcatgtggtattgaaacgacttggagagaagcatacaatggaagattgtgttgtgatggttcaaaccgttgataaagacagtgatggttttgttaattttgaagagtttaagattatgatgaactctaacaaagagtcacattgatcttattcatcaatagtttaatagtcttttggttttgttttgctttttagtttatgaattcgttttgatgatcacttttttagcaattgtcgttgaattattttgtttgagatttgtggtaatctcgtctaccaataaaaagattctttgagatatgctttcgtttctaattctatactagttagtttcgacttattcaaatttaaaaagaaaagatagcatgaagatctgaggtcaactcttgaaagtcaaagcttattgggatattgatagatggataattacgtatctcttaataagaatctttgatatatttgcttgtttatgatattacactctttacacataaacaagctctctagtaccgaatgatcactctttggagctttcgtgaagagtgataacgtcaagagtataagagaatgcatgcttgtatgtgatttaacaatggaacatagactgttaccatagagagtctcaatgcttggaacacagactgttaacagatgaataatggggctcttaaatttatatttcggattgcagaactctaatttgaagaaactttgcaagagattttagaattgatgaagaaaaaaagccaaaaatcagatttactaaacaataatcgtaaaatcaaaattcactgaaacaaggtttgtgtcagaacaatagaggagtctttctcaaagcaaacacaaaaataacgtaaataagcttttggtgaacaaaagatcacttgatcttcttctttggcctcaactgcaaaaataaacagaaaatcacacttaacaactaacaaatcaaacaaattctgtggaattttaaaatctaaagagacaaaaaaccaaacctggttgctatggccacacttcttcttcctgcagttcacagctcttgggtggagacgagcataacacctaaaccaacaaggttaacaactcaaacatgagacacagttttcacacaaccatagtgttacagtgaaagaactagatagatttcaatacatttatcagcaaactaagagaatcataatccacgtagaaaatgaataatagttcacccctaagttaattccccatttttactataatcatcacacatggacatggtacacttagaacaacaaagagaaaagatcagagatcttacttgcgacaaatcattttgtcttggttatacttacgagccaacatcatcaatgaaggctcaatgatacctcccctaagcctcagaacaagatgcaaagtcgactctgttttatagtaaacaaaacagaattggatcaacaaaacaatcatagctatactagtttcattttctaaagaatccaaaacattcaaattcgagaaagagacctttctggatgttgtagtcagccaaggtacgaccatcttcaagctgttttccggcgaagatcaacctctgctggtccggaggaattc

SEQ ID NO: 337 - DNA, 104364 bp, Arabidopsis thaliana
gaattccccggctctaccttggaagcacttgatatttcaaataccacggtcagtcattcattcgttagttatagtattatatatcttacttccacaggacatagccacattcatgtgatgctctgattcagtagtccatagtaatttagccccactaatgcttggagatttttacagatatcttggatggctcttgctcgtgtaattagcagaaatcctaatctaaaaaccctcaaagccaggggatgtaaaaatctactccaattagaagttgacggcagaactgacaatttctctccgttggtttctggtcaagaggtgtttaaatgtttaagcaaggggagtggattggaggagcttgagattggttgggggttttcttatttctcttttgagtctttgagacctgcagcttcgttcctacgagttataagtgtgggtttgggtgcttccttaggtgaagatgttttaaagcttctaccttcaacttgtcctttgctagagtctatcgtcctccattttcaggttgttctggttctttaaatttcaaagagtgttattagaggacagggagtctccgatcttgaactaatttttggtataccaggaaatatctgattctgccttgacaagtgtcctgacatcgttgaagcacctgcaagagttagctttgtcctattgcttcggtgaaatatcccttcaaagtttcaagttctctatgccgaacctgagaaaactaaggcttgagagggtaactcgttggatgaccaatgatgatttacttgttctcacacaaagctgtccgaacttgaccgagctttcattagtaggatgtttacacttaacttcaggtacaatctttattttactggggaaccaaatcatctagcctcgtaatcctgtgctatttcttaattttgttcacctcttgttttgattgttatctctcagattgtcaacctatcatctcagctggatggccaggaatgatttctcttcatctagaggtttgttattaagcttatttgtaatgttctagtaatccgcaagatttttttttcattttaaggtataatgatctaccaacctgaaacttttagaagaacagtaactcgcttttataactactttaaccatatttgggtgataggaatgtggaagtataacagagaatggtgtcgcttctctctatggttgcattgctcttgaagacctttttcttcgccacaacgtgagttctcttttatatatccatttttttagtgctatgtcacatcgctctcagctagaactaaaaactctttgatgtgtcaagctttatcaatggtttccatgttcctgttttctttttctttgttaagggctctggaatacagaaaagcttccttcttgatgctactttgaaggtaaaatttcgagcactctccatgcgtatttttccgttaagagatttttttgcttaattcatctcaacaatgagcagtttccgatgctccggctggtatctctggacatgtgtgatgcaaaggaaggcggttttgatgtcccagaggtaagtaatacctgaaaagaccatatgaaagtcattctttgtagctttagctcgaaacagtattcacatggcaagactaagacacttttggtaataataaagaaagtttcattgatatttcttttgagtgacaggagaaagaagaaggtcgtagtctaagcatagtcaagatcagtagatgcaagtctgatagatgctcgctgggaagacgtgcggctccaatgcatagagagacgctggttatgttatggaatggccaaaccctcactaaaacactgctcaaacaaagactttaatcaccaacactctagactttatgtttagccgaaagatttttgtttcgaaatttaaaattgaagtttggtcggtgtagttgtagattaaattgtatgcaactttacttgaccatcctgtatagaatgttgttgaccaaacaaactagagaaattcattttcaagtacattcggcaaaacttacataacgaaaacttattgcatcatgctcccattttgagaagtagatgataagcgattaaattgaaatgctgattataaatcactaaagaaattgttcacttaaaatgtttagttttaggctaataaacgatccgggggttgactattaagattttgtgctgattttcataagatgtttcataattaaaaataaaattgaggttcctgtaaaggacacacattcattatccgttgaaagtcaacttagcagttgttatcaagccgtgtttttatttaaatataattaaaaagtcgtttttcaagcttttttaaagagattggtctttgaaaaaaaatcttgtaagaaagctgtactcattatacattagaatgtgattttagcaattaaggttttgggaaaagaaaagaaaacccgtaatagtcacgtccctactaactttagtaattaaagcaacaaaccaataaagtaattaaggtttagttcaattttatataggtggccgttggggacagatcaatttcgtacgtggacagcttttcacagggacatctctcgtttagtaaacgatccacttaaaattgtcttgtacacatactaaaaaataaaaacgctgatatttttcagcacaatgaccgttttttttttttaattataaattggtaagccgtttacatgtgcttaattatgattgaagttctaaagtaaaattttaaaaaaaaatctgaagtcgaaaggcttgaaccctacttttctgtatataaacagatgattccgctatatattacattttgaaagttgcagtcctccggaatatggttctgcttatatggaacttgtttttgcttacttgcatgtccttattctttaatggagaacgtgagattcaaaccccaaaaatactggtttagtgatccacaagatggaattggctcttggcggcttatatattatatattgtgggattttttcagaacttttggttttgatggaaattcgagtatacgacccaaaaaatttgttatttacagcagcagataatttatgtaaaagaagataaaaaaagttagagttggagaaattatcaataactaataaaacttcaaaaaaaactctagcgttccaagaacgtgagccatgcatatcgcatctgtttatatgattgggaccctatacatatatatatttgtaacgtgctacgtgagtttttgacaggtcaaatatgatgaatgacactgttttaacgggtaataaaaaaaatgtcatgcaaccgtccatgtatataaaaatcataaactaataacgctctattcatttttttagggaaaggaaagaataaatataagaaaacacaattcgtcataggtgacgccatacattacgtgtgcatgtgttgttttaaattaaactagatataatattttgtcattatttggattaaattataactggtaatgtcaaaagtttaggttctgaattatccaaagcttattcgatgagttaagcgcttagcacaaatacgataaatagagagaacttaaacaaaaataaaagaaacaacaaaacctctcaccaatttgttgagcacatggatgttctcctgcaaatttttacctattaaaattttaaaataattaaacattttgggaactctctaaatcttaaaaaaagatcgtatttgattattaaggtattattaattaatgattgtggttatgatgatgccacacaccattcattatcgtattaatggaatgcatagggaatagctaaattgatgactgttgtcatgtgatgaaaatcccttacttcgtgggttgcgatatctcttccgtttatttctgaccgtccgatattctcattcaaacatgtgtagctctactcacgttcattgattatctcacaatcatctatatggtactatatatagatcgccctatgaatgatttttactcaaaatagtctttagaatttatttctgttaaaaatagccttcaaattttcaactaccagcttctattaaagcaccatatacttataagtgaattatattatgcatatgtatttctactgttagagtgtgcccatgttaacataaatctcattttgtatgttatatgaaattcaaacttcaatagcaaaagagtaagagacgttccaaattgtacgcaaagataaaaaaaaaacaaaagtaagttcaacattatcgaataataatatggatacccttcaaagtttggaatcttcaaagatatgctttgtctcagtttagtgctttgtatttgaaagcagattatagcatctgtatatattatttctgatcgcatagtttcctaggggtgtccagtgtccaatgtactggaaaaaggtatcgttgccaaaatttgatacagaattaggaatattttaaatcgaaaccgtaactaatttttggaacctagtttagaattagaagaggatttatattttcgtattgcaaagggtaaaaagaattaaactcatataagaattgaactttcctaatcgaagtcagtgcagcctttaaactcagaagttcaacgtgcgatatttgcaagcctgacacctcaaacttattcacactgagaatgcatggtcgaccatctgaggtcatgttttgtcattgttcggctaacgaaagcactatcaaacaaacaacaatttgtaaagagaaccagaactaaccaaaaatatcaaacgtaatgctgttaaaagacaaaacaaaaaaattcgattgcatttggtgtccaattaagatgaaacttgagagtaccttcccgatgaatttagctctatctatgcatcgtagtttatactgttaaaatgaaattgtggtagtttcatgtatttgttaaagtggaaataaccctattaaaaatgcccaacaatattacatgtcgtcatgcgcaaagactttaatctttttttttcaactgaattttctaaatttcccttaaaaaatattttagttttcccccccattttattatgatatttatgacacaagcaattacatcactacgaatagacacgagagacacgttcaatccgtaatattagtatattactttgtttaaattagacacactacctacaatatcaacaaaattaaactaatcaaatcatcacagaatttgtaaaattgtaactcaacgagataatgctataagaatccaccgtttgcggcaaaatcactaatttttttttttttttttaattgaaattgaaagcataacttcgttggaagaaattatgcgatggaatttaattattttttacaattcacacacattccaaatcctcaatttgaattttaaaacgacagaaaacaaaaattaataggcaacaattttgatttagtacaaaataattccgttggaggaatttcagttgatacttaagtaaaagatcatgcatgtgttagattttaatgcaattttattaaaaaagcaccttgaaaacttttaatagtatggacgacttaccatttacttacgattatgaacatagcaaacagttagacggattatgttgaatgttgatcgtctgatcaccatacaatgtagatttcttacacctaataacacgactgtactatgtagcaataaacgtctgaacagtaggtgacaatccatcaactcatttggacatccattatcaaaactaaatatatgtaaagcagactaaatattggactaactaattttactaaaatattcacctaaactaattacactgaaagctaggaaatacatcttaattatatatatatatacgtctatatttattttgtttataaaataactatgatatgttacaaacaatataatataaataagatatactaattcatcagaaattcaatgttattcttcatagtaatttattaaaataaattcataagaagttatctgatacaaatatgtaacacgcacatatatcacatcaattcaacattttatctttcctatatatagtattgaattttatttgatattttctatctaattgagatcgatttaaatatagaactaaattttttcagtatattttatcgaaatgatgtaaaataaatcatatttaccatttacgtctgaacagtaggtggcaatccatcaactcatttagacatcaatagtcaaaaacaaatatctgtaaaacagactaaatgttggactaactaattttactaaaaaaaattatatgatacaaataactaacaaacacatatatcaattcaacatttcatttttgctatagatagtaattaattttatttgggattttataactaattgaaatcgatatatatatagctagtaattctttttaagtattttctatcggaaaataatataaaatactatttaaatcatatttaacagttgttagtcttactagacaaaagaaaacagacaaaaaaaaaaattgtattataaataaaaaaaatattgtcactcgaagcctttaaactcgcctcttctctcttctctctcactccagagtttctctctcccctttaaatggtcgccggaaactaaatcgtctcgaacattcattagtaaaaccggacgactcagcggcgatgttaggacgagatgaagatctggtccgaacaatgagcgggagaggaagtttaggctccacaagtcaccggagtttagccggagctgcttcaaaaagcttcagagatgtgtttgctcccccaacggacgacgtgtttggtcggagcgatagacgagaagaagatgacgtggagctccgatgggcggcgcttgagagattaccgacttacgatcggttaagaaaaggtatgttgccgcaaacgatggtcaacggtaagattggacttgaagatgttgacgtcacgaatcttgctcctaaggagaagaaacatcttatggaaatgattctgaaattcgttgaagaagataacgaaaagtttcttcggcgattgagagaaagaactgacaggtcagattttcagacaaaaccaaaaacaagaacaacaactctttttttttattacaacttttgtctcgtctgacaaatttttttttttttttttgaaacagagtgggaatcgaagttccgaaaattgaagtaaggtatgagaatctttcagtggaaggagatgttcgtagtgcaagcagagctcttcctactctcttcaacgtcactttgaatacaatcgaggttcagtttttttttttttttattggattaactttgtcttgttcaatgttgttgagaagatctaaaaaagataaaacctaactttaccgctttttgtgtcttggcataaatttttaacctttttgggatttagtcttgtcgggtccaaattagatatctttaaaatgtcaaactttatgtgtgaatgtcaaaattgcatgtaactgttgatctctttaatttacttaagattcttgtggttctttgtaaaacagagtattcttggattattccacctgcttccatctaagaagaggaagattgagattcttaaagatataagtggcattatcaaaccatcaaggatgactttattacttggtccacctagttcagggaaaacaactttgttacaagctttagctgggaagcttgatgacactctccaggtttgttttgttgtctatcatatttatattatttatatgtatgtaagctcttggttgagttaacattttccggggtctgtgacagatgtctgggaggataacttactgcggtcatgagtttcgtgagtttgttcctcagaagacttgtgcttacattagtcagcatgaccttcactttggagaaatgactgtgcgagagtcattggacttttcgggacgatgtttaggtgttgggactcggtaccagcttttgactgagctctcaaggagggagagagaagctggaattaagcctgaccctgagattgatgcatttatgaaatccattgctatatctggccaagaaactagtttggttacagactatgtacttaaggtacatcttttttgcatgcttctgtcttattctaacaaacaatttttgaccttatccttggtttaatgccacttgacagttacttggtctggacatttgtgctgacacacttgttggagatgtgatgagacgaggtatttctggtggacagcggaaacgtctaacaacaggtacaacttatgttccctttgatattcccatggttccttcagtgaatatgtgttcttaaacttgtatgtctcttgtttaaaatgagcaggagagatgttggttggaccagcaacagctcttttcatggatgaaatatcaacagggttagacagttccacaacattccaaatttgcaagttcatgaggcaactagttcatatcgcggatgtcacaatggtcatttcgcttctacaacctgcgccagagacatttgagcttttcgacgacattatcctactctcagagggccaaattgtctaccaggggtcacgagacaacgttcttgagttctttgagtacatgggtttcaaatgtcctgaaaggaaaggtattgcagattttctgcaagaagttacgtctaagaaggaccaagaacagtattggaacaggagagaacatccttacagctatgtatcagtgcatgacttctcaagcggcttcaattcttttcacgcagggcaacaacttgcttcagaattcagggttccttatgacaaagcaaaaactcatcctgcagcactagtgacacaaaagtatggtatatcaaacaaggatctattcaaggcatgctttgatagagaatggcttcttatgaaacgtaactcctttgtgtacgtgttcaagaccgtccagataaccatcatgtctttgattgccatgacggtttattttcggacagaaatgcatgtcggcactgtgcaagatggtcaaaagttttatggtgctctctttttcagcttgatcaatctaatgtttaatggaatggctgaactagccttcacagtgatgaggcttccggttttcttcaagcagagggacttcttgttctatcctccatgggctttcgcattacccggttttcttctcaagattccgttatctcttattgaatcagttatatggatcgctcttacatactacactattggttttgctccttctgctgccaggtacatttgctcatgaaaatcactaaggaacttgttttttttgcttctattgtcattcccttgaactaaccaaacttgttccattaggttcttccggcagttgctagcatacttctgtgtgaatcagatggcactttctttatttagattccttggagcccttggaagaacagaagtcatcgccaactctggcgggacattagcattgctagtcgtatttgttcttggaggctttattatttctaaaggtaagcagataatcccttttgatatcgtgttcagcttctttctctatgggattattaagtgaaacatatattatgtcttgtttcgcagatgacatcccgtcgtggctgacttggtgctattatacatcacctatgatgtatggacagactgcattagttataaatgaatttttggatgagcgatggggcagcgtaagatttctcatctagacctcatctggttgacttctcttttcaaattgtgatataaattctgttatgttacatgatgcagccaaacaatgatacacgcatcaacgcgaaaacagttggagaagtcttgctgaagagcagaggcttctttacagaaccatattggttttggatctgtattggggcgctacttgggtttactgtgttgttcaacttctgttacataatagccttgatgtatttgaaccgtaagtgctctcattttgaactttctgactattcagaacaagaatcatttttagttgacaagatcttgaaattttttcttgtagctcttggtaactccaaagctactacagttgtggaagaaggtaaagacaaacacaaagggagtcacagtggaacaggaggtgaaatcttttacctcttcaattctgcagccttttcactttggttattctgactctactaaaaaagttgcaggttctgtagtggaactcactagtacttcaagtcatggaccaaagaaaggaatggttttacctttccaaccactttctctagcattcaacaatgtgaactactacgtggatatgcctgcagtaagcaactgcgtctcatacttgttctcgttgtatcgctttacaaatgcacctttagttgtattcattgtttcctttaaattctgcaggaaatgaaggctcaaggagttgaaggagatcgacttcagttactaagagacgttggtggagctttcaggcctggcgtattgacagcattggtcggtgttagtggtgcgggtaagactaccttaatggatgtcttggccggtaggaaaacaggaggctatgtagaagggagtattaacatatctggttacccaaagaaccaagcaacatttgctagagtcagtggttactgtgagcaaaatgatatccattctccacatgttaccgtttatgaatcccttatctattcagcatggcttcgtctttccgccgatatagataccaaaacacgagaggtaagtattactatacataacgtttcatttgtttttcataatcactcgcatgattttataatctggtaacctttttttgcatgtagatgtttgtggaggaagtgatggagttggtggagcttaaacctcttagaaactctatagttggtcttcctggtgtagatggtctttcaacagaacagaggaagaggcttactatagcagttgaattggtagctaatccatcaataatcttcatggacgagccaacatctggtcttgatgcaagagctgctgccattgttatgcgtactgttaggaatactgttgatacaggaagaactgttgtttgtacaattcaccaacctagcatcgacattttcgaatccttcgatgaggtttgcttccgaaattttttccacttttaagtccctgaaccaggataaagttaatcaatcatctttggtttaatgcagttgctgttgatgaaacgaggaggacaagttatatatgctggaacactaggacatcactcacaaaaactcgttgaatactttgaggtgaatcattggttttgcttttcctctctcttggtcatatgaatatggaactatatctagaacttttcttgcaggctattgaaggggttccaaagatcaaggacggatacaatcctgcgacgtggatgcttgacgtcactactccttcaatggagtcacaaatgagcgtggactttgctcaaatattcgttaactcctctgttaatcggtatgtgttttaagaaaaatgctactactaatgcagagttgttacactgtgtttctaatatgaacttgatgttttactcaggagaaatcaggaactcatcaaagagctgagtactccaccaccgggatcgaatgatctctacttccgaaccaagtacgcgcaaccattttctactcaaaccaaagcttgcttctggaaaatgtattggtcaaactggagatatcctcagtacaatgccattcggtttctcatgacagtagtcattggtgtcttgtttggtctacttttctggcaaacaggaactaaaatgtaaggcatcttcttttctctattccataagtaaactatcatcttatcaaaatgtgacgtattcatccaaaaacaccaaaacagagagaaagagcaagacctgaataatttctttggagccatgtatgctgctgtattgttcctcggtgccaccaacgctgcaacagttcaacccgcagttgctattgagcgaacggttttctaccgcgaaaaagccgctggaatgtactccgccattccctatgcaatttctcaggtacttaaccattctaataattttgcctcaacttttatatgctacttttcctaagatatggttatctaaaaatgatgcaggtagcagtagaaatcatgtacaacactatacaaaccggagtttacacacttatcctttactcgatgatcggatacgactggactgtggtcaaattcttctggttctactactacatgttaacatgcttcgtctacttcaccctatacggtatgatgcttgtcgccttgacaccaaactatcaaatagctggaatctgcttgtccttcttcctcagtttctggaatcttttctccggtttcctcatccctagaccggtaaataaactaagcaacttccatttgaattaataatataaaaaaaaagtgttttaagagctagactaaacttttaacttttgatgcagcaaataccaatatggtggagatggtactattgggcatcacctgtggcttggacattgtatggaatcatcacatctcaagtaggagacagggattcgattgtgcacatcactggtgttggagatatgagtcttaaaacgttgctcaaaaatggattcgggttcgattatgacttcttaccagttgtagccgttgtccacatcgcctggatcttgatctttctctttgcctttgcttatggtatcaagttcctcaacttccaaagaaggtgaagaaaacttttattagaatagatttcaaaaatctttatagattagtgtttgaatgaattcatgtaaattttctttgtcttacctaattatttatttattgtcgtttggtaataataaataacagttcatgtttacaatatgatattttccttattcatacttggtatatgctttattctctagtgattctcattacaaagatatttgtgcaagtttggactcgtcccaaatcaagaaaaatgttgtagtcaaaatgcttttcagttacgagtctgaaacctgacaacacaaaattataaattgtttttatttattttttcctaatcaaaacgattttttcctaatataaaatttgatattttgaggggtaaaagaagcaataattgagaatattgagatactaaaattgtgacgagacgcttgatgggttccacttaaatatctgatatgattacacgtggcagactatgctccgtccctaatgagcttcgtgtgattttgattaattttgttaacttttatttttgtcgtctagttttttaaatttattaattaatttttatttatcttctaatttagattttattcctttaagctttttcgctcctcactctctcttcccaaagttctctgtaaaactctctctccgtcttcaatggtttacacgatttcaggcgtacgttttcctcatcttccatcgattaagaagaagaattcgtctcttcacagtttcaatgaagatctcaggagaagcaacgctgtctcattctctctgaggaaggactctcgttcttctggtatttgctccatctcctttgtttatatctccgtgtgtctccttctagtggcacgggtttcgagattggtgatttccatggagtcaatgtgtgggattcaatttttgtatcctgcttcgtggaacattcttttttatggaggattaatttggtgtataattagaatttagatggttgatgaagtttaggagataatgagatctttgaggtttcggcaatgacgaatttatacatgttcgtctctggaattttggtgatattaggtttataagaccaagtttcgacttaatgcgagctttgcatctagagatttcccagttcaatggtcctctatattatgtatctattattgttgattcaaatctagaagtttgaatgatagtagcagtgttttgttactcttcttatttctctgtggagtgattcttatatccattgtgctaatttcttagggaaggtttttgctcggaagccatcgtatgattctgattcgtcttccttagctaccactgcatctgagaagctccgtggccatcagagtgatagctcttcatctgcctctgatcaagtacaatctcgggatactgtctctgacgatactcaggtttgttggcatgagaaccaaccatgaacttgtgattagcacgataattagatagaatccctttctcccctctactgttcttaaatgattattattaggtgctcggcaatgtagacgttcagaaaactgaagaagcccaggaaacagagacactagatcaaacttctgcactctcaacatctggaagcataagttataaagaagattttgcaaagatgtcacactctgtcgaccaagaagttgggcagaggaagattccacctcctggagatgggaagagaatatatgacattgatcctatgttgaacagtcatcgtaatcatcttgattaccggtaaacaataaattctgtcttgctttagcttgtttgcaaagagtattccctcaaaactattaaacaatgaatgtaacttttgttggtggaacatgtaagttttatgtcaccttaatttccatccttctcctggcttaagaaattttgtttcttttctttattaagttctaattactcagcatgacgttgtagatatgggcagtacagaaaactgcgtgaagaaattgacaagaatgaaggtggtttggaggcattttctcgtggttatgaaatatttggcttcactcgaaggtaaacttcattcgaacatatattcaagtgccgtttccatagctttaataattcttattattgcattttcagcactctagtctcagtaaaagtttagtagatactctacagatagttggtattgcagttgctaattataattcactgctttattagcgccactggtatcacttaccgggaatgggcaccgggagctaaggtttgtttcaactcaatagtcaatactttacctaacaattatgtctttaatgattttgtgttatatttgttccgtcattagagtttcagaattttcttgtgtatgtcaaatgcaacttcttatgcccgtgacgagaactaaatctaaaatcatggattaaaactcatgtattccctcatgtgatgcacacctattacgaacataccaaaaacaatttctgtggtggtgaattttttttctttgagctgttggggttacagatttcaaaactggtcaagtggttttttatttaacataagtagaatgatcagcctgggctcatagttcagtaaacagggtctcatgtccccatgacatcggttttgtcttttctattctgttccatgcatgttagtgtatctgcacctgattgaatatctagattactgtttttttctaacaagttatttggctgaattatgcctttccaggcagcatcactgatcggagattttaataactggaatgcgaaatctgatgttatggctcgggtatgctcacacactctaatttgtgatctattgtttaatcttccgtcttagcttataatttggctagaagttaaatttttacttgaaccttaaatgatacttgttggcgcatgctttgctctgttattattctgttcctttctggaattctgatctaagactgtcttacaactgatatttgagcagaacgactttggtgtgtgggaaatatttctgccaaataatgctgatggctcaccagcaattccccatggctcccgtgtgaaggttacatgttcatagttaacccttatgaaaacacatgcaaagctttgtaacacttatcgtacttttgattgtatgtcatgcattggtagatccgcatggataccccatctggtattaaagactccattccagcttggatcaagtattctgtccagccacctggcgagatcccatataatggagtatattatgaccctcctgaggaggtacaaaccagtactcattttacattctcatttgttttggtgttttctagagataatcgaaactctttcaggatgtagacatccaataaaaacataatatgtagtatttaagtcataactggtatccagcattatctatgggtatatgtggtttcatatatatatatatatatatatccctcgctgaaggcctaaaaagtactccattgtttcaggataaatatgcgttcaaacatcctcgtccaaagaaacccacatcgctgcgtatatatgaatcacatgttggaatgagtagtacggtatgtttctttctcttatcttggaatggtaatcactaagttcataatgtcactgacaaaggtagaagtttaaactacatttgacatgaaaattctcatatgtgcctgacttgtttgcttgttgaggatagtggaaagtttggtctaggtatttaagagagaattttggaattagtccttttgaacaaatgactatcatcattatttgatggcttaatcatctttagagaatgtatagtttcaatatacgaatgcaaaaggaaatctcataactcttttgttccaggatcttgacggcaggagactttcacttttgacaatatgataatgagtaacgttgttatctttgatctgcaggaaccaaagataaatacatatgccaactttagagatgatgtacttccccgtataaaaaagctaggctataatgctgtgcagataatggccattcaagagcatgcctactatgccagctttgggtatcttcctttctcagatataacatgtctacctacctatcatttaatgaatacctgttaaaagccatttgttgattcttcagagtcgtaaaacctatttgtctccttgatgaatgagcatgtgactttgctatatgcaatgcaggtatcatgtgacaaattttttcgcacctagcagccgctttggaacacctgatgaccttaaatctttgatagacaaagctcatgagctaggtctggttgttctgatggatattgtgcacaggtattggcttctctttaacgcacttctccaatattgtgaattagttgatatggactttttcatggataatcatcattgtctttaaataaaaccagccatgcatcaaaaaacacactggatggcctggacatgtttgatggtactgatggtcaatatttccactctggatcgcgtggttatcattggatgtgggattctcgtcttttcaattacggaagctgggaagtatgtctctttccgtagagttgatattgcaatatttatgggaaagcctttagtgtagccccatgctggtggttatgtctggtccttgtgtattgacgtttggtccttgtgtatttaggtgcttaggtatcttctttccaacgcgagatggtggctggaagaatacaagtttgatgggttcagatttgatggtgtgacttccatgatgtacactcatcatggactgcaggtggtatttttgtatggaattagttttgttctttatgtcactatttgatagtatcctacaaatatgcaaatgcaaaaagatggctttatggaacctaactgctagcgtttgtggcaggtcgaatttactgggaattacaatgagtactttggatattctactgatgttgacgctgtggtctatctaatgctggtgaacgatttgattcatgggctataccctgaggctattgttgtcggcgaagatgtaagtcatttgcgcttttgttcagtattactgaagtatttttgatacctctctccggttctctcaattgatttcgttacaggttagcgggatgccagctttttgcgttcctgtcgaagacggtggtgtgggttttgactaccgtctacacatggcagtggcagataaatggattgagcttcttaagtatgttctcaggacgtcttggcttttcagtgagattattaagtaagacgttgttatatgatactgaactgatatggcgtgttgtaatctctaggaagagagacgaggactggcaggttggtgatataactttcacgcttaccaacaggaggtggggagaaaaatgtgtcgtctatgcagagagtcatgatcaagcccttgttggagacaaaacgatagctttctggctaatggataaggtaccattttggttgctgatagactcagcaaacagaataactaacatcttactgtctttgaactcttaggtctggttgtaattcagataaattgttcgactaaatcttatgttttttacttgattatataggacatgtatgatttcatggccgttgatagacaggccactccgcgtgtagaccgtgggattgctttacacaaaatgatccgtctcattacgatgggattgggtggagaaggatacctcaatttcatgggaaacgaatttggacacccagaatggatcgacttcccaaggaccgaccagcaccttcctgatggcagagtcatcgctgggaataatggtagttatgataaatgccgacgtaggtttgatctgggagatgcagaatatcttagataccatggactacaagagtttgatcgagcaatgcaaaatctagaggagacgtatggtttcatgacttcagagcaccagtacatatcccgcaaggatgaaggagacagagtcattgtattcgagagaggtaacttgctcttcgtcttcaacttccactggaccaacagttactctgactaccgtatcggttgctctgttcccggaaagtacaaaatcgttttggactctgataactctttatttggaggcttcaaccggctagatgactccgcggagtttttcacctctgtaagccctttaactaagcgagaacgaaaagaataaactcttttctccaagtcgttacaaaggaactaataatttgctatacaggatggaaggcacgacgataggccttgctccttcatggtgtatgcaccgtgcagaaccgctgtagtttacgctgcagtagatgatgatgatgatgatgaacgttcttctcttgtccccataggcctgttacccgaagatgtttaggagcaaagacagttgtccgagtttacctactgtaagcttctttgtactacaaaaatttactcgttgatcttcttctcctttagttttcgcttgcagcatcattataacttaaaaatgaaataaaaagtcgttgcacttctacattttgcctaagcttcatcgtagatcctatttagacatgaatttccaaaaacaaatctttgaggatataaaatctgcagagaaaggctacagatacaagggaaatcttaaaagaaaaagggaagaggacaacaaaagcctcccctctttatacaggaaatttggataaaaaccaaaaacacagtaaaaaccgcattgttgtgttggttttacactggtcaatgaaaggcttgtgtcgagacaccaagctgatggagaacactggttggggaagatgaggaagaagatctcagggcttcggccaatggtccgcccatgttgtgatgatggtggttggaacctccaccgctccaccagctcatgttttgctgatctctcccattgttgttgctccgggctccctcttcgttgcctgtggacagcttcagagagacgtctgaggaagagttcccgggcatggagatggagagacaagtggctgagctcatggggcttgaactattgtcagcttcttggagcgaagaacgaggccaatcgtcaaagaagggcctcaggatgtgtcctccatctgatctgttgttactgaatccgatgtgggactcgtatggcctcttgttgttcatgttgttgctttcttgcttcatctccgaacaactgttaacagaatccacatctcattggtgaaaacaaagcacaaaagcaataatttgtcaaaagagaaaccacatttaggcttcaacaacaaagttgcagacagtagtagcctttatattagtttataggctttaaaagtaccttttaatgtgggttttataagaattgattaagcagtaaatagaaatagaattataaagtgagtgttttgtatatcatgtgttgtgtgtggataggggaggtgggtgcagaagaatctaaaagctttaacttttctgcaagatatgagacatatatgggtcagctttcactaaggtcctaccatttctctctctttctattttctctgtttgaaaagtctcacacctagcttcaaattatagattctatcaaatccaatgttatcattatctctcaacacaataagaaaaaagaaagaaagatattttcacaatgaaatcaaactcataattcaacaaacaaacaaaccaaccaaccctaaaatgataaggatgtgtctctcaatttccaacattacccctctcttcacaacatcgctatgaacatacaaaccaagttgtgtatatcattagttcatacttcatactaataaatcaagaatcagtattgctttaaatcgatttcattattattcaaaacaattgtctaaaatctcaaccatgaatcttattggctcaacactaaagaaataaaaaagtcaatgtgtttaagtttaatgttttgaccataaagttcaacagctaaaacagacagacctaagagaaaaaaaaacagtttctttttattacctttgactaaggtggagaagttcagatgaagagttagaagagccagagaagaagaaagatcctccttgaccaaccacttcctcactaccaccaccaccaccaaaagcaaacgtagatgttgttgttgctgttgtagtggtggctgcggctgctactgatgaagccatggacgtggcagttgcattgacggtggttggagtttccacaggctttcttgaacggttgcggccacggtgcatgtggcgctcgcaatacttgtggccagcgaagacgtctcttgaacatctccacttcttaccatccgttctcctgcatctgcctggctcaggatccatcgctgcccttcccaaataccctgttttcaacattcatatcacatatcagatcaataacaagattctaatcctacttaatcccattcacacatgtttagatcttcaagattggcaaaacgagataatatactaatattgaaagtctggatcttgggaacacaactccaacaccagtagcacaaaacccatttatatttaaaaaatagatagatgaagactgttctcgagactcacaagcaggttggtaatgaggtaggtgttgaagaggatggtgaagaaagtaggaaggagatagatggagaaggcttttcttgattggtaaaaggagctcctgaggaacagcagcaccagccaacatgtacctgtagatcagagcttgtagttcaagttcttgccactgtgcccagctaaagaagctccccatctctacaaaaaggaatcaaaatcaattaaacacaaactatatgaatgaaaagtctaattctttatcaagaaagataagataagaggaagaaaagactcactggggaacctggaggaagaatcaggagacaaagaggagagtttagaagaagtaggctcaggggtaaagagaggaagagcagtagaagttgcagtgtgagaatgaatctggtcaaagacatgttttggtatcttagctgcagaaggttgttcttctgactctgtctgatgttgttgctgctgctggcttctccattgtttcagttgcaaatccattgaagaaagagagagagaagtgttggttactttaaggataatggtttttccccttttttgtcttccagggttctgatttaatagcttatgaaagtcttgttggttgggttacgaagagcaaaagaaaagaaaaaagaactttctttgctcgaaggaaaaagctttgttcttggtagtcagtttctgtatctgagcttcttctgcagagagagaaaggacagagtagagggaaagaggtttttaatagagagacttgcgagaaaaagacagtgagacaagacagatgcggggagaaaatactatacagtaaaaaagactactactatagtataactctttattaattgtgttcacaaatctctcttcattaatctcaaagactatttaaaataattggtttaacatttgtatcaataaaaaaatgaaaagcaagtcagaaaacccagaaagaaccactctgcaagatgaagatggagagataataacctgcagtttttctgtctttgctgctttggaaataccaatctccatttttatattagtatagctttttaatttgttttataatgaaaacaaaagcctacttgttaagaatatttaattagtcttttaaccaagtaatttagattatttaatgagtaagcgttacgtcgatataatttgtaatttgcatttgtgacaaacctaactacttttaaatttgaattagtataaaattcgtttaggttcctatattatcatatcatacggcactagatgtagtacttgccactctattttcttttttaactgattaattttgtaccttcgttcatagatctagtccgaaaatggtaatattaattcgggtagaatcggctgaattcttggtggaatgaatctgttgcagaaaaactgaaaatattattttgatataattattttaaagcgttatgccaaaattgactgaaaaattaatcaaactaacataactggtgggaaaaaaaatggaaacatgagtttaataaattcatcaggctagttgaacatggatggagcctcgagagagaatcccgggttagcagcagcgggaggtgcggtgcgtgatgggaacgagaactgggttggggtttttgctttgaatatcgaaatctgttcagcgccactagcagagttgtggggactctactatgggttacacatagtctgggagcaaggaataacacgccttgagctggaagtggattcgaagatcgtggttgggtttttacagacagggataccggattctcatcctctatctttcctactacgtttgtgttatggcttcatatcaagggactggttagtccgtatttctcacgtgtatagggaggtcaatcgtcttgcggacgggttagctaactatgcgttttctttacctcttggtttgtatgtttttaattcagttccggattctattgcttcttttgttttggaggatgtaaatgggcctgcgttttcaagaactatccgaatgtaatttcgtattttctttttaataaaattggcggattttcccccttttcctaccaaaaaaaaaaaaaaatcatcaggcttgagaaacattaaaaaaaatggttgtaaatgtttatattttaagtgatagttaagtgaattataaatattaaaagtattcaagtaatttctctattagcaaagttgcagagattcttggaagtttttttgccaaataattgttagctattcaagatttttgtcaaaaacttttatacggcgtggtacgagttcatgttgtcttgagtaaacatgacaaatgcatccttgtttatgagaactcttagagcaaggttaatccacctgagggtttttgagaggcccggatgcttgaagagtatcgtatgaagttttggttgttggaagacctcggattgcgtcattgcggaaatgttaaagcgaacggcttccacagagtctcagcatatccaagggaaaagtctcatgggcgtcatcgcctatacgtattgcattattagctagttcaaagatgtgggaaaatatttcatctaactatcacttctctgtttttttttttttttttgacatccatctaactatcacttctcaatcactatgtatctcatgttttctttaacaaatctaaaagaaaatgaattcatgaattgtatgtcagaatgtttagctaaactcaaaccccgaagctttaaaataatggtagaacgatgtctcaagagtcttaggagtcatgtattaattatagaacaaacgactacttatgagttattatatcttttacagttttactatagactgaaaccaaaattttctggttcaaatttggttaaggtaggcaaacttttggtccaataatttctttcatcttttatcaacggttagattttgtattctattcaattttgtatacaacaattacattctttttgggttgatttaggttttacattcggttctgactgaggtaaaaaaaaagatagaagaagagaaaatgaagtaaagaggagagaagtaagtaataatgagaaaagagaagcaggtgggctgtgtcagagaaagctcagaagtaaaaagcataaaagtgagtaaccaagtgggtggtgagggtttgtttctctttgggctgtgattcatctttgatttgactactcatagtacttcttctttttctcactcttaccccctctcttttcctctatttttcactttttaccctcataaaatctttattcacatttttctcacactccaattcatttaacaaaattttaatcacataatacaaaatcttaatcacatttcccttttcacggtttatctttctataattttaataagtttcatattatctgatgaaaattaaacatcaaactttgttatttataattttagtaaatagattttttttcttttttatttcataagagattaagttatttaatgtaaagcttctcttgactgtataatatcttaactatattattcttataaaatttctcaaatttcaataaccgtattatgttagtctacaaaaaaaattatattacatcaatattcttacataccaaactaagatatatattgtccagttcttttcatggcatatgtattttacatgctctattttaaaaaattactacgtgtttcaatatcagtattgttgaaattatacaccctccaacgagtaaggagataacccattacaatgcattggcactgatctacatgaacatgactgaccagatttaaccattcgagcaaacaaaataataagtcaactatattttgaatagtcacaaaactatacatcgtaattacaaaactatttctgacatataagattaataggttaaaagaaccaccgtcgaatcgttgatgtacgtagtagtagtatcgtattaacgaggcaatgatataactatcaatatttttcgtaagaaaacacaagtttccttattcttttcttacgtcggcgataaaagttaatgtcgtactttgatttatgaaattgtgatggaaaattgttttaattaattaagaagagaaacgagttatttgtacaaacaaatctgaaaatatagaaatagagcaaaggacagagaataagaagaagaggcaaaggagggcgagagttcacatgttcaagagaagacaaatacgtttctctgacacaaatctgtcagaccaatatttttaaatattttattgtatagtttttattttgttttgttgtatgagaaagaaacgtatattatgtctttattaccaccacaaggggtcaggctccgtccacttggggtcccaattttttctttgttacgagtttttttttgtagtaaaaggcaagtcacgccggcacgcgagccctcacgtgatcccacgtgctttatttattctctccataccaaaatttcttttcctttgttgtttggtaaggttttttcttttttggccaaaatatgatattggcgagattgaaaacatgtatatttttaaaaaaaatgtaggcgtaaaaattatgttactaacacttcattaagcatatgccaagatttttaaattaaaatttatatatcactattggtcgtttttttttttgtgtgtgacagcagctcactattggttgtttatattaaccacatactaaataaggctagctactaccaaacttggaccagaacctaacacatgatgttatttttagtaatatgaaaaaaaagaaacgaaaaggaaaaaggaaagaatagatctttctggtgagagagcatacacaacacattggtgacacaaggtatctaagggcatgaccgcacgtgtcaacatgcatcaaacatgcgatctttcaatattagtattatatatttagcaaagacgcaaaagaatccaaggcaaagactacttcgcctgcatgtcatgccaatctctctctatatgttttctaatcaatatactagattactagacaagttgttttctaataagatctctcacatatgagccaatttgagccaaaacatgatatgatggataaagcttatttgggtattgaaagtatagagactgtcaatgagaaagtagtcatttgggcccaagtacagagatttaaaccttatcaggaaaagcccaatccagtacaaacttgaagaaaaagattgatctccttgtaagttgcaactggtaaagaataggacctttgttcaaggtctactgtattgagatactgaattagtataaacggccacttaaaactactttgtatttgtttaggcccaaaacattggactatcatgttgagaaaataaacacgaacgcaacagaagtttcctacttattatatagcccaacaaatattgatctctttgcttccaatgaatctttgttaaggcccaaaaaatacaaagccgaaactacttccatcttgtactatttttaagtttattttttggaaattttaccatgtatgattcagatcgttggtttaaatttttacaactagaaaatagtatatactctattagcctattatgatattaattaatgggcaatatttcgattagtttacgtgtagagtgtagtgataatgtatttaggttttgaccggcaataatgcatttgtaagaaaagtctttggacaataatagctttggtcaagtcaatgtagaacagaagactaatttctcttgacaaaatattaaaccttaaaaacaaatcctgtcagaccaaaaggtgatacgattgtaacttacaaatgatactatatatttttatagttaacagtctagtatttaaaattttgaaatattgatgatcattgattggttcatataagtaatccattaggttttcatgttggtcaatacagatgtacatgttttcaggattaatataggttccgtcctatgaatttatccgaccatgcataagagtaactctttaatctactattacaagttttcaggatttgaaagctctatacaagtttaactttatgtgtatattagttaacgtttgtaaccacagattcataatatttaccgtcgaactcttagccataaaattcggactaaaagactcgattcaaaaaggtatcgatgagatggaaagttgttgaacttattgtataaaagcttagagaggatattgataagtcgtcttttgcttttgtatctacagctatgacgtatattgtttaatccaaatcaaagtgttttaaagatattttggtttctggtggaggtggtatactaaagattcacatatagatagagatatttatgaatacattgatatgaaaatcatatacaatatgctaaagaacaataaatggtacacatatggattggttggatatggttggcacttggcagttaggtcattttcgttgctttactaaactttaataaacagtctgtaacatttacatttatatacgccaatgccaaaaaattctttattttatgcaatggcacattttctgcttttcctttacaggcaaaaactctttctttcctaaagatgcattatttttccatttgataaaataaaaaaaacttgacggtacaaaaatacacagaagacaatcgaattaagtaatgactaagtattaagattaggtgaaatggtgtaattaaaccgatgggaataatataattattatttaaatacagaaacagagcttgctttaccaaataccaccgaaacccactaagaatacagcaaatcgtctcttcgccattaaaacaccttcctttgcaaacaaagcttcaaactttctcttaaaacacccccaaatcagcaaagatagggttaatcgaagaacctcaccgtaagtccactgaggattcaagttcttgctttggtttaaggaagaagaacagcaaaaacctcaaggagaagaagaagtcaaagatgactcagagtcaaaccaacgacggagctggagctggagctgttacgacggtagaatctgttcctcctcagcctcaatctcagcctcagcctcagccgcagcagcagagcaacgagatggttctgcatacgggaagcttgagttttagtagtcatatgtcgagagaagacgaagagatgactcgttctgctctttcggcgtttagagctaaagaagatgagattgagaagaggaggatggaagttcgtgaacggatccaagctcaattgggtcgggtcgaacaagaaaccaaacgtctctctactattcgtgaggtttgaattttactctgtttccttttcaaagttagagtttttaacatgtttgagaagttgttctattttgtataaaccctagaagatatagagattcgatgtttgttggcgcatctctgtttagggttttcaagatctaggatttggctaagtgagaagaaatgtttttgtactttttctttggacatgtactgtttcttttgatggagttatgttgtgttgtgtcttgtataggagcttgagtctatggcagatcctaggatttggccaagtgtaattgttgttatgatttgagttttgatggagttatgttgtgtttcaaggtaagaacttgtgttgtttcttgtaacaggagcttgagtctatggcagatcctatgaggaaggaagtttctgtggttcgtaagaagattgatagtgttaacaaagaactcaaacctctaggttccactgttcaaaagaaggtaatgttttgtttagcatcatctgtgtcttagtagcgttttgaattgatgtttatggcaaccatctgaatccctaaaggcagaaactttaacaatcgggtatgccataccgaataaactattttgctattgttgaaaggctgaacaaaattcgatttttggtaatgaaatgaaacaggaaagggaatacaaagaagcacttgatacattcaacgagaagaacagggagaaagtacagctgatcacaaaactcatggaggttagttccgagttctcaactaagttcttaatatgtagaaactgcgggaacaaaaccgagttttccatcgcttgttatacataaatggtgtttcttttttctttttggggagatggaacagttggttggagaaagcgagaagttgaggatgattaagctggaggagctgagcaagagcatagaaaccgtgtgaaaaaggttgttcaagaagaactaattgggttcttttgtgtgatgtacctacctagtttaaaattttcatcatgtaagatgtgtgggttgcttttttttttattgttatagtttttttaaagtctttgggggtttgatttgtaaaatttgtgggttctctcttatttttgattaaccaaatttagggatatgggaaaatgggagattcttaggatactgaaactcatcacagtgattattctttctttctctgtattatgttttgtatctgtcttttgaagaatttattatttttttttggctttttagtaaagtttcttctcgttggcaaagaagaaaagtgactctcgcgtgcgttttttgaaatctaaaagctgtcggaacggcagaatcttttcacttgtttatttgcataaatcctttctggtttatacatcaaaccatcgaactatacaaaacgggaaatttcatattataaaacctcaacagtttttagctatgttacgctgccttaagctactattctactatagcgtttggacccaactgcaggcccacttcttatagctataccgaacatacattagccactactgtttctttttcaaatactcaacaaatttagtttttctctaactctttttctagtattttaatttggatgtaaacgaaaataataaaacatcttcttcgtttttaagctaacatgaatttgtggtcttgttatttggtctcgtcaatggaccggcgacattcatgccgtcatagagaagatttgatctttgatctatacgacatcatactcttctaccttcatcatagtagtaatgcgttctttaataacatgcattttcttcttcttattttcagtgtaaatacgttggggttttgtttacttaaagcgtgcacatttagaaaaacagcgtcaatccaatatcatgagacaacaatgaaataatacatgtgatttacccgttataacgaccgtttttattgctttatttggtgggcggggtatgcatattgaattcgtcagactctgccttttatatatgatattttcttaactcgctatccttgctttttcatttacatattttctttttgtcttgttgtatttggtacgtttatgtatatatgcaaacaagacaataaaaatcaaaacaagatcggcatgcaagtttgtgcttttgttcatcaattatttaggacgtaaaaagtgaacgcaacaaaatactatgagctttgatatttccaccttttgtgatcacaaatctctttcgtgtttcttgtcctaaccaaaaggcagagttttatttgaaattaatgacttaagacattttcgttttctagaaaaaagacttatgacattttacatatgaaatcaaatacatatatgtgcaatgtagaaaatggacccaacacccaaacgacagtacgtagaaagctgagaaagtagttcataaaccaaactaatataaatgcaggttatcataagtcatcacaggacatacatagtaatttttattacctattattttactagatgatatagtgacatagtttgctgttacgttgataaccagtttctctcccatacctgtgtgttatattaatatacataacttgtcacataattttgttatattatgttatgtatcaatgtatcccttgtggttcaaaaataagattttccaaaagtattttcattttatttacgtcaaagtttgaccactttcttatttatttattttgccattctggtattttaatttctttaatcgtttcaaactcattggtattttgaaatttacctcttcaatttagttaaacaatttggccaactacgtgaaactcatttcagtcttcatgtctatgttctcgcactcttcagaaaaagttctaaatttgtgtgggcaaattgtcaaaaattgaagacttaatttattttatatcaaactggttagatacggacacgtacactcaccgtctaaaggtgccttcgcccttaggattctaaacgactctcatgagtcatatgaccttatgctttggctgcctctaatttattgacaatttggctgttacgttaatggcaactctctcttccataccaactttttcactgattttaacattttattatgctcacttcaaaaatttcagactgctgcttatacgttgaagtactagtattttacagctagattcgactcagtcccaaaccagatatttttttccctttcatctctgtttttattaataatgcaaagaaggatacattgatgaaatacataagcctgcggaaacagtaagtctgctgaataatattgtatatattatttattagtacaaaattccattattttcttactaatttgttacaaatatctactactttgaaaaaaaatcaattagtcagaaaatagtcaaatattttgttttattaaatttcctttaataaattatagtaaggcatgtacagaattaatgaaattaagtacacaatcaaaactaagtaaacaataatgaaagaataataaaaaaaaacatagtaggtttgcactttgcagttcaagtacacgtacagtggttatcaacagttacccattaccagcaaacgtggatttctagagaatttcaaaataaagttgattactcgaatggaagccaatatgtatatgtataaagtacatctacatttatttatccactcacacatttaataacgacagtcgtattattttattttgatgaatagtatcatgtcacgaaactgcatttgtttttcaatttttttttgtcgcaaatgtaaaagtttcaataaataatttacaatatgtacgaattataatttccaaaaacgttgatactaattcaaaagtcaattttttctcccgcgtatattaattaaagtttctacctaaagtgatataatgttaagtttttttcttttttttgcttctctccatatgaataatttttttagtttttatgtatacgtaaacttgcatgtaactacatgtctacatacattttgaaatttcaatttaatatacgattgttgtcttgcaacatttacatccataaataaaatccgtcggcagattcataaattgacatttcatggtacaaatagggatattttaattcattggtcgatacaaagttttgtcctaacaataaaattaactaaaaagacaaaacagaaatataccgtgtcgttttacgttccacgcgttcagcaaaatctttttgtctgctgcatgctcagatggaaaaaaagatcagctaattaacaaaatatctaatcagaataatcagaatagtctaaactaatgcagctttacttcatcttaaatcttattcattttcatatatgtaaagttggttacgttaatattaaatctttaagagagcggggaatccgagaacaaacagtgtctctccttcgctaaattatttatttatacagtatagtattaccaaattgcaattaattctttttttatatataagtggtgacaattagtggacttcgctttttatgagaaaaaaatatcattcatattgagacaacaacaactagaaaaaatattctacttactgtattatttaaaacacagatatgtcaataattgaaaaatatgtatgagtggatcaacagtaaaacaaattatatgtaacatatcattctacaacctctccttaaatcaattttttaaattcaagccaaaagctaaacattaaataaacagtagtgccacatgaaattataggtcggaccatagtgaaaatatccactatatatactttttttttttcaactatccactatatatactataaaaacaaaacataaagtccacagatgctgagaatttaattaaaaggagtacacagctgtaaagcctacaacttttctttctcatttatggtgcgaaccttttattgtcctgcccaatgcaatttttttaatatgagtaattaaatatatttttcgtttttataaattcaattttcaaggagaaaataattcgatgtatatgcatattttgtgtgtatatattagcaaattttcacgtgtggacaatctacgtcaatggagtatataaacgtgtgttacgtaggacaaatcagtcgttggattagtagttgccaacagttgccttgattaataaattggtatcatactctcttctttgtgtttgttagggtcaagataatatataaatttgtgatactaatcatagacattttacgacaaaaatacggacctgttcattactcgaaaactatatgaagccgaaatagataatgtcctatttttcctcatcattatcatgaaatctatttaaaaaaatcaatagtggtgtaaaacaattgattcgtcatgatttataggtatgattgctattcttgatttcaacatcgtcagatactaaaaatttcccaatgagtaagttaagattcggaccactgttatttgggatttcttaaaataaataatcaacaacagatttcgtgctatgcccggtaatgttaaatgtagaacatggggtgttttgttttacttaattgtcaatcataaatcaaatattcggattaggaattacgtcaagtgccaattagattgttatcactaaaatcatatcatattgctttctaaaccaattaacgtcagtccatttatttaaagaaaaaataaagtatttcactaaactgtccagtccatttcaccaagtacttagatattcataaacacaaaattaatcactcaacttttaaaaatatttcttctagaccaaatcctgtaccaactcgtattgaatgtttcagtgtaaagtgtaaagtgttttcttaaaaaaattagttaaaaaataactgaattatcacaaaatattttcagaacctagtcacaaatctaataaattacatataaaagcttcttcatagttaaaaaaaaccagtgatttcagtaccaaacaataagaaaagctagcatatgatatatttcttttgctaagaagcatatgatatattcaatattcgtccacgatccactgaatattttttctttattccactgagatttcttttcgtcgctactttgaatctgaacattatttttggtctctgaatctatatgtttgcttgtctttcaacatcatgactcgcatatcgatactacaacttcaactcttcaagcaagacacatggaaatataggagttaacacatgcaaactagcacccccaaattttgtcctcctggctcctacaatagctggaccgaacctacatgaagccggctttatctggttctcttctccagttatgatgtcaaatttaaatcattcatccctcaacaagaattgtcattttaggaaccatcatcataccgagagagagcaacattttatctataaatatagtaatagttctactcttatttcttccgtggtttcttgtaaaaaaaacttatgcatgttcgttcactaaatagtagttaaatttgcgataaacgagcgagatatgtcatgcataaaggagttaaaaattacgtgaagttatttcaatgatcatgcaagaaggattgaatgacttgtaattacgatcaagtaatataaaaatggtctatttgttgttccttcgttaccacagtatggttcttacatgtgaaaatgattgtgctttacataaatgtagtagtacatgagcccataaaaagttactgctcagtcgagttttcactaaccggtgaaaagaaatggataaataaaaatatacacgactacaaatagactctttaaatttgacacgtaaactctatttttcaggagtctttgaggcccactctgataataatatgtcaactaaactttctttttacaaacaaaattaccgttgcataagacacatgtcgtcaattataatccaatatgaagaaagaaagaatataaaacgaaaactttacttttcttatttttttcctatttttcaagatgctaggaagtagccaaatccaaagcattgactcttctttatccaatgtctcaccctttgtcttcaactgttcctcatccttcaccaaaatctctctctctctctcttcttataagaaaagagctaaaaagcttcccttcgttttactatatccatgattctgaattccacacacactgagagagatagagggacacattaaaagctaattcaacttttctgcaatggctgagaaggagaagaagaagcatttacatgagtttcttgaagatgaccaagagccttttcatcttaaccattacatcggcaaccttcgttctcagatgggttgctccgatatgcgtgtcaagaagcgaaagtccgataacgtcgccacgtttcctcctggtttgttctcctgcgagaactcttgtttcttcgcagctcataaatctcctgacccgagaaagtctccactctttgagctccggtcgccgggaaagaagaagatacgtgacggtcgagttttccttcagataccggcgagaaccgccgcaattctcttggacgcagcggcgaggattcagaagcagcagtcagagaaggctaagaccaataaagctcggaccagaggaaacgggtttggtatgttcgggtctgtcttgaagctgctgacataccgtataacaaaaccgcgtttggataacgctgatggaaacgcagtttcgttggaacgcgggtcggaaccgacgagtagtagccggagagagcgtatcgtggagattagtgataaatgcttttgtgaaagcccttttcattttgttctccaaacaactccttcttcctccggtcaccagactcctcactttacatcgacggccacttctccggcgcgacgcagtactgaggtttgtctcaatctctgttttttattttattttatcaaaagtctaaattatggacaattatgtactctaaattttataacaaaactaaaaaatagtttaaattttaattaattaagtactttaaatttaaacttctcatttaaactcgaaatgatatcctaactcttaaattttatatataagcaacttgtataatttaaaaaacatttggaagatttaacttatttttggaaaagataattaaatttttagaatttttttctcaattattctaaataaatccactactaatccataattaaataaattaccatacagtaaaaaagagaaagtaaaaaaacattctatggaaaaacagaaaaaacatcttctgattagagcagagacacatggccggctgaaaattgtctgtttgatatgactgaatcatgaaagtttttcaggaagtaccgtaaatatgttttactttagatgacggatatgcccctatttccgagtgaaaatctatcgtagagcttggttatggtgggggtgcttatgtcatttacaatcatctggtcaacgttccccacactgacgattattgcgctctctagctagttcaacttcgaagttttcaaaccaattaattttctggcaaattaccagaaacacatttttctactccttttaatttcagtgggttaagtcttaatgtagaccaaaccttttgcaattattagctacaaactctgagaatgtcattaactttcgccaaaaagtttcaatgttttgtcaaaaagttgggatctattttgggaagtattaattggtatgtttacaaaattcaaaagttaaatttaccctactttgtggttgtagttttaaaaaaaaatgcatagtaaaaaaaagtagtgttccgaaaatatatatataggtaacatggagaaacccttaatgggcacgtaaagtagtgccatgaggatataaatttgaattgctaaaaatagtagtgatccagcgccagaaatagtaagagacaaaaaatgttgaaaccaaaagtgtgttaaatgagttgtaacaggacgaagatagcgatgagacagagagcttagagaaagtgagaggacaagaagaagaagataaagaagaggaagacaaggaacaatgtagccctgtctctgtacttgaccctcttgaggaggaggaggaggacgaggaccaccaccaacacgagcctgatcctcccaataacctctcttgcagctttgaaattgtacaacgtgagtatccaatcttccatcacatcaaataatgggccaaagtaattgaatacaaactggtcccggagatcgttttaagggttttaatgttgtatgttttgactaaacaggggctaaaaggcggttactcaagaagcttcgtagattcgagaagttagcggggctggatcctgtggagcttgaagggaaaatgtcggaagaagaagatgaagaagaggaagagtatgaggagagcgaggaagatgataacattaggatttacgattcagatgaagaatatgaggacgtggatgaagcgatggcacgagagagcagatgcgcggaagatgagaagaggaagaagaatgatgagaggcaaaagaagtggaggatgatgaatgcatggagggtagggttgggagctgaggaagacgtggacgcggtggtgcggaaagatttgagagaggaggccggagaatggacaagacacggtggagaagtggaagaggctgtgtccgatctcgagcactctatcttcttcgtcttgattgatgaattttcccgcgaacttgtctcttcttttctatgaacaaataatgaattttgttaagagacacgagaaaaattagtagatttttagatatcattgacttgataaaccagaataacctttataacgtttaccctgtgttttcttatcacttaaaacgcttctagaaaaagtcacaagtcacaacgataagcgaccattggcttatgccaagctagtactaggaaattttattttgctcaaagccttaaccaactatatatacgcttccttttttccccccaaagctactatacgctttttcttctttcccaaacaactatacgctttaggttatttgatttggtttggtttatctggttgatcattcatactcccaaaacaaattagatcatgcctatacaattttcatgcctaattaaaaaaactcacattgaaggactaggaaaggtacccacgtctgaattgcgtgttcctcacgaacgaatgaaatttcattttgatatacgtatttattgttatttagtcatacgtatgaacgtaacacgttacaacaatatatatctctactacatagtattatcttctgtttttatattaccaacatatttttgcttaaaatcattgcctaacatatgttcttttttatatggattggtttgttatacatgatattatgtcaaattagtaatattattactgaaaataccaatttacaaacggattgattgatttgtgttatttcaaatgtaaatttgttaacaatttgttatataaaaaaactgccaaattattttgtttgtgaataatgattttagggtcgggttcggacatttaagaataaggcttcactcggactcggacatggctgtcccctgacacttacgtgataccaactgatactttctaacatattatctatcttatataatgtttattgggggaatactgtatcactttcttataactctagagataaaacattaagaaaaatctctactagttcttcaaaaacaattcggagcgagaacatggatggaccaagtcatgaaccatgactattaattaagtcttcattgaaaaatctacatcaaagttttaaataaataatatcaagcttaaaatgaaccaccttccattatgtgacgatgatgtggaccaacaaaagaaatataccaatcacaaagaccagtttagtcccaaaactaccccttatcacttttttatagatcatttccattaatttcacaccaatcaaaatggtggatgcggcggagcaaccaccttctacctccgagggagaaagcctcctcaagatccacattgagaggatgcataagaagctgaaggaaccaccacggttgctcagttcggccgccgggaaacctacttgctccatcttccgggtacctcagagcatgattgattgtaatggaagatgctatgagccacgagtggtctcgattggaccgtaccaccgtggccaaacacaactcaaaatgattgaagaacacaaatggcgttacctaaacgttctgctcactagaacccaaaacctaactctagaggattacatgaagagcgtgaagaacgttgaggaagtggcgagagaatgttactccgagacaatccacatggactcggaagagttcaacgagatgatggttcttgacggttgctttctccttgagctgtttcgcaaagtgaacaatcttgttcctttcgaaccaaacgatccacttgtggccatggcttgggttcttcctttcttctacagagattttctctgtcttgagaatcaaatccctttcttcgttctagaaactttgttcaatctcacaagaggagacaacgaaaacgagacaaacgcttctttacaatctctagcgtttgcgtttttcaacaacatgatgcacagaacagaggaagatctcgccaggttcaaagagctaagagccaaacacctcctcgacctcctccggtcaagtttcatcccggagagtgagcttcacacgccgccggcaacgaatccagggaaggaaaagatgccgtcccacattatccacagcatttcgaagctccggcgagccgggatcaaactccgagagctgaaagacgcagagagcttcttagtggtgagattcagacacgggaccatcgagatgccggcgatcaccgtcgacgatttcatgagcagtttcttagagaactgcgtggcatacgagcaatgccacgtggcgtgctcaatgcatttcacgacatacgcgacgctcctagattgtctgacgaatacttacaaggacgttgagtatctatgcgaccaaaacatcatagaaaactatttcggaacagatacagagctggcgaaattcgtgaacagtttaggcagagatgtggcgttcgacataacacagtgttatctcaaagacttgtttgaagaagtgaatgagtattacaagagtagttggcacgtggaatgggctactttcaaattcacttactttaactctccttggtcttttgtctctgctcttgctgctcttgttcttttggtcttgtccgttatccagactatttacactgttttccaggcttatcaaaaataaatttttcaaccttttcattattatattgcagttcaaacaaatgtgttgatatgatttaatgaagtaaaatgagaattcgtgtatttaaaaccctacttctattattgagtagtacaattatgtgtttgttgggattagttgtccaaacatgcatcgatagtgtttttcgagtaataaataaatgatgttgagatgtatcatgtatgatatattttttttccagaaaaattggtttacattattaaaagattatacgagatgagattgtgtatcaagagagttataaatattaatgacaactattctataattcaataaataaagggttcaattattagcaaaaatacgtgtttgtttgataggttgactgcaggaattggtcaatttagtagaaatgtcaacgatcctcaatgtttcagtcaacgaacagctcatgcttcataaatcaaagtgaatagtaaaaccctggacttttggtaatttcctgtaactaacataataacatttgacacatattttatttccatatctggaactttctgaccaaatatttagtacttttacataatcaatgcataaaaataaaaaaattgattcggtgcttcattctaaatattgaattaaagaatgcaatcttgtcgtgataatgtgttaacgtaaatctatctatcaggactaatttccctctgctatgaacgttaaaaactttgtttagacaaatgatttattttgaatattaatatatagaaatcatccataaaaatgatcaaacatgcgaagaggggaatccgagtatgagtactgaagacttttcccacgactctcgaaataactatgtttgagtttctttttaccaagtctctcgaaaaagactcggtcgtaatttcttcttcttcaaataatgtcttaacttaagcaagccgcaatgcatatataaacacacaatccaatacacatttttcaagaaacatacataaattccacaactacacacaatccaaatatacttttgatattctccttcatcttaaatatcgtttccaagctcgtcattttgtgaaatcattctcgtttttacacgaacgcaataatgagcggcaaaacatcgatcactagcaggtcagacgaatttcaaaggcagatagatcataaagagatgcctcgagatcaccaaattgaaaggcacactcatattcacacgacgcgttaccgagggggcagtctagttgaggaggtcatcgagaagcttgagagattcaaagtacgtacggttaacatcttggtgggaggagaagatgacgaacagaagaaataaaacaattaccaaatattcaaattcattcattcattcatttctaaccaacaagactatttacctattcattggtcttctttttattttgaagctatttaaaaggtgaaatagtgttttaatgggttgtatgggttacgaaggctgcaagttttttctttctttttttcttttttatagttttaaatacccaaatagttcaaatgtatgtaatatgcatgaatgcatcaatttctttcatacgtatgaaaatgttacccttaaataacctgttggaacttggaacatatgtaattttgatgtacaaattcggatgatttgctttgttttcaagcatctttatagttcagaataaattcaaaactctaaagttttgatttaactagaatgcaaaatatattcatttataatatttaaaaactgtaacctaaaagaaaagttatttttggttcggtttcgcatttacaacttccaaatcatatttgatcaaatagaaaaatgtttcataaacataaccatttaaatgatgataataaagtaaaaaataggtacatatgtctcaaaaagacacatatatatgagtaatcaaattaaaaggtaaaatacatattgaaaaaaatcagcaagcttatgattcgactaagactcgtttccataaccatcttgtgttttttcctcaccaaacccatttagctcctctccttttcttttcttttttttcgttttttcttttcccattctgctaactaggctatgcatatcctcaagtatttgtaagattgtttgcatatattttattatattatccgcttgctagggttatatatacattatgcatattgtaactttttttcattaaactttatgtgccgaagttcaaactatatcaaaatttcaattgctatatactagaagtggtggtcaaatatattacaagtagaattatttcatgacattgaccattatatgtatatttttaaaactcctagaaaatcccacaattcaaatggcttcatacttatgtcaggtcacggttcaaaatggtttcgtgttttcttatatataaataatgattgtttatcatgtctatattagacatatttaattagtatatcaatcatattagacatatttaattagtatatcaaccataccaagccctacgaaaattgtatccatctgtaaaataaacaaatgagtatcagtcaaggcattgactattcattacatttggcattacatcagactagataagattgtaaattgagaataatttaaagacaaaaacttaatacagtacgaccttatattacggtcttaacgggcctaaccatgcatacaatgcatcactagacaccatatttatttatttcatacatacatatatagaaacacacaaaatcacatatttatatggttggtttgtttaactatcatggaaaattccacaagtaatcgtctcctccaggaaaaccatcagcgtcgtaagcagcatcaaagacagtaggacgaggggggctaagaagcattccttcagccatattcatgagcacattaggcatgtcgaataccaaatcctcgtccatgaatccattcatatttgtattatcataactactattcatgcaagccacaccacttgtttggctgttattatttgccataacaatcgcatccctagcagcaccaaaagcagcagcggccgaagcggctgctgcttggatgtctgctggagacatggaggttggggcaggcaaagaggaaactgagtttgggaagttgagctcagcttgactgcctttgagggctagagctgccacgtcataggctattgccgccatctcgggggtagagaatgttcctaaccagatacggttaggttttctcggctcacggatctcagaaacccatttgtttgagttctttcgctgccttactcccctgtacaaagggtggcggccgccattgtctttggaggttccttgcatattgataatgagtattagggttttgagtagagaagagtgatgagtttgaggaaggagaggaagagatcgaagccattttatggtgcagttaagttagttggagagtgaagtacgtagtgaagagtgaagagaagagagtgaagaaagtgcaaaccagttagaaaatggtttgggaggaattgatcacagcttagagatgatgaagctaaagctgtaaagacagctttttaattgctcctcttgttggatatcgcgtttttttgggtggtggccaattaagttgcaaatgatgtatatatgtttctatctaaagtggtcgttttcgccatcacaggttcatgaaaatacatgtgttctcatgatcttgacaccactttattgaaaacacttcaataaaaattaaaattatctacttcatttgtgtgatttacaatatttttggtataattttgtgttatttacatattgtgaaactgtatttcaatgttgctatatatacactccatgtccaggggtataaaccacaacttctccaatgtcataataagactataatgtatatatgtatttcctatatattgcttactttggggttaatggttatttcagaatagaaatgaatatagagttgacttggtgaagggtcggatatttatagaataatcacatcgaaaagtgtcttagaaatgctaagaagaagttagtgtgtgattgctgtttcgtttgggtcaatttctttgaggctttatcatccccactagacattaatataatgtaatagattttctagattattctcattcaaacttgtcaaatcgattagggtaagaaatccatttcatgtctcgatataccgtggaatctttgttcccaccatagatgtatgtgtgtgaaaaaagaaattcacctaattaaatcaaattttctctatcacctacgtctgctggtgcgtgccggttggcacttgatctactaggctgtcggatatctatgtaaaaatcaagcataaacattgtaaactaattaattaaacttgattaacagaaaataaatcagaacaagtactagattcatatgctaactaatgtattggctacaaataccacttaatttgaatctataactaacccacggtgtagtaaatacttggtttcattatagtttcccaaagtctaagtgaaagttgtggtgtctatactatttgttctcaaagtctccaagtatggtgtctatatgttctcaaagtctctcaattctcagatattttgttgttgtaactaacgaaaaatcaaaactaattattctattgactacgtagagaatgattctaataaatatatatatatatatatatatatatattttaataatggtaagctagctttaatgcttgcctaacaaaagctttttgtgtatataaaatacattgtctagtaaaaattttgcttttgatcttacttcttatgccataaattaattactaggtagaatgttaactatattattaaagcagtcggtaaatcctttcaacgtagaaatagtggtgatatcaaaggattccaaaaagtttgcaagtagatcactgatacaaaagaaaaaaagaatatgtacatatttcgttttgattgaataaatacaacattcaaaagaaaagagttttctaatgctaaaaaatatggatgttgaaatgtgtaagcatggttggtagcctcactggcctgttcttctgttgtgccaggaggccttttagagattgtatgttacctttgggtttcaaagttgggagtccaaaatatttcgatgatcttttctattttcttgagtttggtagacattatgaactatacaaccgcccaaatgtcgtcactattgataatgttaaattataacccaacaagctaatattcatttttaaaaaggcttcataagaacacaaagacctcataaaaaagtataaacggggttctttggtgccaccactcttctaaacaaaacaccaaacaaaaaacagagaaagtgaaagcaagaacataaacgatgatataaaaactacgatcctcagcctctttcttcagtacttgtaatccttaacgtgaaggctctcagctgcaccttcaccgagcttagcatcacccttgtaagcaccaagtgttgcttcagagttagctttgcatctgaccaagaacgcttcttgagccttcttcacattctcctcttttcctccccaagtcttcaaagtgctctgctgcaacgcccttccaaaggagaaagacaacgaccaaggcttctttgtcttcaactggttcatcgcgttaaggtttcttgtcgcctcttcctcgctctgtccaccagacaagaacactatggctggaacagcagctggaactgtcctctgaagagcacggacagtgtgctcagcaatcacctctggtgcaaccttcgcactctctgatcctggagtaaccatgttaggtttcaagagtgttccttctagcaagacatggtgatcactcagagccttgtagcaagctgcaagaacacgctctgtcaccgcggcacacttctgaatgtcatgagagccatcaacaagaatctcaggctccacaatcggcacaagaccgttctcctgacaaatgacagcatacctagccaatccataagcgttctcatggatagctaactgagatggctcattaacaccaatcttaagaaccgcacgccacttggcgaaacgagcaccagcctcgtagtatttcttgcaacggtcaccaagaccatcaagaccttgagtagtagtctcaccattggttccagcaagctcaacggtacccttatcaaccttaataccaggcaaaactcctgcactcttcaacatatcaacaaaaggcgtacctgcatcacaaccaaaatcaaccccaatcaaagtcaacgatgatacacagattcagacatatagcgatgttaaactgtcaattaccatcagagctcttctggtaaagagtttcttcaaagaggataacaccactgaggcaaggaagagctccaggagtagtgaagagaagctcacgaagagcacgtctgttggattcaacgttctcaacgttgatgctagcgagacgtttcccaatagtaccagttgattcatctgccgcaaggataccttttccaggtgttccgatgtaagcagcgttagcaatcagctcatctgcaagagcaaaacccaaaaattagactcgtatagtcagatcacttaaacaactagtccaaagcctttatataaacctcaaaaacgttaaaccgtaagacctaaaaaccaaatcgaagacagctaaaatcattctgatgtgcgtgatcggataatctatcaatttttagtgcagaagacgagatcgcatcaaagtagcaccgtatcaacgaagaatccaaacttgtgacacaaattaatatcgattgtgcagaaaattgataaacagagtactgagaaagagagatgaagtgttaccggcgaatttggaggtgaaggaagacatggttgaagaagaatcgatttggtgaagaaagttggataaagaaaggatgatgatgatgatgatgatgaagatgatggtgaattttgagttatataggagagagtgatggtagcttccagaagatattttggactcttctccaaggtaagctttttcagccgttggattgtttatactttctatgggccgtttttactacttccgtgattactggtttgtaactctaatattatagtaacttctaccacgttctatttaaggtgtgacttcggcctcactacggcccattgtagcccaataatattcctcaggtaaaatgattcaatttttgtttcccttgaaaaaaattgtgtttacaaaatgagaagtgaagactttgagatcttggaaccaaaaatttagaattgatatttatgtgagactgtgagtagtctaattcggacaatgaatcatcaaattcattgtatcaattcttttcaagtatttttcagaatttcaacttctagtgtttttatttattcatgaattctttcttgtttattttctatcctgccttttgaattttatcccctagctgcactttttattttgtttgtttgtttgaattttcaattttgttgcaatgtcctttccatttctttttttggaaatatcgaaaatgctcctatcatcatcattgtcataaacaaaagttaataactttagaagatattattaggctattaaattaggtacatttattttagaagataacaaaaattatgtacattttatcttatgcatagtttgccatccacggttttgaatataaattttagttttgatgaacacaatttgaatatctcttgcattctcacgaacatttggcagagaaaaaacacaaaaacatttgatctaatcaacctatcagatatacctaaatgcaacacaaaatattcttaaaattaaaatttcagacaacgaagagttatgttaaaatgtttatttgtttatttggtcactttttagaggcacaaatgataagtgaaaacgaatgtttctcatctctagaaccaatattcttcttcatctcactctcttgttcatcttcatcaatccataatctactatccaaaccactcctcctcctaaacataaacacagcacacggaggagtagacgatgaagttgaagaagacgatgacgacgacgccgttttagacgatgaactagtcgaaacagacgacaacgtttctttgtagaaccagtcgtgtaaatcccacatcatgtctataagcattccatcgaaaaacatggtttgattccctctaaagttccacttaagcttcttcaccgaaaacactttcctcttatcaacataaaccgacatcgtttcaggacttttcactttccataaatacccttcctctcctcctcctcctcctcctccgccgcattgaatctgtatctcgtgtttccttccgacgtcggagaattgagctttcgtcgtgagccaacaagttccagagaatctctccgtttttgagactcgccacgacgacgatgatgacgtgtctcgctcgtggtcaacgtcgccgactccgagggtaatctcggaatttacaacgacgacgacgaagaatcttcttattggttcaggtccgttgttttcgtactctgcttccgatagatcccagaggatctcggcgttgagtgaaccggaggaagaagtcaactttcttgatcctttaggttttctgagtgaaacagagtatgatttcggcggcgttgagatgacgacggtgagattatccgaccaggtgagtgaaacagagacgggtttgtcggaagatgggagattggatctataagtggtggttactgtgtcggggattgaaggaggtaatgtcggagatatataggaatgattcgatggacctgaacaatatgtatctgatactttaatggcgtgttcactgtaacaagccgcgagacctctcatggttttctaacagaaagggtttgtttttttctcgggaaggttagaaaggaagaaactttacagaggaaaaggttatagatttttggttttggatgctatacgtgtgaataaagagagatacttgaagttgaaggaaggaagaacattttttgtggtctttggagggagagaaagttttgtgtggaaaaggagcaaaatgaagtttagagattctgtcttgggagattaggaacgacgtggaagaacataagacatgacagagagattttttaccgggaaactaaaagataaagaaacttggtggagaaataatattagttagggctttatgtattttttggtacggaagttgcagagaagaaatggaagaaagtgatgaattcttctttgtccttggcgtttggatatgtgtttcattcggccatgtgaagatgtctctcttctcttctgactttttgagtttcgtctggtctattatatggattggtgtttttttttattgttactcttgttgaaaatgtaaaatttaaatacgaatccatcattaaatgtaagttagatgtggaaaagatgagctaacgacaagagatttgcagaaatgaaatttagatattttgtaccatgttccttgcattatcaacatttatgaattttaaactcttctcttccccttgatatctttcttttgctgatacaatgcttgatagtcaattttgtttaatgtgaaactatctagaaatgatgtgtttttaaaattcattttataattgaatcatatttatcgatcggccaaaaatattacttagacagttagaccactttacttatgtatcaacaatttagttttcgataacatgtcaaggtttatgagtttcgaactcaaagtctcaaacatcaactgcaagtggaaaattctcataaggtcgttaaagaactgtctttataaaaaacccaaggaacggacattagatagctctttcaattgtccaaaaaaagaaaaaaagatggctctttcgttatgtatttaaatgaattgccactgcttctacgattaaaatcattaattagtattactataacataattcatggaaacaagattaaatatatattgttgcaaacaaacaaatgaacttaaataatacgttgacctgatttatacagcttaggttgtaataagatgtgtgtgtttggtattttcttatagtcgttaattaaaggaaaatacaagatagtattccaaatgacgtcttcgaaagtaagaaaaagtatgcagtcgtgcaaaatagaacacgagatgtgaatagacttgacccttaactgatatattctagacatctttaatttcacgtaaaatcttaggttctaaacataattaaagagaaactaagattagaaactgaaaagaaaaaaaagagtccatcacgaggaaaaaataaagaagacaagaaacgaaacatgataaatgaacaaaaaggaacaaatcacatcttggacttgtatttctctgagtgttataaaatttgagaaatggcatcatgagtcatcaagacggacgaattgaaaacaaatcgagtctatttttaaaaacaaacacaattggataagctcattaaagcttacaagtcaatcatcttacctacaacaacatcaaaacaatgataattaaatctccttttccacaatttatagttattcaaaaacagggttgatgtggctatttagttaaaacacatgtttggaagacttgtctcattcatgctcggaaagtttcagtcgatcgtgctattggatatatcatatatgtgccctacttagcattaatattttcattagataaataattgtaaatgaacaagggtttacatttgttaatctgctacatgccgccaatgtataaaataccattttcggatgttgtcctttatttggccaaatattgaccatttccattggtaacaaactttgtatccacaatgacgttctcaaaagtttgcaattgaaagtaatgactagttgcttattcaagaaagtttgcttatgctgataccacattaattttgatgagcttcttgttcacgtgaaaattgagttttcctaaaagcaaggaacagcgaagaaatagagaccgtcctctgctttttttctagcctactctctcccacctacacattcattacaagactcactaattaactctcacaccttttgcatttttctccctccaataaatgttaattttgctctttccccaatctgcaagcaagtcaagggttcatataataaaaagcaactcccattctacgaggattcacatgataaccacaaccaccctcaaataagagatatgacaacataaatctttcaaacagaaatagtaattgctaagttctatatatggtctcatggctttgcgttggatgttcaagagacgttaacgtgacaaatctgtgtttcactttcataagaaacccgcatattcttttgtgacacacgaaagaaaggcatagaatatggaaatgtccgatattgggaaggcctctttgctctttttgtatttgtatatgatgaaaaaggagagacaaataagaaaaaataaaattaaaaatgctgcacatcttttttccttaactcaaaagctcgacacttttctacaaaactagcatcatgaggaactcagaggaatcacgaacctgtttcctctgtgatgccacttcttcctccaccataggtctttatatggaggctactcaacaatttcctagcaaaataggaaccgaacgagaaacaaacacgtaaaggtggattcatgcaggattaaagaacaaagtttgagatcagagagccctagaatgaccaaaagtcgcaaattgactagagctacaagttacctgcttgattgcaattccaacttccaagctctgcaatgaactcgtggtcagacaacctgtatggacgataggaccactggcctcactgttggctggaggattggtcaggtaagaagctcccttgaacatccattgagccatttcttgactgaaataatcctcaaatacttctccacataatatacatgcgcattgggtctcatcagcagctacggcttgacaatcctcaatagcactctcaggttcactcagaacttcttcatattcaggttctaactctcccgcttttgctgctatccagttatcaacctttggaaaccaaaccctacatttactgtttgtgccacttaactcgagcttcttcttatcatgcagctccatgtgcctatcaagttcttccttttgtttaaggcgaacgctgcaggaggtgcagagatggggaaggtcatcgaatagactactaatgaccgaagggtgaagttcacggattttgtccgccctaaacttcaatcctatgaggtccttgggttcagattttgatgtttcagatggtgcagctaacccttttaccttaggggcagtagatggccccttcaccaaaacagatggctgagcatctgctggaaccacagatacagacatagagctattggtggaatgatcaggactgtgttcctgcgttatggaaggagccgatggcagctctgtcttcgaagcagatatcaagcccttcgaaactaaagagcttaagaggcatgaaagaggatctgaggccttacttttctcttttgacgtttgtactgaggtgatgccagtaagagacgctgcacatgagacaagtggtgcggaggattgttcaacttttaaacgagctaataaattgtcagtagccaatgaaattggcaaagtcttaggcttagaggctgctggcagggttagtgcccccgggttgacctcatcatgactttcctccttgatcgcaccacatgttgaattattagaaaggattccactcttcatgacagcttctagcaaatcactcatgttgggttgtcctgtagcttctgaggcaagagtaaggcctggggcattttcagctgctgacttagagtcaaagatttccactggtagttcacgcatatttgtgtttttaaactgactacttgaagatgggagccgtacagagtcatccctgggaacattttgttttgctggaaaccgggaagccctaggatcacgttgggggagtgagtgagctcttctaacatcttgcttggtcacattctgtttagaagttgaatcatgtaaaggcgattgtctatctgacccagatcctgagcttggcaaaattccagagcttgcaacccttggttgaggctgaattccctttctagttgcagtcgaggttgcattggtagaagaaaacgcccagtgcccaatactacttggatctttttgctcgctggaatatgaatttgttgaattcgctgggtcaaaccttgggtcgagagctgaaaaccttggtcgttttaagaggtggttttcagattcctacaagatgggagatggttaaaagctaacaaattaaaatgagatacatcacaataaaaaggaatgcaaattactatcatagcttaccagtctctctgattcatctggtgcatgaagctcgttctttgggttgatagtggctacatcagtttcggataaccttgagtgcatatcccacataaactcttcttcctcagagtttttccaactatcataaggcacacctatatttctactgggaccacttgattccaaattttctactctagccgtagcatagttggaagttctgcttttggaatgtaacccatccctttggtcagaaatcagatcaggatccctgttcgtagctccgtaccattgtttctcacatccgtcatcagtaatccttgaaccaacattcttaatcaccgatctagagttatgtggtagatcagaagcataatcatattcccctgctattgactcgatatctttctcgtagaggggctcactaagtaaatctctttgaggtcgccgaatgttctgaattcgacacacaatcagtggaaagcacttaggtaaaaaaactgtaaccatgccaaggaaaaatcatcttacatttactttagctggacctacccacgagcctccagatgctatgcttgaaactctctccagtctatctgaatccctagtcaaattgggtgcggtctctgggacatcagtaaccattccttttgtctgcaaagaaaaccgacaaatactcagggaaattttaataaagtcgataagtagcctctacctatatccagaaacccaggaccctttgaaagaaattgattgctatctaaaccgaaaaagaaatgttccctacatttgtgaacacttagaacagagaaatgtttagtactcctgaaggttacatttatgaacacttagaacagcgaaatctctagtagagctgaaggttagggtgtatcatcactaataactttcagtggctgcaagtttactttggtcattgcttacccgtcccgactgctgaaggcgctgcctttctagatacttgggattcacatggatgctatgtggtgggcgctgagattgcggctcagctctggctgtggatacaacagctgctgaaccatcacttttagcattaaagccaagttctttctcaataagctgaagtgtttgcggatgaaagactcctttccaggttccaaaaagatgccgcatgttagaatgcataggagggtcaacttgcctgtaagccttaacaaaaaccttcagagaagtaaaaagagggtgatcagagatgaatttgctaggaaaaaaacattctataaccatgactatcaacaaagcaccaaacctcaggcagcctggcaccaaagtacttaatgtaatcccttccgatgttcttcacaatgctgtctaacaggtacagtgttggcagcttctgatcacttggtacctgcatgatattcttcaaatcagataacccagaagaaaaaaggccaatttgatctcatagagagtaacatcgagatttccacatgagcctctaaaggtaatgaaagaaatcaataacttaaagtagaatcaaaagcacagaccaagatgacattcaagctaatactaacacatattctgacaactagaaatccaacaatagacacagataaccattagacgatgtaaacaacactgcaatagcaattcttgtcttcactctccacacagacttgatggatcaggctccttctattgagtgcttccttgctacccaaagactgaataaaagttgacttggctttgtggagagcatgcggtaagcagaaaccgccaacagaaaatccaacctcaataaaaacagagcttatgaaagcccttgctaaatggtaaagtgagatacaaaaaactctaacgctgataaagagactacacactcatataaccaaaactcagtacaatcacatgatgagctgatatatgcattcttgatatatgaacatgaacaaaatggttgcatgggcaacagctattttttagattgttaacaacattgtgtcagtactatgaactttgtttcaaagaaatgatttgcgacttgatgaagaaatataaaaacacatagatcccagaaaaggatactagggttgattcaaaaaactcaatttctcattgaacctcgtatacagataacacaaatctcaaccaccaccttttaccttattccccttatatcgtacaattattattactcaaacaagaatttgagaactaaagcacggattataacaacaaaacagtgggcatgaaaactgggtgttcacctcgaggatgttgttgcaaatggcggttacgacggctttagcagcatgaacattctctccagcaattattgtaaggttcgttattatcggcttcgagttgaaagtgagctcagccagtgcagacttgtactgattcacaagctcataatgtggatgaaccggctgtggctggtaagcctctcggctcggatcactgacaatactactctcagtttctctaccactaactcgaaaccttgacgaagcaggtggcactgtcaccgccgtagccgtaccaagcgttctctgcgacaaaaactgccgcgcgttggaattaacaggccggattgattcctcgctgagcctgggtttcttcatcggacctggatctctggatctatcaaacggtctacgaggattctccattccaaagaactatacaatacaagaggtacgcaaataatgccctaaattaaacctaatcggcaaaaatcgattgcagtgacaacaaatcctcgttagaggggaattcagagcattacaacaatcagtaaccctaagttacaatctaaaaattgagatgcataacgcgattctgcgaagaagacggagaagatagaaggaatgcttcgaattcggcaaaaatgtcagagagtttggacaatctccgatcaattagggttgtgaattggggattttatggagacgagacaaaaaaaagttgaagatcggagctggttccaaaaatatttaggcccatttaatgacccacattccatgtataataggcccatcatctaatatttgacaacaatagaattctttggtccggttgaactatctgatttaaaccaagttaagtgagatcctccacatatcgaaccagatcttgattcaggtaaccaaaagctaaccgtaaattcagatataaaccaaacgaagggaacagagagtttacacagctacgggtctgttttttgtgacaagtgtttgatacaaatttaagacgaaactaaaatgggatttagaaaccttgtacaactctaggactgttaactttacgttttcactttcttacattaactagattggaacagtgtgctctctcactcttaaccataagcttgtatttgtttgcttgccaacggattaggcgaggttagcttgttgtcccttcagtttgctcgccgggaagtgcaatcttgcaatcaaaggcttcggtcccctcgtctttcgatcaaatccacgtacacatacgtaccctacataatatcaaaagataagttatgtttcagaacaagaagaaactgcttaatacaaaatgtacctttccaaaagcaagcctgtatcttctcagttgataaacctgagaaaaatagagctcaagtggttagaacaactttcttttatataaacaatcgcatcacaatccaataaagaaaatcttatacctttgaatatcgtaggaacagaggtaccaaaatagaccgttcttcgaggtaattcccatatcaattcccttgggacattgattgggtttaggctggatgcatgatccgcaaacacctgtatcaatagaatacatcacaagtttcaatgcaaataattaaaatgaaagagttggagttattggagttcaagtcttacctcatttacttgaaagtacgttccatttagaggaaaactacccctcatcgctgttctacaaggaatctgtacaatttacaacatattaatctgtagaaaacataagtgtagtaagccgcataaggagattgatgcaactacttaccaaaattgtccctctcacaatttgagatctagtctccttgatgctgttgcaggagaaacaagtctcctcgtcacaaagcataccatttgcttggaatatgcacgtactaacagacggttgaatagaatcagccgtctcacctgttgaataacacatcgattaaagataccgatttgatttcatgattaaaagatatgcaaatcattaaattacctggcgtccatatagcaagcaaataagaacatggatcatcaggttctctcttttccaactgccacaagaaatcacaaacagctagtcagattttacaatatagacagcactctatacggcatgtgtccttatccagttagctcacatacctgagctagaagaggatgctcgtctggaagttcgtaactgcaagatacgggaaaagaaacaagttatggcatagcctgtaattattgggaagtttgtctgctttccaacttacgagttcatgcttggtcaatcacttaaatattctactctgttcaagctttaataattttgaaaaatgtgtttctgatttcatttttaacctaagaacgaagaaaaacagagaaaaatggattcttacactcggtgttctgtccttaactggctgatattcttgagcttaggcattggaagagaagcagtttcagcagtaagtgcaactaaagcgctggacatgtttccgtcttgaagttccttgttgtgttccattatcttcttcaagttactggtaaatgcatccatgtttagcctgatggtaggaatttcttctggatcctcaaaaaacgcctcctctatgtcagctattgatacttctgcggtttctggctccggtgaagcaggctcttcgatgattggttcacaacatgtgaccttttttgctggttctgagtgctgtactacttcagacccttgctctctctggaatggctctggcaggtgtagaggcaaagggtttttatcaggtgtccccatacctttctctgtacttggtaaagcaagccttgcactgtaaaacaaatgaatgttactaaattttctgtaatgatgattcagagcttcgtttagatacagaccaattctcatttaactgggttatattttaacaaggactttcctcatagagtcatagtggtactaaaggtttaagagaacatgttgtagcaccttgcaaacgcactggcaaaatgtctgcattctcctttcatcggacatgcattgcaattaggtttgctctttgtgcaaaagacctgatacaataatcaagcagattacaaacctcatcatgtgagctgattttgacatacgtatatatgtatttctttaatacatacctttccaaaagtaatcatctggtagtgcaactcatacctgtgagataatagggtattaaactaatgaataagtgtattagactgaggcatgaaaaaaaaaaagttagtgataaacatcattcttacaatgttttttggtcgagtttgcagagacggggccaaagatacttttgaatagattcaagcataggatacctagacaaaccaaacctcagatgtattaagtaacaaattacaatttccaagtaggaccattttgaaaagtgcttacatttccagaagatgcaactgaagtgactctgggagcggctgaaggggcacccatccaagtctgacggctatgcgcccaacatttgtatcaacctgtcaataaattaagttcatgcatcatataattcactttttatagggacagaaacaaaagtttgatccttgcttactggaaaggcaagatggtgaagtgttagaagccgcacacactccacacttttcagtcccaatccgttaaagctcagaagatattctctgcagggttttgtaatatacgagagtacataattcattattaagtcactaaaactgccaaagtagtaatctttgtataggttaataaagaagaaataaaatgcttcgtctttcaaacttactttgctttatctggtggaacatctctcaaccattcaagatcgatacttccatggtcatttaccagtcgatcaaggaagccctgcatgattttcatgttcagagtcaaatacttaaaatgaatgttatcacgaaatttagccactaaatttttacctgtatacgttctgcaagtttatggttcatcccgcgactcttgattgtttcagcaacttccttaacatctgctgctcgtattgccttccaatccacggtgtccattgtacttcttgttttttctctaattcctgctctagcttgggcttctcttcttaaacaatcccagtcaaacgcttttttttcctccttcaaaacctttttccctttttcttttaaggtaggtttctgacaactcaaaacatccccatcttgctgagagcaacaaccaggttcactactatcaacagaggattttgtgggctctttcattgactggaaacccttaatttctgagctacaatcacccggagacatatttggtgatacttgattggaatcttctagagagacttgtaccccctgtaggagcttcataaaggaagtacgatactctccttctaagtcgatctctgagcttgatcctgctctctctgtattttgaggagcatcagacaccatcgaatgttgacatgtaagtgcagaatcttcagatggaaacaggttcaggacacgacacttctcatccgtcttatcaacctctacacttgagccttttcgatctgaatcaacatactcctttgaatccgtggttttgtcaactgattcatgggctgagatggcaatctcactactgcttctggaggtttcattgctaggtacataatccttctcctcatcaggctgtgtatttttcaaagtaacagaactgtgattgtgatcgggtgggcttgacatcgtttcctctgagtccaagtacgttatttgaatagaaggcatcgagcttgttccagcgtcaaagttactgctcggtacaaaagggacagggaactgggaagccaacgacatgaaagccgaactacaaggagtaaaaaacatcaaagcaagttagttttgtgactttttgctgtcttggatttagtttgacatagaattatgtaagagcttgtaccttgagagatggtctgaaacattttgagtgagaaatactccaacaacagaatccacgacggatcccttccaaggcgtaaaacgtcgatcccctgttagaaaccaaagaccataacaagaagcagtagctgagacatactaattgaaaccatgtggttagaacagaaacacataaaaggacaagtgtggtgtataaccttgtacaaggtgcatccttgcaataaatgagtcagctcgtcctcgaaacacattacgttcttcctcccaccatttcgccttctgctcgtctgatccgtcaacaccttcgctattaatattctccaatagcagtttccacactctgtctgtctcatcgtctagatcaacctttggtcgtgggcgtggttttttaacaggagttacaggcacaattgctccagcgccaccaccaaagagtacaatctggctattcattgtgtaaggaacgagagcagtttcagaatgctccctgttgatgtctaatagacgcaatagctcactgattgtttcgatcgagttacgtcgtttccaaagttcatctggagaaagacctgcaggaatcaaacatcatcattatcaagaaatagtctgcatttaacagattcaaaaaaacaaagaaatatagttctgtatctattcattaccagtaaatgaaggtggaaaacggcaaagattcggaagaagatttttctgtttggtttgtgatttctcagacttggttggcttctttttgctcacagtcacccgcgtatcaacaagaatcttattattttgctgtggcttgctacaatatcctgaggttaaatgctcaggaacttccacaagtttattcattgaagacaaattccggaatcgagcatggcctgttgttttcttcttgatcggcgtgtctatcttatccgagagaacatttagctcagactcttgccttccttgaaagataccttctcgtctttcttcaacggttaggactctattagcactgagctgagatgtggaactgtagcacgtagcgtgaaaggcagaaacataattgtgctgttgtccagagaatactttgctgcaaatggcatcatatctcatccctccctgttgcaagtttggggaatacaaccaatgcattttctggtagtcacattgctcatcatactgaatccctgatagattcatgtcgcaacaagttggtccttgtcttctctttgcagcttgcgccatcgaaatatcgacttcttctagattactgccatttttctttggttgaactccctttcttttaccttggctgcgctttctcttgggcgtgctaggagccgaaagaaggcaatcttttaactcttgattcccagaatctaactgcttctcttgaagagctgattccatctcacctgcttctctaatgtcaccgttggtctggttttctccattttcggcttcaaaatccaagactcgtctacagagcctcttaggacgagttgaagtttcaacagctgctgatgattcaaccggagtagcgtcttgatccttactgacttcaaccttcttccgcacatatttcctctttggtgttttgctttcttgaccatcggtgacaacagacttcctcggagctcgtggtttaggctccctcttgggtttagcttctctacgaacctttggccgatgcttcttcctcttaggtttttcaggagtcttgaggatctgttcagcaacattgttactcactgagctcaaactctccacttcttcagtacctttttgcataacctctgtgtttcctacattgagaatcacatctttctcagtccaactcaaacagaatcaaaatttgacaaagcgatttcatttctcatgagaccagaatcaaaatcccctcttacttgtaggtattggagtctgaccagagaatatgagggatgcagtgttagctagagcaagcaaatccccaaaagacaagtgatcaagaccactcatatccttgttcccaacaaatctcctgcatgcatcaataccttacttaaccaattacccatcactactctttgaaatttctcaactttagaacaaaaaagcacaaacctttcctccaattgactgctatgatattgatcctccaccgtgtatgggcagatcggtgaaaatggcttcatgggtgtctgaggaatccatggaggttgttgaaagctgctttcttctctcctctgtttctccatttctgactctatttttacttttcttcactcttacttaaatcagaaccatttgagaaaaagcttggaactttctattttttccactgcaaaaagttcaataatttcttcaataaaagagatcaccaattttttttaaaaatcacgattttataaaatgatcagatccacttttttctggggttttagagaaagagagatctccggaagtcattgattttgggtgagtggcgacatgaacgattaatccgttcgttaggtgaaagagagactttttagattcacaacaaaatgtaaaaaaaagtaagaaaaaaacaaaattcattaccagtagaatcaatggttatggtggtgatggagagagttagttcggtggtagctatgagaggataagatcactgatgcttcgtttcttctcttggaatcgatgaagttaaagagtaatatagaaaaagcttttttggcctaacgtataaagaagaggatataacatgtgttgttgtgtgtttcactatttttcataaccgtttgtttatgtagggcgaaagttcgtttggttggcgggaaaagttttacggaattttattttaaaaataatgattcttttctacaaaatctcctagactatgggaaagatgatttaaaaagttaataatattgtcgttgttatcgtcatcgtcatcatcgtcttttctgttatctttttctctttaaaatttcgtattttttctcgtttacgtaactatttaaaattatatgaactaactaattttataattaatagaaattataaaataatcttaattttgctttagatataaaataattagaactttatttataaatttatcatcaaattatgatttaaacaaataacatgttatgtaatccacgtttataattttgatcaataatatattattttgctaatttttacgtaatctcataaatttacacgttttcgtttacatatgcagaagttaaatgattcgttttagaattattattttccactgatatgggagctagtgtagtagagtgattattaggctagttgcccaacgagtctttcgtttttgatcattccaaatgttttagtctagtacgataggagtcaaaatactgcaccatatgtgtgaaactgtgaatgtgtgtgaaaaaaagagtaattagtgtgctaacctttgatttcctgtcatgcaagaaaccttcaaagagacgtacatgagaaatgagtattgtaaatcatttatttcatggacttggttggaatcttagtgaatcgttgttgtcaatcttaacaacttgttggattggttatgagcctatgacttatgacttatgagtgagtcaatggtggtcataacctaatgattgggttatgagcaaagaaatttggaatttgtaaaaaaaaaaaaaaaaatcaagagcttttttgtgtggacatatctatcctagaaactgagacgaataatagtggataaaaagttgggaacggattattcgaatgtttaaaactattattgaaaacaatacaactaaatatggtacaaaagtaaacgaattcgtatagctaaacctaattcaaattacgaagctaatccatacttggatcctaaacgcttttacttttacttacggtttctttttcaaaaaagtttttacaaatttgggtttgtcttatgaagattatggcagaagagactgatcaaaagtgaatgcctaattcggtttaatccattcaagtttatcttaaacaatgaaactgaccatgaaagtgaattcaaagaccaaatcaaagaaaaattaaactgatttagttgtaatattggtattgaattaaactataaatagaaataaccaaacatataaccacaaaagaagactatttatataaatatatgagttggaagtcatttttggactattatataagatctaattatcacacgacgtgtggatgtatggttagcagagttgtgttcagagagttcgataaagccatcactccaaacatacaaaatatccatacattgatccaccaatataaccggctgtgtgccaagcaaagtgaagcttaggcctaactagggttctcaaaagttcaaaatataaaaaatattttggcgtcgaccttaaagtccttgcttcatcgactatagtctaaagccggcatgcctaaaaacctcatataaatcgtcgcttgttactcgatcatactctgtaactataaatatcctgatcttaattataacttgaaatactactaatctacgaatctatcatgtaacctgtttactagtttttatttaatataatcaaggagataggtcacttgaaaacaaagacgccacgcttgtatctcaatccatacttctattttttgtcttatgatatggtatcattcacgtagtttatatattaaaaaaaaaaaaatatcattcccatagttcttagttctttgttttattcataattttataatattggccttcccaaaaatttgggtaaggtcttggacattacaaagatccaacatatacaaaaataaataatcaaaaaaatctttgtatgactggagataatgatcggatcttgctgaagaccggaaacagagaatcagagcaatagtaccagcggatacaagacccacgacttcgctgatttgttttctcataacatgtttgtgattattttctgatttaagcgtcgaaagatttttttatcccataaggtcaatcctctcaagcggtggcaggagattcccgtttcacgcactgtgtgagacgtgtgaatgacatagctctcgcttaccatccacgtctcatgtatcagattcattcaactcttttactcattcaccatgcatgaaaagtataaattacattgaattttagcaaagcacttaattcttatcttattataatcctattttacatgcacacgttataatgttatgatattataatacattttgtatcgacatgatattatccatataaacaatggtgaaacttaactcaaagagacaaataccatattgtgatttcatgcaaactgagatagtgccaagtggaagccaagtgccatctttcgatcttaaacatgtcacatagaagaagactacaataacccacttaataagtataaactttatttattaatgcatgactttttcaactgttcctttccccatgcaatattgatctatcttttggatcattgtttataaaagttcacttagaacattcattctagaaagtatataagtcgattcttttgatgaacaaactccaacgagaaaggttctttatatatactcctaataatggtgataacgtagaatatacatattgtttacgccaattcgccaaacaattcactccttaaaatgacctctgataaataaaatcgactaatataaaccttatctactaatgacaccaactaataacacccatttagggtaatcctcatttattaaacatagcttactacctaacaacaataacagaattattgttctattaatcttcttttttaattttgggttgagtgatagaaaccaaccaccagacacgttgttaaggaggatgatgataacgatttttaaaaaaataaaacagaaaatagaaaaaaactcaaaaggagaaaaaaagaacagatagcgaaagaaaagtcttatttctggaatcaaatccttgtgagttttcttaagatcaaaacatataaatttgtgattttgattattgggttttgctcatagaagacgaaacagaaagaaacattcgtaaacaacaccaatacaccaacccatacaatctaaattacattaacatcagagaaagtttcaaacttttccaaatcttcaacgccattgaaatagcatctcacaggttagattctttcatttagatatgaatcagatttctgaaaatttgttggattcgtgaattctcattgtcttcatgtccattatcgataccctgaatttgtctgaatctccaatatctaagataagtaatgtatgtccttatcttactgaatttgcatgttctgtttttttgtttgatctgttttgttgtttgattatctcttttctgaagatgtaaagagattatggatcaaatgattgttcttcttgtgtttgcttaagaagtatatgtggttttgtagattgatgagtcattaaagaccgtcaatatgacgactactccaacttcatctgggagaagaagcatttcaagtataaggagaacatcatcagcttctaagaaacctgttcttcaatcagaagagagcgaaagcggaagcggaagcattaacgagaacacctccaaacctgattcacctcttgctcaaccggtttctgatggcgagagaacagtcaagaagctacggttatccaaagctctcactattaatgagggaaccactgtctttgatgcttgtcgaaggatggctgctaggcgtgttgatgcggttttgttaactgattcaagcgctcttctttccggtattgttacagacaaagatatagccacgagggtgattgcagaagggttgagaccagagcatactctggtgtctaaagtcatgacaaggaatcccatttttgtcacatctgattcacttgccattgaggctcttcagaagatggttcagggaaagttcaggcacttgcctgttgtagagaatggtgaagtcattgctttgttggatatcacaaagtgtctctatgatgctatctcacggatggaaaaagctgcagagcaaggaagtgctttagctactgcagtggaagaacggcattggggaagtggaaacttcgctttcattgatacattgagagagaggatgttcaagcctgcattgtcaactatagtcactgagaataccaaagttgcacttgtatcagcatcagatcctgtctttgtagcttccaaaaagatgcgtgatttgcgggttaactctgtgatcatcgcggttgggaacaagattcatgggattttaacttcaaaggacattctcatgagagttgtagcacagaatctatctcctgagctgactcttgttgaaaaggtaatgacgccaaatcctgaatgtgcatcaatagagacaacaatcctcgatgcattgcatataatgcatgatgggaagttcttgcatctgccggttttcgataaagacggattcgccgtagcttgtttagacgtgctgcagataactcacgcagctatatcaacggttgagaacaacagctcaggagctgttaacgatatggcgaatacaatgatgcaaaagttctgggactcagctcttgcgttagaaccacctgaggattacgaaacacacagcgatatgtcagcaatgctgataaattcagaagggaagcagtcgtgtccatcacaaggacttgtgagctcgtttgctttcaaattcgaagatcgtaaagggagagtacagcggtttaactcaactggtgagagttttgaagagctgatgagtgttgtgatgcaaagatgtgaagcggattcaggccttcagataatgtaccaagatgatgaaggtgataaagttttgattagtagggacagtgatcttgttgctgctgtaacttttgctaggtctttggggcaaaaggttttgcgactacatcttgattttaccgagacaattgctcctcttgagacgattgcagatttgtccgagggaaatggcggttgtgtttggtggcagactggcgtcttggctggtgctattgtcctaacgagcataggtttatttgtttacttaaaacgttccaagaaatgatatgttgaatgggaacttaattgtattacactgttactttgtctttttattcgattcacattgcaaagcaataataaaacttgttaccaaaacatacttgttcctgtttgagaattgtgattgttctctcagtagtcaatagacaagaaggcaggtttgcccgagtggttaagggggaagacttaagttcttctgcacataagtgcgcgtgggttcgaaccccacagcctgcatatttttcctaaaatcttttttcctaaaaacttcatgcattgaaaatttcaaaaaataaagagaaagatgcaggctgtggggttcgaacccacgcgcacttatgtgcagaagaacttaagtcttcccccttaaccactcgggcaaacctgcttattgaatatctgttaataaaccaagtacttgttattattctacaacccaaattcaagaaatttttgtccttcaccatcacttgattaagcttatttcaacagaaagtgaacgataaaagtgataaaccgagaagaaaatgatttatctacacaattttgtatgaatgtttttctagtcatcttcagatagtgttcacaccttttttacgtgtgaactcttgttgaataatagtagtcatgaacacaagcaggtctattttaaaacctttactagagttgcaattttaatataataatgaagaacttattttatttttgttaaaactccatcgtatgtcaccagagatcataacaatcacatgagaagattaaagagtaaagccgaaattagattgaaataaggggctaccgtcctcgacaaaggcagagcattctcatgtttcccttacaaaaatgagtaacttttcccaaaaagggttcaacaaaagacgtaagaaaccaaacaaagaagaaacaaaaacagaacgttttatttaattaaagcaaatgatcaaactcaggtcatcttctcctcgtcacaaagaagaccactttgcttctaaaagctccatttagtagggttccacaggtttgcggaagttgactccagcgtaaattgcctctgatcccaactcctcctcaatacgcaaaagctgttgagaaacaagacacatattagacaatgtactctggttgtcaaacataaagtctttactagtggtctgagatgttaaacctggttgtacttggcaagacgctcggatctgcaaggagcaccggttttgatttgtccctgtatagacagaaagatccaaatgagagtccgacaaaagatatagcatgagattgctagttaaatgcttgcaatggtttcaacttacagtggacaagccaacggctaagtcagcaatgaatgtgtcctcggtttcaccacttctgtggctggtcatcactccccaacctgctttcttcgacatcttaactgcctcgatactctcggttacagatccgatttggttaaccttcaaaagaagagcattgcaagacttctctgcgattgccttagcaactctctggaataagaaaagagtataagagagatgtgagcattttaagagagggcagacaacaaaaaaaaactggtaagaacactggcaaataaaaacaaaccttggggttagtgaccaacaaatcatcaccgacaatctgaacctcggttccacactcagtggtcatcttagcatagtgctcccagtcatcttggtcaaatgggtcctcaatggacacgattgggtactcagcgacaaaggacttgtacaggtcctttagagcatcaccagaaatcttctgagagccattgttgttctgcagagaaacaaagagcgcaacagctacaagttaagaacaggtttctcacactctatcctgacaagctgttactaaggaaaaagaaatttcacctcttctttgaagttcaagtcgtaggtcttgtcttctgagtagaactctgaagcggcaacatccattccaatgacaacctggaaaaaattgaatgggatccattagtttcatgaattatgtttcgggtaaaaggacagccaaattacatcagataagagacagacctttccagtgtatccagccttctcgatagcagtcttgagcaattcaagaccctccttgttctcctgaatgtttggtgcaaacccaccttcatcaccaacatttgtggcatcctggccgtacttcttcttaatcacagactggaaaaacatatgagaacaagatggttaagccataaacatgtaatacatgttagttcacaggaaccatctgcgaaaaagtaatacatgtatatggaatattcattgaagagcatctcaaagaccaaaaaatattggagatttaccttcaagtggtggtaaacttccacacccatcttcatggcttccttgaaagaagcagctccaacagggaggatcataaactcctgcatagcaagcttgtttccggcatgggatccaccattgatgacgttgaaggcaggaactggtagcacaatcttggggttaccagcaaggttggcaatgtgctgcacccaaataccacacaaagggaaaagcttagaacatttatcaccgaaaaaaccaagtagccaaagcagtaacaatcttatcttccatggacagagggaaccaacttaatagtgccagatcgttctaccttgtatagaggaatgccgctgacaacagccccagctttgcagacagcaagagacacagcaagaatcgcattggctccaagctaaacacagatagaaggcgcaagatggtcagacttgccttctattcttaagtgaatacacaaaaaatgaattttcccttttaagtaccttttgcttgcaccacccccactcgttttgggttccgtcaagttcatggaccatgaagttgtcaatagcagtctgctgagttgggtcctgcaagaaataataaaagcaacaaaaataaaatgagtgagcctagcgcatagaattagacacaaatttgatgttctgagagtagcttaaagtgagtcactcacctttccaataagtgctggcccgatgatgttgttcacattgccaacagcctagtgatataaacaaataacgaatcagtcaacatgatcaattgaaataactctactaacactaaaaaaacacacagaacagatcgcagtctctcaccttagatacaccctttccaaggtagtcagatcctccatccctcagctcaagagcctcatagataccagtggaagctccacttggaacagctgctgtaaccttaataccatttgacgtgtggatatcaacctaaaccaacatcatcagagaaatcattagctttcttttcaaattcgtcattagcaaacaatcgaaatcgtaaaaaccagatggaaataaatagatccgtcgcaaaaatcatataaacaaaatcaactccatcatcgacaactcacgatccaaatcgccgagatcaaatcaccgatcatcgttcacaaaaaccaaatctcattcacgtacgactactagatcaattcaggtttacaaaaaaacgattgaatagtggttttagcatcggatagtcatcaaacaaacagatccgtcacgaatactgtacaaagccggaaagtgactgggaaatacaaaagtgatcggagaaactaacctcaacggtgggattaccacgactgtcgaagatctgtctagccttaacaacggtgatagtagccatagcgagtagatctagagaaagagataaaggcgatgtgttcgagggttttagtgagaatcgcttcaacagtagtagctgaggaaatgggttggtggtctggttcgatatataaagacgtcacggatttagccaaaaccgttggattgttttaataacagccgttggatgagaacagtcagctctgatgcaagaagccaaaacgatgcgctgcacgccttttgcagaatagaagagttttttccatattgttttgctccttgtccaagtaataccgactatttttattaaagactttagaacaagtaagaataatatatggcatctagattttattccattttccgactatacgtttcactgtttccatttttattttgtcaataacatcttttataccatgtttgaaatttggatggttgtacagaactctctagaaacaattcactagttgaaaattttcttttttgttaaaggggtttcgctaaactataacttaatggatatgtttgtgggtcaaaaactttgggccttacttatgtgacaaattctccactagggtttcaatgtccatcaaccatttttatacgatattaatggaccatatttttcagtaatcattgtttgattatgcttattctatatgtatcaacatttaaaatgcaaatcactagttctataattcttatcaaaatgtggtgtttgcgtcggatttttggatgctctttggactttggagtttcaaactcaagattatgaggtgatctaatatttattttaatctaagttactaatttttgaaaataatttaaatgttgctaaactattatgatttttatgttcttataaacttttttttttgttaaaaggttcatataaacttagatatttctgttaataattttaatttcgattaattcaaatataagtttttcatgttttatatgaaaaaaatagtaaacaaatgcgttttacttatgtaaaaattgtcagaagaaaatagagcacaatcttccatgtttcatcaggcttcctccgagcctttagtgctatttcttttgatagaattcgtgagagattccccaaatcataacaagaaaacaaaatggtaaacgggaaatataactcgacaaatcagcgtcgattaattgatgtatcgacttttgtccatgtataacaactgctgacaggtggaattttctgattggtcgctgtaagtcgattcacactaccaagttggatacaggaaaaaaaaaaaaaaaaaaaaaaaagagagaaattaaggataagtacaaaaaagatttgtgagtatccaaagagccgcttgaagaaaaacgccaaataaatggttttgatctcgtgaagccaaatcgccattagtcaccaccttaaatgactcacctagtatatatatatatgcaccatatgagtttgatcaatctcattcaatacaatggctgaagaaaagatcaagaagagcttgcttgctgcggacgacagcgacgatgagtactcaagaggtgatacagtttcagatcagacagaactgagttcgattcttgataaacttagtctagaacctaagacggagaaaaagaaactcttggtcttgagtctaagtggtcttcttcttcacagagtccacaaaaaagagttgcgtaagaaacccaagaaccgctctcctgatgcttcttgtgggccaaatcttggtaacgtttcattattcttttattaactttgctaccttttttgtatttatagtttatttgtgtttgttttgttgtttagtgtataagagaccgtttgctgaagagtttatgaagttttgtcttgagagatttgaagttggtatttggtcctctgcttgcgagttagtctcttcactaaacattcttatagttacaggttaatattgttgatttcttaagcttaaatagtactttttatctgactcttcatgtgtttgattgataggaaaaatgttgacattgttttaagcattgtgcttgaaaatctccaagacaagcttctctttgtttgggtaagactctcattgtatagagatgtgtgtctatttatgtatatataatttcgaatactcttttattgtaggaccaagagagtgtacggacagtggatataaaacactagagaaccgttacaagcctttgttctttaaggatctctctaaagtgttcaagtgctttaaaggcttctctgcttcaaacaccatcttcattgatgatgaaccatataaagctcttcgtaatcctgtaaaacactcgaatctctattatagtgttgtttatcgataactttgtagttcttaatcctaattctaatctatcttgatttgcattcaggacaatactggtctgttcccaatgagctatgatgcttctaacataaaggataatttacttggtatgcaaaatttaaacttctgctgttcacttcttatctttagacatgcgttttggtttatttgtgattggtcttttattttgttagatccggaaggagagttgtgttcttacttggaaggtttggcaaaatcatcggatgttcaggcttacataaaagtgcattcttttggacggcccatgatcgattcttctcatcctgattggtctttctacagcaacgtttcaaagattgtctcttaatcttttatgattattagtttgtttaagcttcgtatctcaatcattatcttcttttgcttagtaatgaacacattaaaaagtctacctatttcaattctaataagaaagatgaatcacttgtgcttcagcatttgttaattcttctgtacgtgttcaatgtcgatcaaccatttttatactgtgtcatggttgattatatattctcttttggacccatttttcattaacaattatttgattatgcttattctatgtgtcaaaatttgaaaattcagatcactagttctaatttttgtatcaaaatgtggtgtttgtgtgggagtttaggatgttctttggaatttcaaactcaagatgatgaagctaggtgatccaatatatatttaatctaactggtaatttgttaaaatttgtaaaataatttgaataacgctaaactgtatatgggtttccatgtttttatatgaaaaaatagcaaacaaattcttctactatttttttcgtcaacaaattcgtttacttatttgacatttttttcagaaaaatatataatacaattttccattcagcttcttctgagccaagtgagatttcatttaataggatttcttttgattttaaaacaataaaaacaactggtaaacgagaaatagaagttgattcagtttaaatttataggattttagtctttcaacatttctattgttggattcatcaaaaactttaaatgagattcattattcatatgaggaaaaaatcaactttcaaagcgatggaaaagatgtacagtatctacattttcccatgtatgacaggtggaattatctgattggtcccttttaagtcaattactaatggtctttgtctctgactctcttcgaatcaacagaaaaagtgaaaaaagatagtcattagaaaaacaattaaagataagtacaaaaaaagattttgtgagtatccaaagagccgcatgaagaaaaacgtaaattaaatggcttttgatctcgtgaagctaaatcgccattcgtcaccaccttaatgactaaatcctctactatatatgcaccatatgagtccttactgtcttaagcataacaatggcagaagaaaagaataagaagagcatcattgctcccgcgcccgacttatacgacaaggatgaatatgatgatgattactcatgtgacacagatccagaagagacagaactgagttggattcttgataaacttagtttagtaccgaagaaggaggacaagaaactcttggtcttaagtctgaatggtctacttctacaccgattgcatataaaaaataagcgtaatgctcccaagaaccgttctcctgatgcttcatgtggaccaaatcttggtaacatttcaatagtagttttatttattcatttcttttatataattagcttgattgggtttgttttgttgtttagtgtataagaggccatttgctgaagagtttatgaagttttgtctagagagattccaagttggtatttggtcctctgcttgcgagttagtctctgattaattttcaataatttcaatctcttcctcttaagagactaagagtacctgatctgtttcttccatggtttttgactgataggaaaaatgttgacataattctaaacattattcttgaagatctagaagataagcttttgtttgtgtgtataagactcttatactatatatacatgtgtgtgtgtgagtgtgtgtttgtttgtctatatatatatatatatatatgtataaactttcgtgttcttttttcttgttaggatcaagaaaagtgtacggacagtggatataaaacgcttgagaacagtgacaagcctctgttctttaaggatctctctaaagtgtttcagtgcttcaaaggtttctctgcttcaaacaccatattcattgaagaagaaccttacaaagctcttcttaatcctgtaaagatacatttatctctataatacatttgcttatcggtttagttattggtcttaattctgactgatcttattgtgcatgcaggacaatacaggtgtgttcccgttgagttatgacccgtcagacacaaaagataatttacttggtacgcaaacagtttttgacttgtgatgtttatctgttatatttagacatgtttttttttgtttatggttggattggttttgtttatgttagatccagaaggagagttctgttcttacttggatggtttggcaaattcatctgatgttcaggcttacataaaggagcatccttttggacagcccatgatcgattcttctcatcttgattggtcttactaccgcagagtgtcgaatattgtctcttaatcttgcatggttattagtttgttgaagtttcgtattctcaataattctcttcttttgcttactattgatcacattaaaagtctacttatttcagttctaataataaagttgaataacttctgtttcattatttgctaacctatttcctaagtttgaaattttggcaatgttatatgttgaaacaaagagaagcaaatgtgaacgaaataagttttattttgtccattggattgtaaagaaaccaatgagctgaatgtttaaaaagttcaaaagaaataacatcgaaaatttaacaaatgaagtccaacgaaaatgaaaatgatagcaaagatcatccacagtttaaagaaacttttatgaacttaagaagtccaatgttttttgatgagattacttgtcttgctccggtgtagagctgtaccaccctagagtcagaaactgagaagggttaaactcatcgttcatctcctcagaatgagaaggtcctatcatctctggtccggtgaatgaggaagccaataagttaggtatttcaggtgtaacaaccgcagcttgggactcattgttcctcttctgagaatgagaagggcctgtcatttctgcttgacgttggacttgtccagtgaatgaggaagccaatgagtttggtattgctggtgtaacaaccgcagcttgcgactcatcattcctcttctgagaatgagaagggcctgtcatctctggttgacgttggacttgtctagtgaatgaggaagccagtaagtattgaactgtgggtagaagaatcacatcgttggactcatcgttcctctgccgagagtgataagggccaatcatatctggttgttggacttgttctgtggatgaggaagccaagaagcttggtgctgtgggtgaaaaaacagccatagcgttgttggactcatcttttttctcctgagagtgagaagggccaatcatatctggtccctggacttgtcctgtggatgaggaagccaatgtgtttggtggtgtggctgaaaaaacaaccgtagttctgttggactcactgttcctcttctgagagtgagaagggccaaccatctctggttgttggaccggtcctgtggatgaggaagccaatgtgtttggtggtgtggctgaaagaacaaccatagttttgttggactcactgttcctcttctgagagtgagaagggccaaccatctctggttgttggaccggtcctgtggatgaggaagccaatgtgtttggtggtgtggctgaaagaacaaccatagttctgttggactcgctgttcctcttctgagagtgagaagggccaaccatctctggttgttggaccggtcttgtggatgaggaagccaccaagtttggtgttatggatggagcaaccatagctttggacacatacttcctcttctgacgcgaatttgtgatcaacggccagaaacttccaatcacaacctataaaaaggaattataagatatagcttcaaacattgaaccatatgcataaacaaagaagatgctttgtgttcttacttggactggacttgctgcaatgagactcccagccaaagcaccaccatggacacgtccaccagcagctccaccaatcgtaatccgccaccctccggtcttatttttcactcctccgctctcagatatcgccattgtattattggtcagcgatactatctcatactcctcctacaccaagttgttatcattttcttatccatgtaagacaacttattaattctatttatagaccaactttataatgcatccttccaatacatgaaccattaggttataagattgcactgcaagaccaagtttatcatataaatatataccttaaacgtcatgaccctgcggcttgaaccgtgaggtagaatcgtaacgttagcaaccgcaccatttactgacaaaacactgatcccacgagaaccatttgcagtgaaggacatgatcctcttgattatatcctgtaaaaaacaccatatataaaagacaaataaaaacctctcatcttcaacacatatatgcatatacaaagaccagataaacaaagctgttgccttaagtccattgtttcatctctcttttaggtcactagaactaatcttatctattccttccatgtttataaaattagtaggagtgttaaagtgagttagttcactcaattccagtcaacgtataatgaattagaatattaatacttcatggtttagttaagttcagctcatttattatgagcttatatttatagatttgaatccatatcattcaacattgtaaacatatgtaataacaaaaataatccagaaaagtaaacttctaaagtctaaacaaatatatccagaagaaaccctacctttaagagccaaaatattcaaacaaaaataaacctaaataaatagttgtcaaatgcaactattgtataatggaagtcaactctcttccatttgaaagttttagatgatctaaatcccacgaaaacaacaaatgaataaaaatattaccgttattgtatgttgtaaaaccaaataaaaacaaaaatattaccgatatatagaaatcaaactttattcacgaatctattcatgactcattagagttgatccgtctaatttactaacttgaatacatttgcttacctaatccatgtataaaaagaatctaaaaccataactccaactcatcaagaactcgatcgagttgaactgaacaaaatctgttcttaaagagtttcattatacattttttgcgtggattaaaaatttatataaatattcgaattccgttgtggtgaattgaagagaaatgttattatactttgactaaaggatgatattaaaaatctaaaatcataatttttaaaaacaaaaagtttttttttttctacaacaacaaatgaaatagaaagtatgcatatgttatatatttacctctcctttattaactgtgaagctatgcggcgtgaagtcccctcctccaagcctcatagacatgtcaccttcaatcaaattaaaaatacactcaaacccatctgaattctcgtagtttgtttaataacaaatataattcttacatgtttaagtaaaaaaaaactaaattgtcatgttatgtcttttccttagattaatttccctatgccctaacacaagacaagagaatgtagttttccaaatactttccactgattgatgaaccctagattcatattttctaatggttattctttcttaagacatagcagatttagttttgtcccatcgccaataacgaaactcaaatagttatattatcgtattacatattattagttttattgtaagagaccaaagctttacctctcctcttcctcaacgatgacctcggcgtaaatgtcccagatgctgtgataaacctccctttataatcacgatacgtcttcggcctttctctcttcctgctcgcgtcgttgacaccctccaccaccgtggctggtgccgcttcggcagtcttggtgaccggaaagggagagatgggcgttgagttcgcgtcgttgacaccctccaccacagtggctggtgccgctacggcagtcttggtgaccggaaagggagtgatgcagggcgttgagttcgacattgacaaggaaatgatgctctcgttttgatccagatagagactggaaatgagaggcaatacgagagaagtagaggtagagtttgtgattttatgaagtctttttactggtcacggaataattaggggaattaaggattgtttggaaaacttttcttttctttttaccgtttcctaattaatatgtggctgtcccaattaatagaaaatatataaattaaattttgaagtttcactgtgtatgtatatgttgtctgtacatacagagataatataagaaggtaaacaaaatcgatattttgtctatctatgtaaaatttagtttttcttttctgtagatgttatctatagatatggataataagaaagaaaactttttttatatataattaatttcatattaaaaagaacttagtttagattttcgcttaaaactttatgattctagttattaaccattgttaacggtttaaataccgttattttgtaatgctagctagtgaccgttgtaaatggtttttataacgtttaaaacttataattctattttagatgtgttggaaagactagtaatttcaacattttcatatttttttagtgatttgtaacagacttctaaaatgaacaaacttacttatatacaaatgaatattatattatataataatataaacaattagaccttatattaatataatttatattcaatggatattaagtttcaaatatcaaataatttagattaaaatgcaaaaaagaacaaaaaagtcatgatttgaatttggccgaattaaatcatttcaatgtagctgtcttttaaaaatgttatttttttgtttttaatggaaacagtaattaagtgttacatagaaagtattttattttgactaacatacaatgctaagacagatttgttttagtatacgataattatatattttaaaagtaaaagttgggaatttgaattggcttggccagttataccactaaaaaacaaatttcttaaatggaaaacgccagcgggaagcaaagaacacgagtcaaacctttatagttttttccacttctagatattatataattaaagtacaaatggaaagaaatatagattttgaccaatttaaaataagttcacggaatttgtttttgatgttcagaaagaaagaaaattatgtatatttggaaaacatcaacggaaaaaaaagtagtatttgctaaaacaaaatctacaacaattgcaaatcatcaagtccggtaatttttttttatttttgtatttttcttcagtcaaaccgatgatgtgttgtaacgtaaatggcatctttttccaaactcagattctttttttttgtgttgataacattataatttcgaccactttaagcccaaggcctaaggcccaactgtatagcataacgtttaccgtcaatgcttgggccaacataataaaaccaagcgcgcacacacacatcaagccgacacattcggaaagactaaaagagcgacccaaagggaactgtgttttttttttttttttttctttctttcaaagagaagcaacgaacattatcaattcaatatgttgttatctccctgtttaaagtttcaggttgattcaagttcttcgtagcagagaattagatcaaacgtaatctacgtgaaatgcaaatgcatggccacatcgtagcagaatacaacatcactacatgagtcgttccttctccaatgtttaacaaaatattcaacaagtatacaaagctgacactctagtcaaaaatttgtaatggttatagtcgtagttgttacttgtatgtatattacttagtaaatcaaacattcttaagatagttgttttaagtagaatacaaaaacaacctaaaactgtaaattttttgtttaaactttggtagtatgaaggtgtaaaaactttagtaaattttattcaaaagataaaaaaactttggtaaattttctgattagcatttgaatggaaaaaggggatgggaatcacaacgccaattgcgcatttctttcctccttttataatttacattttaaattggttaaaggggtctcgaaaatgtcgggttggtaaaaaataagagtgagattagctacaagaaagctgactttgtttttcaagcaaatcatcaactgtcgcgtcgtaccaatcatggatccaccatgttatttgttatttttttgtcggcacactagtgttaatttgaattatttgatatattaatagcagaaataaaatacttcttacttgaagagcttaaacatattttcattacccgagaatgttggtttatcaaatgtgtatattagtggaaatgacaaatacgagtccaatagttaacgtaataactacccttcttttggggttcaaaagaactaattatgttgtttggagatttcgggaatacgagatcgaaaaatctatcttatttggatttgctttgattcattcttagtgtaaaaaccaaaaggaaagctaacctgttataaattttgatttactcaatatctaaacagaaaagcaatttgcacaagtaactttaactaatcttgtaacaaaaagacacaagttaaagcaatgatatactgtggatacctttttcaaacattgggtaaactttttgggcgtagggttatgttcacccacactatggagtggaaaacagcaatcattcacacaaccaccaccattcctactttttgtgcgtagggttatgttcagaaatatgatttaccattatctccttttttacatctatcaaagtatattattaactgattaatggaaatttcagttgatattactcgataaccttatgtcattactcagttcaatccttatgttatatatgcaattttaacatagaacgtacattattcttcatgagttctgttcctaatcagtgctatgtacgtaacttttgtttttactttgttcagtttttgttttgtctctttttttcttgactatgacactgcattcaaaaacataagaaaacagattaaagaaaagagaaaaaagataaaattgaaagattcgtttttctcaaatttcaataaaaagaaagatacatttctctcttcacacttcactcttctctttcccgcctctccgccatggctgctaaacctcttcttcttcctcttctcctccttcttcatctctcaatcaccttagctcaaaacgacacaaatgctctcacactcttccgtctccaaaccgacacacacggcaacctcgccggaaactggaccggctccgacgcttgtacctcctcatggcaaggcgtttcttgctcaccatcttcacaccgcgtcactgaactatctctcccttccctctccttacgaggaccattaacctctctctcctccttagaccaacttcgtcttcttgacctccacgataacagactcaacggcaccgtttcaccactcacaaactgtaaaaacctcagactcgtttatctcgccggtaacgatctctccggtgagattcctaaagagatatcctttcttaaacggatgatacgtcttgatctctctgataacaatatccgtggagttataccaagagagattctcgggtttacccgggttttaacgatccggatccagaacaatgagttaacgggtcggatcccggatttttctcagatgaagtcacttcttgaattgaatgtttccttcaatgagttgcacggaaacgtctccgacggcgtggtgaagaaatttggagacttgagcttttccggtaacgaaggattatgcgggtcggatcctttaccggtttgtactatcacaaacgacccggaatcttctaacactgatcagattgttccgtcgaatcctacttcgattccgcattctccggttagcgttagagaaccggaaattcacagtcatagagggattaaaccgggaataatcgctgcggttatcggtggttgcgtggcggttattgttttagtatcttttggttttgctttctgttgtggaagattagaccgtaacggcgaaagatcaaaatccggaagtgtagagactggtttcgtcggaggaggagaagggaagagacgaagcagttacggagaaggaggagagagtgatgcgacgtcggcgacagataggagcagacttgtgtttttcgagaggaggaaacagtttgagcttgatgatttgttgaaagcatctgcggagatgcttgggaaagggagtttagggacggtgtacaaggcggtgttagacgacggctcaacgactgtggcggtgaagcggcttaaagacgcgaatccatgtccgaggaaagagtttgagcagtatatggagattattggtaggcttaaacaccaaaacgttgttaagctaagagcttattactatgctaaagaagagaagctcttggtttatgagtatcttcctaatggaagcttgcactctcttcttcatggtaaaactctcttctctaagctttgattatcaaactgaaaatgctctgttttgcttagtgacaaaagtgttgatttttactacattatcggccaaagttatgatttttttattggtggttttagggaatcgaggaccaggacggattccattggattggacgacgaggattagtctaatgttaggagcagcgagaggattagcgaagattcacgacgagtatagcatctcaaagataccacacggcaatatcaaatcctctaatgttctattggacagaaacggcgtcgcgctaatagctgatttcggtttatcacttttgctaaacccggttcacgctatcgctcggttaggaggataccgtgcgccggaacagtcggagatcaaacgtctctctcagaaagctgacgtgtacagttttggtgtgttgcttctcgaggttttaacaggaaaagcaccctcgatattcccgtctccgtctagacctagatcagcggcgtcggtggctgtggaggaagaggaagaagcggtggttgatttaccgaagtgggttagatcggtggtgaaggaggaatggacggcagaggtttttgatccggagcttttgaggtataagaacatagaggaggagatggtggcaatgcttcatatcggtttagcttgcgttgtgcctcagccggagaagaggccgacgatggcggaagttgttaagatggttgaggagattagagttgagcaatctccggtcggtgaggattttgatgagtcacgaaactcaatgtctccgtcgttggctaccaccgacggctaagtttggtttctgtctgtcgatgttgtagaatacgtatcgtttggaccttgtcgatttttaaggttcttgcttagaatccctgatttgcgaacttgtcggagtttttttagccatgttttgtgttttcactgtttgtgatcgtaacggggttgtgtggttttgtggatttatgaagccgtttcaataataaaaccccatttgttactctttaaagcccattaggcccatatgttttagatgaattattttgcaattgctgctatttaattatagaacctaaaactcgaacgcccattgattagtgcttctagaacggtggatgcttctgtgtccactggtaattgtctttttggttgaagagtcagcccttcggatttgacctttcgtgtaccttttaagcccattgattatgattggcagattaagtaaattaacgaatggtcaagcacatgattagccaaatcatgacaaataaatggattcctttttcatttctggaagcggaatcttgtctaacaatttttttaattgatagtaatattttatgttatgggtttctgatagttgaagacttgaaatgttgaacttaaaagtgaaattacgctttcataatttcattaagccatgatggcaagttttttttttgggttgaggtcaacaagagcaagtttaatggtatcgaatagtgcgtaactgaaataaaacttgttgaaaaatcattcattcactattcctcggcgcgtgaggccaatttgaccccttcccccacgaaattaaacttggggagtactaaaagtctaaaccagcaacgtcgcttttcatgtgccttaatcacacccttttctgccacgtgtacgatctgggaccgtcgttgtgctcattgacatttgtagatccctttctagatgttcattaaaattacttaatttatatccagtccttctacttttagttttttgatactttaatccctgttgttttaatgatacttcattcagtatccatccaaaatcaaattaaatccatagattaagatgtacatttttgaaaataataaatggtttattataatatgttactaaatttatggtatttttcgctcttgtattgacttttacatggatacattaattttaatcttctttgatttctgttaattttctttgaattcattttatacatttattagtgaactattctaaaaattaacaaaatcatttaaaccgacaaaaaaaactttaaaagatcagcgtattataaaccaacgggggatagtttgcattaggtattggacatctggggggtaaatagagcgaaacaaaagttgaggcttgtttttcaacattttcattttattgtgtgctatttaaactgcgtcgtatttggaggcatattcgccggtcaagcgtatcaaatacccaatcacgcgaacttttctccgcctcttctccactccaaaattcttctccgtctttctcccgtcaccgtcgaataaagcctgagatctccgaattctgatcagcaactatgcattcaagtcatctccttctcgaggaaccgatcaggatgacttcaatcctcgaaccttctaaatcagtgagctatttatttctccttctctcgctctgtgtgttttctgtggttgttttgatttccttagctcgttgttgattatcgattacgtttggatctgttgcgatatttcatccattttgaagcagtgagagatttgtttcgtttgtcgtggtttttgatccgcttgatgttatttcgcagagtttcttcccggctttgactaagattgttgggactctaggtccgaaatctcgatccgtcgaggtgattgctggttgtctcaaagctggaatgtccggtaattgcgattacttcactatttgatacgtgattcgcctggggttctctttactggttactgatgtgtcgttctttttgcagtggctcgattcgatttctcttggtgcgatgctgattatcaccaggagacgctggagaatctgaagatagctgtgaagagcactaagaagctttgtgctgtatgttttctcttttctttggttttgctctgctggatcttatttggtaatgcttaataccatgaattaagattgtggtttatggcttttccaggttatgctagacactgtaggacctgagttgcaagttattaacaagactgagaaagctatttctcttaaagctgatggccttgtaactttgactccgagtcaagatcaagaagcctcctctgaagtccttcccattaattttgatgggttagcgaaggtttctatatataacccttaccgtttattttttgggagaagatgattattgcttcgtgtctatagggtttgatggatgttattgtttgatgtattcaggcggttaagaaaggagacactatctttgttggacaatacctcttcactggtagtgaaacaacttcagtttggcttgaggtataaaagaattttgcttatggaaccactctacactgttctctggaattcaaatttagactttagatgttttttttgtgagaagactaaccatttaaacaaaccttcaggttgaagaagttaaaggagatgatgtcatttgtatttcaaggaatgctgctactctgggtggtccgttattcacattgcacgtctctcaagttcacattgatatgccaaccctaactgagaaggataaggaggtaagtgttgcttataatttacatatctcagtgactgctttgctctgtctctagtaatattctagcttatctgttcgagtgctttaactattttgttctgttttggttctcttctaggttataagtacatggggagttcagaataagatcgactttctctcattatcttattgtcgacatgcagaagatgttcgccaggtccatattctttttcataatatattttttccaccttagaagtatggctacttcgtttgggttctttactcactactaattctgagcttctgatacgcttgaattatcatttttgtgccacaacacaggcccgtgagttgcttaacagttgtggtgacctctctcaaacacaaatatttgcgaagattgagaatgaagaggtaagtgaaatgcatttattttgcctttacatgtttcctctgcaacttttctgtgatggtgctgtactgctgtttatatttaccgatgtgtatttgattttagggactaacccactttgacgaaattctacaagaagcagatggcattattctttctcgtgggaatttgggtatcgatctacctccggaaaaggtatgatgttggtcagtcaaatcaatacgtttgggtccaaacccctacgcactttctatgtagattggtgtgtgactgtgtgtcttattagacgattagtgattttctggaacgaagtactaagttgaccgaaaaacttgtaggtgtttttgttccaaaaggctgctctttacaagtgtaacatggctggaaagcctgccgttcttactcgtgttgtagacagtatgacagacaatctgcggccaactcgtgcagaggcaactgatgttgctaatgctgttttagatggtatacttagtttctgaaatatgtattttgtactgcttataatttataggagggaatacatatttgtggatcatagttttggtcataactttaagagggtttctttcctttcgcttcctgcaggaagtgatgcaattcttcttggtgctgagactcttcgtggattgtaccctgttgaaaccatatcaactgttggtagaatctgttgtgaggtaggctttatcgtactgttctaaagtattattatttccatcaccttcttagtatctcaatcatcttagccatggtttgtcatctgatttctcttatgcattgattacttgtttataggcagagaaagttttcaaccaagatttgttctttaagaagactgtcaagtatgttggagaaccaatgactcacttggaatctattgcttcttctgctgtgagcctctcttttgtgttacctatgtaacttaaaagctgacaagttgcctttcaagttttctaacttaatggcttaaattctgcttgatatcaggtacgggcagcaatcaaggttaaggcatccgtaattatatgcttcacctcgtctggcagagcagcaaggttcacaccattccttccaacttaaactgttcgtacatttaaattctaatgtagctgtctaataaatgttttatccatatcgtgaaaggttgattgccaaataccgtccaactatgcccgttctctctgttgtcattccccgacttacgacaaatcagctgaagtggagctttagcggagcctttgaggtaaactttcatcctgattgtgtgaattttgaaaaagaattgggattttctaatgccacttgtcaagattcaatgattatggttgttacttgcttatgactgcatatactatttggcaattgtccccatgatgcaaaggaataacaactcttaaatgtgctttataattgaagataaaaaagaaagttaccctttggaataatgtcacctcttatagatttctatgtatgactagaaaagcttttgtcatatctgaattgcatatatggactttcttttgattattgctcaaacttaacatcgtgtttgtgcctattgttgtctcaggcaaggcagtcacttattgtcagaggtcttttccccatgcttgctgatcctcgtcaccctgtaagtctctattgcatagaatttgattcattgcaaaaagattcttgcttgcaaatttagtgctatagttgcaattgtaactttagtggggtttgaaaccgtattttctctaatgtattgtgaatcctcttgttcaggcggaatcaacaagtgcaacaaatgagtcggttcttaaagtggctctagaccatgggaagcaagccggagtgatcaagtcacatgacagagttgtggtctgtcagaaagtgggagatgcgtccgtggtcaaaatcatcgagctagaggattagaagaagcagagtgagtcgttgtctcggtcttttttgttctgttactaatcaattttatttccttcactaaaactcttggtgccgtccaagaaaaatccttgcaatcattgtttctcgccggctatatgctagataccggagtgaaaatatatctcctgggcttttgttttcgtatttaggagattgatgtttccaagttatgatataaaccactttccactttatgcataatatctccatcccctagtaaccatagttctatatacattgttttattgaaaattaattttattgataagaaatccaactaagaataaatacgatgagtatatattatgaattacaaatctgcaaaaacgtggaagtttttggagtcaagggcgatgagcctaagagctgcaatggcggcagcaacagacatcaaactgaagaagacaacgttgagccaatggcatagcttttgcaaagtattgagcttattgttcttagccttatagtacatgtggttggctagaatgaatgtaagggggaatgtgctcactgcaccagtgaggctcatgaagtccccaaggaacggcaagagtgctgagagaagcgtactaactgctatgtacccgcctcttgccatgatcctaaacaacaagttctttaatgccaatgggtttcctttgatcccaaacttggtgtccatgtactcatatgttggacttgcaaaaatctacaaaaattgagtaagaacggattgactaacacataattcttttctcgaagagaaacttacgtgcaacgagataacggattgaaggatagcggagatgttagcaagggctttaacccaaagtggaccattaacgttgtttagtagatagggcgaggtcgaggatccgtaagcccaatacccgatgaatacaaccgcaaacatcggtaaaacacccaccgtgaattgaaagtatagagccttcatcatgttttttactactggttgctttactgttgcctatcaatatcatgacggaaaaagcagtgtagattagaaggattgtcaagcagtgtagtaaaatacacacactaaacctttgaagcctaaaacatgaagctaaaaatctcgaaaaaaaagaaatcacctgaatttctggaagcatccctgtgttgaatacgaaaactagtgtagcggctgctccagtgatggtaaaaagtttgcttagtggtgatccttgtatctcgtaatctcttgaaggtgctttaactcctacaaaagcaaaaatataagggaagtatctgaattgtcagaagctataaaatccataagtaatggctaacgcctgatcattacataagttataccatctttaaccgatagcacgattgccacaacgatatagatgaggctgaggatagtcgaaaccgcaagccatatcccaagagccgacaaatgaggaattccaatagcaaaaaccgcacaaatcagacccgcaatagctataaaatgaggtaacttcatggcatgatcatccctaaaaagcacataaacagcctgcagaaaacagaacacaccccaaacataactgacttctggctcacggaatcaagaatcaagagagaaaaatgtttactacgtacctttaaggcggaaccagctagtatgatgaaaccacaattaatcatgaaaagattgacatattgcaacacccatgtaagacaataagcctttctacctgaaaaagagataaatatttcagtgaaagtaacagagaagatagagaaagataaagcaaagagagctggtttaccgtaaatgaatcccgcaaggtctctatagcgaatgtgtcttttgccaccaaactcatgaagcttggctacgagagtgtttgcatagagtgagattgcagtagcaagaataagaccaaccacaccaccaatccatcctaaaggaaccatgactgttcctgaatatcccaacacgtatgcgctgtttatacttgttgtcagaacgaacgctgcctgaaaccatgaatctgtatattccacaaaacttactaattagctttccccaatatgcgatcatatcagcttctaaacagttccgcttaatattgcaaacatgcataaagaagaagcaaatggaattcttaggtcacatttctttctttcttgtaaatgattttcatagtttaaagaaaaaatagtaataaagaaactgaaattgagcactaatccaacgttaattaaatagataaattgagaaatcttaagcagtaaaattaatataacaaaacaaaaagagggagaaaacgaatgacaaaccgctgctaatctgatgagcagtgtcagggatttcgatatcaacaccttccccgacattgtttatgcgattcttagagttcatgacctctccaaatggttattgtgtctctgtagctaagagactttccctatataatagatggtcggtaacaacgggacagactatggtgagaaatcaagtccaactagaagtggcggagagatttttaaaagattttagaaatcagaagttgttgaacagtttctttcattatatacgaattacgaagcaagcacaattaaaatgtggtgaatgaagaaatttctttggaattgagtggttcagatctagacacaatcatttactgcaaaattgggataatatatgaacaaattgtacaaatgatagtgttagacttatcacaaaacaatccaaaacaaaaaaaacatcaactctgaaatgtatgtggctgtgaatttggaaagacacttaaatgtttctttagaccgttgaagtgttgttgggaaatgagtgtacgcagcttgatccttaaagattttttggacatttctgccgtcttgttgttaggctgaataagactagatacgaaaatatgtaacgtgacacgaaagataataaataggccaaaagtttatagtgtactaaattctcttagagttttgactttttattgtttgatttatttaaaaagtggccggccgggacctctatcaacacatttatgttagaccaattttttggttgaatacttaaaaccattcttttcaaatgtgacatcacaatacgatatatcaacatccgctaaaactgaaataacactttttcttttttagagtatacataacactgaaattgaaattgaaagctagctttagagatctaatgaagagttgcaacaattttgatcttgtaagaaattaaatcaaaactttgtccaaatctattctttaaggttatgtccccgttatacacatgatttgcctctgttatttctagtaattgtatgttaatctttttcaaagagatttatcgttttagtatatatataaatgtaagtaggtgatagtacaaaagcgcccgtggcctaatggataaggcgtttgacttctaatcaaacgattgtgggttcgagtcccaccgggcgtgccaattctatttttgtccatctataaatcggcccattgttgacagtggtcggcccaattatacttcgaatgttagttattgtttccattgctgatagatcgacaggacggttttgtatggcgatttcggcaagaggaatggcgataactggaatcgaagatcacagatactggaattggattgaaacagaagaatgaaggtacaatatttccgaaactcattgaacttaagtagaattagcaagtagatatcaaagtgttaacacagaagtagatgatcaagagcattgcaatacttggtttgtgatcatgttatttgacctgtttttcgtaaactgttgatctttggctctcagttttgtgaatcttttagaacaattctctctctggcagatcaaataaggattgaaagtttccatatgttccttgtgttaacaaaaaaaagtatcacaccacaattattccggttcaaagtccattttttgcttgtatctcatactatagttaaaaacttgtaccatttcatatcaccagtcgattcaatatgaacatgtaaagtgggtacaaattgtgattacttaaaaaaaatgaaaatagataggctttgacaattgtaacttgaaagaaaagggtcttgttcaaacgtaaggaccattctttaaaagggaccattttaatgttagggtaattgttaaaacgtagtttaagttgttattccaatgtctattttcgtattgaatgttgatttcgttttcacgacggggagacacgtgacagtttcgacttaaattaccaaaaaggtaataatggcaaatggaaagtcaggttctgtgacttctgccttccacttgttggcatttggcagtgccaaagtacatgtcagaaagatgttattgtcaaatttgtctgtaaaaagaattcttatactagatttcaccatgctctctgtttagcaagtacgtaatatactgaaaacattaaccgttggttttggtgtttaactaacatggaattttgacctataaagaaggaaacaattctagtgagcttcttctttatacgaaaacattcagtaaatgacacaacacgctgctctcttgagctttatttctctgtaactttatactatatggtcctcgtttttagattatcataatatagctttcttcgtagtactatttagtatttactcactcaatttatcacttctacactctctctattcattggattgtgacaataatagttacgtatctcgatcccaaagtgttgaattcaatagattttaacaggctttataccttcagcttctaacagagatgcttcttgatttagcttagaactagcagataataagtagatctctttggcatctttgattatccatcatgctcctgatggttaattattctgtttatatgtaacttttattgtagttacattctcattattgatcccttccaacattgatgatcaaatatatcttcgatcgggattcaaaagagcctttaactaattactcttatcttctagcgtttgtaggatttttgttcgctttcattaacatatgtgaacacgaaaagttaaaccaatttttatgattataatctattacaaatttatttggtttacattgttttattttaagcaaaatcatatgggactagtggctctttttccgtttcccaacttatacgtgttttcgataccacatgttatataaaaaatatatataattaacaatatttccaaatgcttatgaaaaattaataatgatttagatacagttttgtttctggtaaagatgtataaactaatacacaagggagaaataaattattaaaaaaaagtcagtttaaaaaaattaggatcaccggttaagatttttttctttgaaaatcttttatttttattcaatccaatgacttgatacagaaaaaatatccccatcttgaaatcacatcaaaaattggctgatgtagttgttacgtgctttggaaatggaacaaaatatacttatgtcagtcacaattaacgtttaaaccgtagaatttgatttagagaaacataactagtgctagaaacttcatctttatctaaccatataagcatttaccatttcttcaagataagttgcatcattcaatttctaactatactttatcgccggatcataccaaaaaaacacgtagatcgatatgatgatactattttcactagtgcactgtgtgctcccaaattttgtcaggatcagaattggacccttctgatctatctgttggagtagcaccctgcagctccacagtgttaaataaagattgtggggactttacaaatacatatacatacaaagagatgaaaactggaggctatattacagattgagagtagaagtttgaattcatatatgtcagattggttggttaattaaggtagagaaagtgatagacatttgtacaaatgtagaatctggaccattctctcttttctttttcacctctatctcttactcttactgttcctttctcaactcacattactttcattttattttattcttttatatatactaaaatccacattaattggtcacgtataatacgaaatacctacgttattacttatgtaaatatcttacttatggaaacatacaaggtcatgtgagaatatgagaataataatcaatttttaacaaaaatttcaaactaaataatcaccattaactttttttagctcgttttgtatcgtataatgcatttgctcaacaccgcctattcttaccctcatcgttcggagtactatttgttaccggtcagactaatgaaaccattcatttacacatatatttatcttacttgatagtgaccaattagttacccgaagttaaaaacagaagccctagcgttttcaaccacatttacttatctatatataatgttcctgcatgttctaacatatgcatatagtgataaagatacacccatatcaaacacccaaagttgctcatttccttgtttaggtaaaaaatagtctcttgaaagtgattgttgtaagcagagatagacaaaagaggtaaaaaaaaagaagaagagaagatggaatattggagcagctccttcatcgatggcgcgtcttcttccagcttcatctctcctttctataactttgaccatttttcaggtaacatgcatccatagtactaggttttagtagagctagtttatatgcttaatgcttaatcattcactcaactgtatgtcgctttacaagtctctctctgtcttgtattgaatttgtaggaaaccaagacaacagatgtttaggtacaatgatgggtgcacaacaagatatacttcatgttcctctagcaatggtagagagtggctatggagaagaaagcaacagttttaatggacaggagaagaaaaaaaagaagatgacgagcgagcagctaaagttcctcgagagaagtttccaagaagagataaagctgaatccggacaggaagatgaagctgaatccggacaggaagatgaagctgtccaaagaactggggctgcagccgagacagattgcggtttggttccagaacaggaaagccaggtggaagaacaaacaacttgagcatctctatgaatcactaagacaagagtttgatattgtctctagagaaaaggaattgctacaagaagaggtaattactccagtgatcaatactaacttaataaataagctttcgagttacaatccattgagttactttcactttgtttcaacagctaatacaactgaaatcaatgataagagaggatagttcatgcaagaagaaacaaacctgggaaaaagcctgcagctgaggcaatagtatataagttccacttcagttatatctccaaaatggctcaaatttgtagctttagtcccaaacaagcaacaatttctatggctgattctgttttcctttgtattaagtattgtttaagtgattttcgtgtaaagggttctttactaagttgaagttaatgaagaaacatcgtgattcaagaactctagatccataatcaatgcttaaccaaagctcaatttagctcagaccactaataatgtcctagaataagccaagttgaaaattctatttagcagtttttggatctacgagtaaaacacaaggggattgataccaaacaaaaagttttcataaactgaatatattagatctggtgcaaaactaaaaaatggctgacaaaacaaaacaatgtcaaaacaagaaagaaagataagtgaagagagaagagtgggctactctatagctccattcaacgtctgcctccaccaccacccatcttagcagccttgggtgcagcactcttggggatatttcccttcacttgtgacttctgttgctttgatgcatactcgaccttctttgccttcttctcgtccttggtcttcttgattctctccttgatctcactgcataatcatcagattagctttgaatcaatcacatttcagtttcaaaaaaaaattgatgtatatagtgactgtcttcgggaaagaaacaaaccgtagggcagcttctctagcggcatcacgaacttcaggcttctctgctcgcttcttctgaataacctccaaagtagcaccgacaatcgaccttgagtaaggcttcttagttgcacgtctccttctcttcacagcctcttgtgctgcgtcctgtaagaagagagaaaacaaagatcacaacagaattcaatagtactaaatcatgaaaacaagaagcaactaaaaaaagaaacattaccttcttgtgctgctttcggtacatagcagtccagcaaagcttagatggcttcaacttgttgtggaaatacctcttacatttggagttgagaaacaaaaacacctaatacaaccataaaaaccaaagatgatttaatcaatacagatacatagtaacaacagataagactcttcttaacaagtagagcacacatttaaccaaaataaagtacctgagagtccgatcggataaatctgatccctctaccagggtaaattttctggccactgaatcggcaaagctcagtcctacaatacaaagataatcaatggtttagtgataatccaaaaccaaccctggtcacaatcacaaacagtcacaggacacacattcaaagccatctcattttacaatgtcctaaaagcagaactagtaaatggctaattagatatctgcccaatgagagaaacaatacgattcacaagagtcacaatgatttgaaacagagaccaaacacaattaattcaatgtacagaattacaaacaaaaatgttgcaaagtgaagggaaacaataagatctagttattgccgaacacaagccatatctcgtaccagaaaatcacaatttgcagacatttctgatcgggaaataaacagatttgaaccaaaagaagctcattttagcaaattggcattttcaacagtagcaatattcacatggatcattagcaacaatgtaaacctatgaacagagaagcatggagaagagagatatagagaagagattgattacttgagaaccatggctccgccgcgctattactcttttcacttgaaaccctaaaaaatctgttttctagaattacgaatctatttaaggcagatgaattcgcctgagccctagttttggaggagtttaatgggccttttagccgaaattaaatgtcttggcccatgaaagaaatgttttagttaaaaacccattacacaaagatttgatggcctctaataaataaaaaatgatagttagtacagtcttaataggaccaaatgttgtttggcttggacttccatatctcacatgcatcattttttgtttgtttcgaatttgacgtttaaccacgaacaatatatcacaaaactatacataaattccaagaaaaaaactcacggctaaaatggtatatggaccaagatgatccgcgaatcattccattgcaatctctcttatcattggttgacaaaacttttggaaccacaatacttaaatgcttataaaatttaatcactcaagtgggaagacgatgttgtggttagatttgtctgaagatgtctttttctttagtcaactgtctcaaagttgcctttgttgttcaacaatcttagccaagtccaaatcaattgccctccttcctccaattagaaagattaccaaaacatgttctgttttcttgttgtagttacattgaagatgtgaatagaaaaagacttccatttttattttatctatcgtctcgcaaataataatacaacgtttgaatacaagcaaaacacaatgacaacaatttagacaaactctatttctgaagatggtcaactatgtattgaccaagaacagagcacaaatgacttggactgcaagtaaaacaatctaattttataacttctcacaataatggtgttggacaaccgaaattgtccagtaaatgaaaacaaaacacttgaaatttttgttcagatagatggttgattcattgactgctgcagaatcctaagaatcccatgaattcatggttatgtatcatctttatgctcttctctatcccaatcactcccattgtgagagcacttgcacaaatgactcctgagagaacgaaaacgattatggaagctcttctcaggatcgccacgagctttcttataaaggattgtccccaaaaaccggcaagaatcgataccgaaatcaagtacattgctgtcaatgaaacaaaggtcaatcatcagtttcctttttattctgctacgacttctaaatgtatctcatgttgtgtgttagagatcttaccgtatggtattgggaatctcttgaggagatagaactcgactacggataaggacgaagaaaacatcatcacaaaggtagctgttgcgctagcaacctgtgttttaaccgttagataaaaatgaaagacacaagatgaatgattatgggttttacaatcatatatactgataagatggtgtgtttacctgtgggatgactccaatctcaagaagcaaaggcccgagaacaaatccaccaccggatccaaggagaccacctacgatacctccaatgagaccacagagaccacagaagattagactcagaggagtccactcaatcgtagcttcacagatacattcagtgttgccactgtttaacctctttttgttcgctgtatacaatttgcttgcttcaaacccaaacaccgctaaagcaactgggaactacaaagggaaaattgttccgaatgacttgatttagcgagagcacaaaacataatcaaaggttatctgcgacatatatatgttacctgtacgatgaatagtatccaatatattgtgctgcagacctttatttcgttctgtataaacccacgagttccattgatgagagctcaacataaagattattgagaatgcttagacgaagaagaagattacttgccttgacaatttgaatgagcaagaaagtcaaccacacagttactagaattagaagccctttccatttgaggttggagcgtattatttcctgtaagtttttaaatctttatgcaagtctgaagagccaataagttaagaaaatcatcttgcatacactcttaccagctctgatttttcttctctcgggtaaagcggctcatactctgtatcgattaaaactgaacaagagaatcaacaatgtggtcagtttaagatcaagaaacatgactaaaggaatcaaaagtatgaagctttacacacgttctccccgggaattaaccatattagctcgttgctgcgccatttcgttctgtttaagaaaagccacataaaacattcagtatcacactcacacaacataaaagccacaacttatgatggaagataaaactaacctttaacaatgtctcttccttccacatctcaatgcctttaaaaaaagatctcgaagaagtaccgacgaaaagaatgatgatgaggacagtaatgagccaataagggaacacaacactgagagaaacaccaacagtgataccgagaagaagcattggttgaaagagaagagcaagatcataatctaagattggtacttcttttgtcggatgacgaactcgtacattgtaccaaactgatgatgctgatgctcccattatcatacctttcaccaccaaacaacataccaaattaactcaagcattctctcatgaaagatctatacaatgattgatgaattcattacattttgatattgcagctgcggattttgtatcgaacccgagtataagagtgagcataggaacaaaaatcccaccacctccaacaccaccaacagtcccacaagctgatcctagaaacgctatcactgtagccaacacaagtttccagctaaacttcaaatcctacttacacaatttcatacaaaacaaacaaaagtcaaattccacttttaaaagattcttccaagcttttgggtaaaaggtgtatttttaattaatgttgttacgtaagcaaaatatattataacataaatcaaattaaaaaacaatcaaagactaattgaaaaggactcaagttaatgaataatgacgatggaatattcagaagaagaaaggaagaatctttttaatttaccggccaaattttttcggtggcagagagagaagagagatgatgatgaatagggtttgttgtgtctccgacgtaagaaacagagaagacggcgacggagaaagccacgagaaggtagaggataaatcctccggtgccttttccattccacaatcccattcttctaatacaaaaccctaattggggaagctttgttttcttaaaacgccaataaaaatgaaggaaagatatgaatttttggatgtatctctctggtggtgaagcagagagaaacgtcttataaaagcagagtcggagaggtgacgacgggagatagatagaggagggagggatttaatcaactgttctctggtgtatattattacgatatactttcatttgtcataagtttacacgtggcatgattgtttgggtttggagaattc

SEQ ID NO: 338 - DNA, 92376 bp, Arabidopsis thaliana
gaattcatatatgtcagattggttggttaattaaggtagagaaagtgatagacatttgtacaaatgtagaatctggaccattctctcttttctttttcacctctatctcttactcttactgttcctttctcaactcacattactttcattttattttattcttttatatatactaaaatccacattaattggtcacgtataatacgaaatacctacgttattacttatgtaaatatcttacttatggaaacatacaaggtcatgtgagaatatgagaataataatcaatttttaacaaaaatttcaaactaaataatcaccattaactttttttagctcgttttgtatcgtataatgcatttgctcaacaccgcctattcttaccctcatcgttcggagtactatttgttaccggtcagactaatgaaaccattcatttacacatatatttatcttacttgatagtgaccaattagttacccgaagttaaaaacagaagccctagcgttttcaaccacatttacttatctatatataatgttcctgcatgttctaacatatgcatatagtgataaagatacacccatatcaaacacccaaagttgctcatttccttgtttaggtaaaaaatagtctcttgaaagtgattgttgtaagcagagatagacaaaagaggtaaaaaaaaagaagaagagaagatggaatattggagcagctccttcatcgatggcgcgtcttcttccagcttcatctctcctttctataactttgaccatttttcaggtaacatgcatccatagtactaggttttagtagagctagtttatatgcttaatgcttaatcattcactcaactgtatgtcgctttacaagtctctctctgtcttgtattgaatttgtaggaaaccaagacaacagatgtttaggtacaatgatgggtgcacaacaagatatacttcatgttcctctagcaatggtagagagtggctatggagaagaaagcaacagttttaatggacaggagaagaaaaaaaagaagatgacgagcgagcagctaaagttcctcgagagaagtttccaagaagagataaagctgaatccggacaggaagatgaagctgaatccggacaggaagatgaagctgtccaaagaactggggctgcagccgagacagattgcggtttggttccagaacaggaaagccaggtggaagaacaaacaacttgagcatctctatgaatcactaagacaagagtttgatattgtctctagagaaaaggaattgctacaagaagaggtaattactccagtgatcaatactaacttaataaataagctttcgagttacaatccattgagttactttcactttgtttcaacagctaatacaactgaaatcaatgataagagaggatagttcatgcaagaagaaacaaacctgggaaaaagcctgcagctgaggcaatagtatataagttccacttcagttatatctccaaaatggctcaaatttgtagctttagtcccaaacaagcaacaatttctatggctgattctgttttcctttgtattaagtattgtttaagtgattttcgtgtaaagggttctttactaagttgaagttaatgaagaaacatcgtgattcaagaactctagatccataatcaatgcttaaccaaagctcaatttagctcagaccactaataatgtcctagaataagccaagttgaaaattctatttagcagtttttggatctacgagtaaaacacaaggggattgataccaaacaaaaagttttcataaactgaatatattagatctggtgcaaaactaaaaaatggctgacaaaacaaaacaatgtcaaaacaagaaagaaagataagtgaagagagaagagtgggctactctatagctccattcaacgtctgcctccaccaccacccatcttagcagccttgggtgcagcactcttggggatatttcccttcacttgtgacttctgttgctttgatgcatactcgaccttctttgccttcttctcgtccttggtcttcttgattctctccttgatctcactgcataatcatcagattagctttgaatcaatcacatttcagtttcaaaaaaaaattgatgtatatagtgactgtcttcgggaaagaaacaaaccgtagggcagcttctctagcggcatcacgaacttcaggcttctctgctcgcttcttctgaataacctccaaagtagcaccgacaatcgaccttgagtaaggcttcttagttgcacgtctccttctcttcacagcctcttgtgctgcgtcctgtaagaagagagaaaacaaagatcacaacagaattcaatagtactaaatcatgaaaacaagaagcaactaaaaaaagaaacattaccttcttgtgctgctttcggtacatagcagtccagcaaagcttagatggcttcaacttgttgtggaaatacctcttacatttggagttgagaaacaaaaacacctaatacaaccataaaaaccaaagatgatttaatcaatacagatacatagtaacaacagataagactcttcttaacaagtagagcacacatttaaccaaaataaagtacctgagagtccgatcggataaatctgatccctctaccagggtaaattttctggccactgaatcggcaaagctcagtcctacaatacaaagataatcaatggtttagtgataatccaaaaccaaccctggtcacaatcacaaacagtcacaggacacacattcaaagccatctcattttacaatgtcctaaaagcagaactagtaaatggctaattagatatctgcccaatgagagaaacaatacgattcacaagagtcacaatgatttgaaacagagaccaaacacaattaattcaatgtacagaattacaaacaaaaatgttgcaaagtgaagggaaacaataagatctagttattgccgaacacaagccatatctcgtaccagaaaatcacaatttgcagacatttctgatcgggaaataaacagatttgaaccaaaagaagctcattttagcaaattggcattttcaacagtagcaatattcacatggatcattagcaacaatgtaaacctatgaacagagaagcatggagaagagagatatagagaagagattgattacttgagaaccatggctccgccgcgctattactcttttcacttgaaaccctaaaaaatctgttttctagaattacgaatctatttaaggcagatgaattcgcctgagccctagttttggaggagtttaatgggccttttagccgaaattaaatgtcttggcccatgaaagaaatgttttagttaaaaacccattacacaaagatttgatggcctctaataaataaaaaatgatagttagtacagtcttaataggaccaaatgttgtttggcttggacttccatatctcacatgcatcattttttgtttgtttcgaatttgacgtttaaccacgaacaatatatcacaaaactatacataaattccaagaaaaaaactcacggctaaaatggtatatggaccaagatgatccgcgaatcattccattgcaatctctcttatcattggttgacaaaacttttggaaccacaatacttaaatgcttataaaatttaatcactcaagtgggaagacgatgttgtggttagatttgtctgaagatgtctttttctttagtcaactgtctcaaagttgcctttgttgttcaacaatcttagccaagtccaaatcaattgccctccttcctccaattagaaagattaccaaaacatgttctgttttcttgttgtagttacattgaagatgtgaatagaaaaagacttccatttttattttatctatcgtctcgcaaataataatacaacgtttgaatacaagcaaaacacaatgacaacaatttagacaaactctatttctgaagatggtcaactatgtattgaccaagaacagagcacaaatgacttggactgcaagtaaaacaatctaattttataacttctcacaataatggtgttggacaaccgaaattgtccagtaaatgaaaacaaaacacttgaaatttttgttcagatagatggttgattcattgactgctgcagaatcctaagaatcccatgaattcatggttatgtatcatctttatgctcttctctatcccaatcactcccattgtgagagcacttgcacaaatgactcctgagagaacgaaaacgattatggaagctcttctcaggatcgccacgagctttcttataaaggattgtccccaaaaaccggcaagaatcgataccgaaatcaagtacattgctgtcaatgaaacaaaggtcaatcatcagtttcctttttattctgctacgacttctaaatgtatctcatgttgtgtgttagagatcttaccgtatggtattgggaatctcttgaggagatagaactcgactacggataaggacgaagaaaacatcatcacaaaggtagctgttgcgctagcaacctgtgttttaaccgttagataaaaatgaaagacacaagatgaatgattatgggttttacaatcatatatactgataagatggtgtgtttacctgtgggatgactccaatctcaagaagcaaaggcccgagaacaaatccaccaccggatccaaggagaccacctacgatacctccaatgagaccacagagaccacagaagattagactcagaggagtccactcaatcgtagcttcacagatacattcagtgttgccactgtttaacctctttttgttcgctgtatacaatttgcttgcttcaaacccaaacaccgctaaagcaactgggaactacaaagggaaaattgttccgaatgacttgatttagcgagagcacaaaacataatcaaaggttatctgcgacatatatatgttacctgtacgatgaatagtatccaatatattgtgctgcagacctttatttcgttctgtataaacccacgagttccattgatgagagctcaacataaagattattgagaatgcttagacgaagaagaagattacttgccttgacaatttgaatgagcaagaaagtcaaccacacagttactagaattagaagccctttccatttgaggttggagcgtattatttcctgtaagtttttaaatctttatgcaagtctgaagagccaataagttaagaaaatcatcttgcatacactcttaccagctctgatttttcttctctcgggtaaagcggctcatactctgtatcgattaaaactgaacaagagaatcaacaatgtggtcagtttaagatcaagaaacatgactaaaggaatcaaaagtatgaagctttacacacgttctccccgggaattaaccatattagctcgttgctgcgccatttcgttctgtttaagaaaagccacataaaacattcagtatcacactcacacaacataaaagccacaacttatgatggaagataaaactaacctttaacaatgtctcttccttccacatctcaatgcctttaaaaaaagatctcgaagaagtaccgacgaaaagaatgatgatgaggacagtaatgagccaataagggaacacaacactgagagaaacaccaacagtgataccgagaagaagcattggttgaaagagaagagcaagatcataatctaagattggtacttcttttgtcggatgacgaactcgtacattgtaccaaactgatgatgctgatgctcccattatcatacctttcaccaccaaacaacataccaaattaactcaagcattctctcatgaaagatctatacaatgattgatgaattcattacattttgatattgcagctgcggattttgtatcgaacccgagtataagagtgagcataggaacaaaaatcccaccacctccaacaccaccaacagtcccacaagctgatcctagaaacgctatcactgtagccaacacaagtttccagctaaacttcaaatcctacttacacaatttcatacaaaacaaacaaaagtcaaattccacttttaaaagattcttccaagcttttgggtaaaaggtgtatttttaattaatgttgttacgtaagcaaaatatattataacataaatcaaattaaaaaacaatcaaagactaattgaaaaggactcaagttaatgaataatgacgatggaatattcagaagaagaaaggaagaatctttttaatttaccggccaaattttttcggtggcagagagagaagagagatgatgatgaatagggtttgttgtgtctccgacgtaagaaacagagaagacggcgacggagaaagccacgagaaggtagaggataaatcctccggtgccttttccattccacaatcccattcttctaatacaaaaccctaattggggaagctttgttttcttaaaacgccaataaaaatgaaggaaagatatgaatttttggatgtatctctctggtggtgaagcagagagaaacgtcttataaaagcagagtcggagaggtgacgacgggagatagatagaggagggagggatttaatcaactgttctctggtgtatattattacgatatactttcatttgtcataagtttacacgtggcatgattgtttgggtttggagaattcgtttttgattcttatttaaaattctgaggctgtaatctggtcttgttctataacccattccataagttaaatgcaaataaaaggaaatacgtttcaaaatcaaagttttttttttattatttttttttatttttgtgtattatgaataaggaggacaaacaatcaattaagatagaataaaattcttttataatcaaagttggaactaatcatgactagcgattacaaaaactgttatgtaaatagaagcgtatagactgtgtaagccatataattgtcgtatcatatacgttgaaaatacaaatggttggagaaagacaatttgtatatcatgttctttagtctttacatttggtatagtttgacgaaagcctttattagtagagtggttctacctctcggctatcatccagtcactttgtctctggattcgacgtatcctttgtagagttcttgtcgcgtcccttgcagagctaaaataagggtcacaagtggaccagacaacaacaaaatgatcttatagttccaataaaaccttgtaagtatatgtcaattttataaaagaaatatcaccgtcactagggacgtaccatacaaattttactaagccccaccacacaaatttcacaaccccttagcttttctatgaaattttaatcaaagtagtacaattgccaaatctttgttccaaatcacttgtgtttgtgaaaatataatcaatgtttaaatctagtaaaatatcccaaatactaattgatataaaaaaaaaatctattaacttccctggcttgatataaactcatgttgttttgtgatttcctaacattatataatgccaaatgtttataactgaattagacatttgaaagttgcaaaaattaagatggccggcgtatatgcaagaacaaaagtaaactcatatgttttgggatttcataacgtacgttatttaatgtcaaacgtgtaaaattgaactagaacttagtaagttgcaaaactaatgatggcatatagacaagaagcaaacaagcccgatgtcagtgattggaaggatttgatccacaagaatatgcaaaaggagaggctaatcgaacgcatgtggtggttggtctcgtccatgaacaagacgtcctttattattgtttccaatgcgtcttcttatatatgtaacgccaataataatatgtcccccaacaaatccgtgattgtaattcgttggagccaaaagaatatctcacatcgacgatatcaaatcacaaaatttacgttagcatttttggacttccagaaatacaacgcaccgacaactattcctgtggacaacaaaaaaatacacatcaaatatttttcctagcacactgctataccaaaacaagcttgtataatatttggaattttggataccaaaaataaacactccaaattatcaaaaaaaaaaaaaagttaatatatgtttgttttatggtcagttcaaacttatgggaaccattggtaactgagtttactcgagtgatttagcatagtaaccaatcctcttaactgaagaaagctttcctattccaaaacaagaatacaaacatagaaactatcagaaaacgttatctgctataacagacgtatccaaaacaaaaggcccaaaaaacaacagagatattcatccagaacaaaaggcccaaaaaacattgtcatttttctagtattctcacagctttcccttatctttccgagcatcatcatccatccgtccaacgtcgttgaatgtttgaccggtcatttgatccgacgccttcagtgaagtcgccaccttacccggctttgaatcctcgaccttgacttcaaccacagtcctacccgtccctccatgctcacgtgccgcgcgtgtttcctccacaatgtctgatggcattgtcagtttgctctttattgcttccgttacattccctaatgcaccaaaaatagtccctttcgcttcatttcccctgcatgatttaatcacatcaaaaaacaaaacaaagagtttcacagtcacctttaaacttgaagaacatgacaagatataactggcatttcatcatttacctcacggcagcagaatctttggtctcttcggctttttgagctcccgactcagtactctccctagtcttttgagatgcctcttgggcttttgctccagcttcttctttgagctctttaccttccaatctcatttcctccatcttttgtcttgttacttctccagctttctccatgttttcctatgttatcaaaacatcacattatatcaaaccatttgacatatgtaatcttcatttacatggaaacaaagttccaagaaattataccttggcagtatctttggtctccacagcttttcctttggcctcctctgtcttccccgacaagaaacccatagctctcttcgctgtctcaacggcactatccttcagctctcctagcttactcaccgtaacatctttcccctccgtcgccttctccaccgtatagtccttatactctccagtcttctcagctgtcttatcctttgcttcaatagccttctccgctgtgtaatccctagcttccacggccttgtccaccgtgtaatccttatactcaccaaccttctcagccgtcttgtccttagcctctttagccttatccgccgtataattcgcagtctccttcgccttctccgctgtcttatctttagcttctactgccttatccaccgcatagtctttgtactcaccaatcttctccgccgtcttatcctttgcttccaccgccttatccgcagtataattagcagtctccttcgccttctctgcagttgtgtccttagcctctttagctttatcaaccgtatagtctttatactcacccaccttctccgcagtataatcagcggtttccttagctttctcgacggttgcgtcctttgctccaaccgctttctctgaagctatctgagctccttctttggtagactcagccgcttcgtgggtttttccaactacagcgtctctcgcatgctcatacgttccttggacagccctgaacactgatcctatcacaccgggcctatcttgctccggtggatgttcagttgttctctccgtcaccttatacattgtgacatcagcaccaccggatttgttaatgtcatgcaagtcctcagccgctagcctcgccgcaacctcggctctctccgccttttgtttgtctgacgccattgcttttttctcgattgcttgaaaattgatgaaaaaccgctttagaactttacgattttagaattctttaacttgtgctatcagttgagctgcttttgttacttcttatagtaatgctctgtttctgttgagacgctacgtggtagatagagggacgcaacagctgccacgtacaatttacttagctttatcttctacggacgtggtatgacacgtggacttttcatgcatggatcatgattcttgagtgttcatggcatgacttaagagctaagacataagcaagcaagcatcgatggtcggtcgtatcaaatcttttgatatcataatttgtgttggtcgaggaaaatgttaggtgaagatcacattcgccatttcaaacttactgaggcacataacttggaaacaagcaatttagagatatgaaagattacttagttattgccacacagtttattggaagttattgcctcaacatcaaaaacttggaaacaagcattttagaaaaataaggacgcaagttaatcattggatagagccgtttattgatcaagtcggttatcaatataattttgagtttttgacggttcttgggagggtatacaaaaaagttcattgcaatagtttggatttatttccaaattttctctaatttgccagctaattcaggttagcacatgagtctattgtcttaaccgaatagacaactctcttttttgttaaacatctctattagtcaccttaactttttttttttatcaaaaataaataaatcacgttaatcatgttctcacatagattacttttatacttaattaggtacgtcctttttttattatttctccgacaactttgttgacgcgcatttgatgccgaatcatccaaatcggtcacgttttctacatgatttgtcgtaaatatgatatacactaacgtgagtaccttaagatctcaagtatatagttaagatcagatcaaatcagaaacacttagtttgagtttcgatttgatcaaccatataacaatatatggaacttctagctagcatcatggctttcataatgtgtaggtacgtgtgagtatgagtacacacgtacgtatgtcgtgtaagtggagaatccgatgcccaaacgagtaagcaagcaaaagcaatggtcaaaaagcaaccgatctcaattaattatcttattgtaaaaactcaataaaaagttaagggaaaagaataatcttacaagacatgtatcctccacaacaaaaagaggactgtataaaactatttttttcatgagaccaatgattcgtataaaccatttaaatttgatcaaaccctcacaagattgatcaatcaattctcgagtctctgtttcggtcacataaccgaaaggaaacttttttagtcagaaagaaagatttttggagttgaaagcaacataagagattaatggatggttcagctggtccaagagatggaggagctatgaagccggtgattttgagagtttgtgttgctattgtattatcagcaactggtttgattttggctaggtttgtgtctcggaatgaagataacgaggtaacttcttctacaagtaatccagagtcttcttcatcacctagcagagaaaacgacgaggaagaagaagcagagagtccgaatcagcagaagcaagagattctcagcttaaaatccagattcgaggagcttcaaaggaaggaatacgagatggagttgcatttcgagcggttttgtaacttgaaagatcaagaagtcatgcttattgagcataaaagcatattgagtcttgagaaagctcaattagatttcttccgtaaagaagttttagcgatggaggaagaacacaagaggggtcaagctttggtgattgtgtatctcaaacttgtgggagaaatccaagagttgagatcagagaatgggttgcttgaggggaaagcaaagaagcttagaagaaaatcaaagcagttataccgtgttgtcaacgagagcaggaagattattggcgtggaaaaagagttcttgaagtgtgttgatgaattggagacgaagaataacattgtgaaggaacttgaaggtaaagtcaaagacatggaagcttacgttgatgtgttgcaagaggaaaaggaagaattattcatgaagtcgtcaaattcaacatcagaggttagtattgaataatgagattctagatttaatgattcagtttcttttatgttgattgccatttttttgttttgagaagatggtgagtgtagaagattatagaaggatagtagaagagtacgaggaattaaagaaggattatgcgaatggagtgaaggaagtgattaacctgagatggagcaatgcttgtttgagacacgaggtgatgagaaatggaaccaactttggggaaatcgtgttttctccaaatggaaacttgcatgagctgggtttggaggatgatcaagtggataatgctctggcattgatgagagtagctaatgagcaacatgaagagaatcatcatcagcatgaatcttcgaggaggaagagattgatgaagaagttgaagaaatgggttgaaggaaatgagaaaggaaaatcaaaagcagaagaagcagaagaagcggaaggcactatttgacagtggaacctgaagaagaacgaacatttcattcaagaaggtcttgttctagtgtgtaatagcattgctttacaaaagaagcatgttcatgaattattcatcatttctccacaactaacatagtcattgaaatcatttctgaaactgtatttcacacgaaaataaaaccaaactagaatagcaatccaagaactgaaaccaaaaaaagaaaaagagaatcccacaagagtttatgttgcaagtagcaaccgaggtaactagtttgttttccactttgttcttcacttaatcgaaacgccagcaatgccagacgccaagtaatcagaacgatgagtgtttggagcggtcagatttgtcttggatgatttcagaacttcaaacgcttcatcaactctaacagccaagtcttctggtgatttcagcaaaagaagcaattccgacttgtccatttccagaagcatccctgtgattttgtttgcaagctggggctgcaaaagaatgataagtacagtcactgaatatgaatatagtgttaatcaacattaccaatcgtatgtgactatttacataatgatcagattcaagaacaccaacctccagtttctcgacaagagggtgtagcaactctccgagcaattgcatctccatcccaactgtttcagactgtctctgttggattgatttcttcatttctttcccacgaccataggttctgctatgctgcatatgctttacaaaagttataatttgaacctcttacgcaaggtatatggtaataagtaaaccaaattacctgctgcttcgaaaaatctcttgacaaaggaagcatttgagtagactgatacacatttggcacatacgaaacagcattcctatccaactttcctattctgttctgcctattcttacttggcgcattagcaacctaccagatatctttgtgtcaaacattatcattatgaatattctttcgatatatagtaattctaagaatatataccattgggggatatgtgactgcttcagagtttgggtatgatgaaccaatcatgttagcagacttccacatcagcgggtatgattgatataccatcccgggatgagtgtttgtgtagtaaagtggagcgtatgtccctggattgacagaagctgaagagctgctttttctagcttccacacggttcccaaattgaacctgtaactgcatctttctgtcctctttcttttgagcaatagccacatatagtggtttcccgtgaaacatttgccctacgaagcatgaaagaaaataatcatatgataagatgaaccaagagctatgtcataattccatttatataccaacaaattatgatcatgcggcttaccatgaaaggttttcacagcatcaatagcttcttcaggtgttgagaagcacacaaatccaaaccccttgctttttcctttctcatcacacatcagctttgtcgaagtgattgtgccacattgactgaagtgttttctcagctcctcctcagtaacagcaacattgacgtttttcacatatatgtttgacaccttcaattcagaaagaaaaacagtcaaccatcagaataatatcatatcaaagtatcaaactaacaaaggttttcataataccttggctatcatcttctgttcttcatgtttctctttaaattgttcccttagcagttgctcccgttctgctttcttttgcgcccttcctacatatagacacttcgaacctatcaagcagaaacaaagggttaaataacttggggaagacttaagtgaatattattgtccgaggaaagaaacagatccgtcagaccaaattttgttccattcactgtttcagctgcccgtcttgcatcctctgggttgtcaaagttgacaaatgcatatcctctacataatcggttctcatcttttgcaattgctaggctaacaattttcccaaactctgcaaacttttcccttaaaagatcctcactgacatctgcatcgagattcttcatgtacaagttcgtgtacttttcctcaggtttcactcgatcagtctttttcatgaattttccaacatagctgcataaaaaaattccagagattcagatttggaaaccattggtagaacataatggtagaagcagatatctcatccaaagacacaaatcgtggaacaagtaagtaggaaagccttacatctccttgtcagcaacaatggtactattcaaggtctgaatagcagcatgtgcagcgtcttcttgctcaaattgaacaaaaccatatccccgactctttccatcttcaagagttgcaaccttacaggaaacaatgttcccaaatttcttgaacatatcttgcagaaccgcattggtgactgactcaggcaaattctagccaaataaaaacaataacattaacaacagacattgagaatatcatccatctctttgggttaagagtactaccttaacaaagacatttccaaccccatttctcctagcatcaggtgctcgaacagaccacattactcgaatcatttttccattcaacaaactgttattttttttctcaatggcaaggttagctgcaaagttgaagtaaaagatactatcaaacaaactgtcactaacatctttaaacatcaacaacaggattctttaaactaaatagctctaatcaaacgtaaatctcagtgaaaatatcagaaatcaaaggcataatcagtttacaacaaacatcaaaataagattcgtctccctttcacaacaaatcaaagagaaaatcagtgaaagagaagagagtgacattttcccgggaaaatcggccaaataaacacagattcttcaccgattatcaatccaagtgtgcaataagcgaagcatgatacgaaaacgaagataatcaacgaaattcctcacaataacctaaaatccaaacgaaatcgaaggtatggaagaagagtataccgtcttgacgcgagagaaagttagcgtagccataacagagagagcgaccagacgaagcgtctttacagagacgaacagaagttaagctcttgaactcggcgaacgcgtcgtagagtataccttcggtgacggaagggtgtaagtctccgacatataacgacgccgtcactggagaactcgatcccgaagaagaagcatccgccgcatgtaatgcagcatgaacagtcgccatttttgctctgatacctcaaaggaaacacaaacgcactaaacgacgaaagaaagaaagagagagagggagagaaaaaaagaaagaagatgatgacaagaatcgcgaaacaaggccgttacgttagtcctctcctgagctttatattattccgttcagtagcgtttttgttctggtggcgtttcgtcgcgactcgtgccgtttcctttacatgattttgttttgggggacatttttgtaaaagcaaaatctgaaattttgttacatttcggagtaagacagtattacccttatatgctactattaaattcacgcccattttagtttcataaaacgtgttatagagaattatctattttaagtaaagttttggatagattcttaattgtaatgctaaaatgatttgctttggtaattgtcgtttcatcattcatgcctgcaatattatagttataggccacaagtaaccatattccttcacaatgagactgatctacagttaaaaggcactactactacactactctaaaacaaacccacataatctatcaatttacgtcaaggagaagaagatacaaagaagtaaaccaaataagatgctaaagaataatcgtatgagtatgtctcttgttgagatgttcaaacatggctgccctgagtttacaatatcctttcctgaagttatcgatacattcacagacattgaacctgtcaaaacaatgcacaagtttatttcagatgaagataaccgactactagagtttcctatatgacatgactctatgattacacttacaatcatagcttgcccatccaatccgttgtcgagcaagatcatatacaaagactttatctttaagcacaagatctgcaaaataaaacaggacagataaataaacactgttgaaacaagaagaggcggtaatcagcagtttttgaagctcaatgtctgacctcctaaaatggtttgttcttccggagctttctgaaaaccaatgcaccacatggacgcaccatcctgttaagataggagaggtcaagtaagaagaatacatataaaagcagactactttaattctaatagttttatgtacatataacaagcagaagaacttacatagataccgtaatgaaataagtagtcctgaggtcttaacatcattgatgcaccaccagcaaagttgagactaactgaaggaaacatgtcacttatgctgcacaagcacacataaccatcacaactctaatcttaactttgatctagagagaaaaaggatttgaacaatgcagttatatatgaggaggcatacctagtcgagaccaaatagcactgctctccattagaaattattggtgttaccaactgtgacacgctgtttgatatctgcatataggaaacaaaaaccatcatgatgtgaaagtcacaacctcatgcaaaacacacaagatatacaaaacttacagcattgagaaaaagatcataagcctctttcaccagatatgtcaaagtggttcctgtgtcaacaatagttccacgggtatttgatgcttcaaacaccgctgcatcgagtggcagcatctgtccattcacgccaatgctcagcagatttaagttatagtgaggtctgtagtacgtaatcaaaagataaacagattcatcagtatcgcatgccactcaacaattttatagaaccagttagaggcttagagcagtaaaagattgactcaatcgggaggcaataaattgttatgaatgaaactggttaactcctgtattcaatttactaaagaactacacaatacagagaatctttggttcctggcccaagtccctatctcaaatcctagtaaacatcagaatgccccagctggttctgccaactttctatttaacctgttagctctctagttaatcaactcaacgattgttacttagctgacaacacagctacaatcaactacaaaccacctccgctacatataatgcttatgcattagactaaaacaaagacttatcacagtttcaggttgtgccagtataatacagttaaagaaacaatctaagagtgaaaaattaaaaagaaggattagtgagcttactgtgatggaacgagaggactgtaaaccattcctgggaccaatatctcgccaaggacaaagacaccacctccactaccatctcctttcaagcaatgagaaaacactggcggcgtaatccctcgtgatgacaactgagagacaactgacaactttcccttgccgaaaccaaagattccatccactgctttgtctgactttgtcaagtccccagattggtaggtactacagctgttgcaaatagaagaaaattatgtacaaagtttaagatctttaatatgccatatactctacatgcaaaaacatggctagtgtttgagtagaaaaagttctcacccgaaaacaatgggagcagatgagtttgcaaccaaagactctcccaaaatcgcatcaaaatagaaggtgtcagtcatgtagtaacctgaagtcccacttccatcgccatagcgaaaggagtaaccacactggttattctcagaacattgtgcagctgtcgtctgaaaaactgaagaacaaatcggatctgaacaagtaacagagccagcagtcaaggaaccaggagcatcaaagaaatgaaggtcgatctgaaatgaatttgaaatagacaaaggataagccttttacacttgtctgtgctaatcccattatttcagtaaaaaaacttagacaaagctacttactccaagtccactagagtgagggcaattactgcaagaactacaagtaacccacaagatgtcacttccagtatcaatctgaacattgaactctgtaggaggagaacctaatttgacctttgtgaaataaagcctaccaagaaacaaaatacagctacatatcacaaaagagaagataataaattccattagaactccaataacagagtgtgtgtgcaaatgtgacatacatagtcatcttggagctgcaacacaaagaaaaagaaaggagacaaactcaataagatctccgtatagatatcatttcaaaatctactcttttttttccaattcaaaaccttctaataaagcataaggcaaaataaaagccaaaggataaaggaacaaaaaaggaaagataataaaaactttgaaaccctaaatctttcagtttcatcacagaatttaatgaaaacgatcttaactcaatccaattatggaaacaaaggaaagaaacttctgatttcagcttaaaactaaaaaaagaaacattccaagatgaaattttttattacccgacgaggtaaggatcggaagagccttgaactgggaagtcgacgacgccgccaacagagctctgacgaccaccgccgagtaagattcgcgcgtgtctgacacgatcacgcgctctaagttcactcagctccactagctcgtctagaggaaaagccctttgtaaaggaagaatcttggtcggaccagctgcgtatttcgcataggccgaaggtaacggcgatgctgcaaaaccagtcacggccaaagccactgctagagccgccgccaacattagggaacgaagggtacgcattcaagcagctcgtggagattatggttatattcccgatgaagacacacgttccagagagcgacacaaatgctcgattcttcgcatcgagcagagagagagacagaaagaactgtcagagagagagagagagagagagacgttctcaaatgttttagcggagatagtggggactaatgaaatttatatattccaaaattattgatttcggtttagtttggtttggttcggtttagtttcgattttatgttcaaatctagttgtttactattttaaattaacgattggtatattgattcctctatctgctttctctgttttactaaatttcctcaattatagatgcagaagattatgaaatgataaaattgagcatgcaaaccgggaaattttcttaaacaagggatcaaccaaattgtatatttccgctattatttattgtgagaactcaaagtttcttatacgcaaatctttagacaaattttctgagcagtttttagggtcagtgaggcttaatattattagtcaccactcgtaagaccaccttcgaattaactacaaaattatatgaatgagtaagttaagatatggtttacttatattatttaaaattgacttgtaggtgagtcgtgctagtcttcatgatccataaggacacgtcaaagaatgaatgaggctttggtaaattgtggtgtgagtttcctaaacaaagacaaaaattggacacattccacgtcatctgaacataattgtgcatttccacacccaaaccaggacgaaccaataacaaaagattcaaaatcagaaagaactatagaagattcagattcatagagcataacatgattatgtaatacaatgatatatattgatctcgtatatagatctcgacttttaaccagttttgtttacttacacatcgaattaaggtcggaagcaaaaaaaacaaaacgtgtaagtttgttttcagccaatagatgaagttttagcagcgagatgaatcaaagcccgtcgatgatacttgcttcttagctttttgtatttctgcacaaatgcagctgtgtcaatatccttctccataaacttctgttgcagctcctctgattcttcatccacctggttcatagcatctgcgataaacaaacccgggattgtgtattagaaaccgacatgtatcattttgttgttacacatgaaggatattgagtgaagcagctaatggttttacttaccttgaagtctatgaagaagagaacctggagagtagaatttgaggatctcttctctttgattctcaagctcattgagcttctcttgagcagtcgcaagctcggatgtacggattattctgcactgtttttaaaaagattatacaaatggagagaagtttcatatacttaattaactcactcagagattgaatgatattattcacttggtttctgagctccactatctgtggttccttctccaagttttctcctgttatattagcatgaatgttttagatctcgcaatatgaatataattgtcatcgtcaaaaaaagtcatacaagaactcactagctagatgtaacgtttctttgcgaagctcttctctgatctaatgaacatataaagaaaaagcacaaaactgaatcatctcaaaaacgtaaataatgaagaagctacatttcttaagacaatagatgatttttacatcatgtttcccacttacattgttttgaatagtgacctggtcaagcgagtgcagaaactgttgatacgcatccttgtcagagagaagcttcctaagctcatccacactaagagcaaaacatttgaagaacatcataaatgagtaataagagtaagcatacaagataacataccgacaagtacagaaatcaattccctttatatatctctgcaaattagtaacacaacgcaaaatcacaagagactatcagcaaccaaactatcaaaaccacagaaccagtaaatctagtgtttggtctagcgttaatctaaactattccaagcctaaaagaccataaattcatattaaagatgacaagaaatgtgtgactgtgtgacacaagaaaactgttatacatcatgtacaaaagaggcaaacaagaaggtataaggaaattgaagactaaccttttgtcttttaaaatggcaataatgccggcggcttcacctggtgaaacatgtgatggaatctgccctgaggtttgaggccgggatgagctaggagaggtgacaagagacggcgaataccacggtgttgcagaagcttctggagaaggacgagattgtccttgttgctgttcttttgatcccctggatttttaacacaacaatcttaaaaatacttacctgaaactgttccaatacccaatatactaacattgcaaaatcttaagacccagcacaacttcatgagcatagatcaggttcttttaatgattacaactaaaatttttgttcaccttaactatgttagcagcaactaactataagagccatcaatggtatgcataaaacagtaagtaactaacaaaaagcagagttctttaatcccaaacacatagaaattgaaattctccaaaacgatcataatcaaaattagataacagcataatcgagctgaggtaaaagagggtaacaaaatcgcataatcacaaaaatcagattcatgaagttgatgttaccagaaattgaacatggttcgtagaatccaccgatcagccaaagtgatgcgatttcgaaaagaagaagcttgctaatcagaagagccaatcactgttgttattcagcagatgaaatgatcgaggaatcggcaaattgtctcaaaatcgtgttttttttttctttttgtcaacgacttttcttcttcgtttgttatcttgctaagttataccgttaatgggcctttattattgacccataacgggtggtcgggccgtcagcctaatctatcgtcgtaaatttacttcctttttttttttttgggcaactcgtcgtaaatttacatgctttgcataaatgactgaaatgagcaataacataactttttttttttgtcaaatatataacactagataaggcccgcctaaataggcgggcgtaagatgtaactgtaattttttatcgataatatttaaattttgaatagtaaaataataatctatacattgttcttgatatataattttgaatagtaaaatagtagttttatgcattttattttattatactcattcaatcttattgatgatatttgaagtctaaatagtaacctacacactttttctttattataatttagtatttatatagaagaaaagaacaaatttttatcttacatattcaattttgtaatacaatttaattatctatttcataaaaaactcgattttaattctacacacttcatcttacttgataatgatttcatgtcaaaataatatatatatgagatcaaatctatatcttagttaatattaaaaattattaacaattaacaaaacataattaataataataaaaaatttgttaataccatacatattaaaaatttgaccaataacatatataaatatttttggttaattttccttttggttaagaaaaataaaatgtaatattttttagatatagacatatgaattagtatatgttaataatgatttattttttagttttctatttctttaagaagaaaaaagttaattgatttcttttttagtatttctatttctttaagaagaaaaaagttaattattttcttacacgtgtcaacatctgatcgatagacttgacacatggcataatcctatgagttagtaattttaaaaaccatactttatataataagatttttggggaatagtatgtttgaagtttttgctcaaaaaaaaaaaaaaaagtatgtttaaaattatgtaaaatcatttgaaaaatataatttagtagaaaacttttattcacgtgtttgctagcttggactttatgtgtttccctatcaaatgatctattgttgttgattgacatactagttgaatttcgaaattgtattttatacataatacatctttgtagtcttaaatattatatgtatattaaagtggactttcgaggtgttttgtcaaggctagccatttttcttagtacttgaaaggtctaaattcaattcgcaaaagaccagcagaggtttccatagaattaaattcaatccatttgatttttttgcccccgtttgagaacaaacattacaatggctttcttattctcccccaagaaaaaaattggcaatgggagatataagtgacatttttgttttagctcgacttgattgacttctttaaaaatcaaaatcaaataaagctcaagccagcgtagcttgtccgttttaattacaaaagtttagtctatttatgtgagcccaattttcacgttctttaaacatgtacatctacggtgatctacccattatttcttccattcttccaaaaaaaatgtgtgtttttgttgaaatgatttgcggtacttttttacatgggacagaaaacagaaaatgaaactatgttaatacttaatactatttatgcggaaaacacattgtgaatcgtttaacttattcctttcgattagtttagactttagatctcttgtcttgacaccatatgtaacaactgtgctcggagatttttgtgctgggggtgtcgttttttcacttctcttattcctaactgtggaaaaagtagtgagaacaaaaaaaaatagtatgattttttcaaacgttgtaaacaaatataaatatatagaaatgttggacaataatcatcaaatataaaaaaaactagtggttactggttagaattgagcaataattcaaagatcatgcatgcatttgttatattatgtgatgtctcacattaaatgcaaatgcgaatttgaaaaagaaatgaatgattagttgatctggttttaattgatcgttgaccagaagtacatctgaaagtactgtttccgtttacggacatggccagacctttaaaagcccccattgaatcaggagaccttgtcggcttttaacggtcaattctttgacttctagagatacacggcgtcgtttttggattctagatacaaacacggccatgccggtcagctttaagattggaaacattaacaccgcgtagttttatttgattgggtagaaacaccgcgtaatttaatgatgactaagtcttgcttaacatacataattccacattcgaacactatcaatgaatgtttcgggatatgagctatgatactagggacactaaaatatgatagaaattagaaaatgatggaacgtaatgatataacaattaatgttcagatactggtaaaatttacaacagatatccatgtttggttaaacagtgatttagtaataatcaaatgatctgttgacaatcaccatctatatattattcgcttaataatttttgtataatcaaatttattgccacctagcaatttgacaactaccaaacattttactaaatcgtttttgtttgaatgctcgtgatgataacataaatttagaatgtgttattttggttttttgatttggttttttcttttctaacctaagacaagttcccataatgcacagataaaactgcacatgacatatcgttttttctttctggccaacagcacataacatgatcatgttgaagaagacaactaagaaaatatatgctatcaaaagcggtgaagcacaaacacaaacacaaatcttccccattcttgtataaaatgcacatattttatatatgggtttagttttttattttactaaatgtgagtctaattagtttcaaaacccatgatgtatttaaaactgagaaaatctcatgtcgaaatccaaactaatttatggaactaatagaaatctggttatttatggttttgttttgccattgaaaatgtctacgagtagtcaagctgggaggtgcaagatgtttcttgagaaatcttagggaaatggacccataacaaaattcacaagaaatttgcacacctcaaacagaagtcactagttcactacattgtagtttagaaacccgtacgtgacttttgctggtttagacatttgattaaaattacaaacacaacaatcgatccaagttgaatgaaatccatgaaattatttgcaacttttcactatataatataacttaaatattccttcaaggaactttcagtatctttacgttaaatttttaaatttgagagataagtatcatttatctaaaatctcacaagcagaaatagttgaaagcaaagtttaagacatgaaattggttagtttcgtggctagtcactttttaaaaatagttcacgtatcgttacggttgcaactatgcgtcagcaatatgtctagctcttctaagttttatattaattgactttatatacaataattaaaaactcttcgataataactttgacttaggcaactgttattagatagaacttggaaaggtccatttttctctttaattggagaagatgctaaggtataatgtgcattaattaatataatccctgagacctactttttcattaacttcacatataaaaccatatactaactaatacaattacgtgaaatatataccttatcaacgacgtctttcacgattgtagaagatgtagttaaatcgttcctaattgacacctaacgtctttaaatcatctaatttatgacggagtaactagtagcgaatgaacgacaatatgacaattcatcgctaaaatgttgttgtttattcactaaacagataatctcttttttcttgttttaaagaaaagtaatcgtgtattcgcctacatttaaacactgattaatttctagcacatttaataatttaatttattttgaacaataatagttaacttctttccaacagataaacctatttttttctcacaatacgtatatagctattctttaaatcggaatatctagaaacggatttcggtattataaaagatatggaccaaccaaatgtctaaaagttttgtagatttaagaaaaaacaaataacgagcttgtattgaatgcgaaggaaaatacaaaaggtataaagaaatagagagtctgacgtggcctagaaaaccaatgcaacgaatggagaggaaaaagacgaaatgcatgcagattctatattagtatacggagtatttttcaatataactctcctcctattattatattgaattttgtctctgacttcgatgcccggtcgtcccctaggagctacttgttttgttgcagtttttatttttgtttttgccaaatcacgtaaaagtttaataaaaactctcctactttctggactccaacacttatcttgtgtttaggactctcattgccagtcactagatcaaattcgtaagatttgttcatcaacacaactgtttacatttatcttcagtttcacgcgcataaaaaaaaaacaatgacctgtcaagctaaaatctatttaaaaaaaaaaacaatatacaaaatagattttgctgatactaaaattcataagtcataacaccttagatttgaaaattcaaatggtagaaaaggcgacatcacagcaaaatctgaaaatcaaccctaattatggactacaaagcaaatagactttatagaggtatgtttgagaccttctctaacgacttttacgaaatctacaattcctttccgactctatatataaaccgataattgaatggagattgaactattgaagcatggtgcgcactaaacagtcattaaattggtcgacatttatgaatacatgtgagttttcagttcataaaatgatatgtattaaaaagcaaaattgaattcaagaagtttaacacaaggagtaccatttggcaaaaaaagaaaaaatgcaattcaaggggcactttatggctttatgttacgtccaatagtttttagttagctacgtgcctaaacatggatgtgacgtggatatcgtaaaaccaaccaatgtacaagatgtcgtcgtttgactttcataaaataatatccgatatccgtaattcattatatgttatcattttacaataattatttttttgtcgtaaaaaaatcaatatatattgtaaagtcattacttggggaaaattatattcgttatcaaaatcaagaaaacgatcgtatgtaattatttttcatattagaatggagattactcgcatgctgtattcatcacatttttgtattatttttatcgtcaacagctggaatgcatggatgaaactagaccttaattataatttatatatttgggaagattcgtccaattaaaattttctattattccttataaaacactttagcttgcttacttagttttctaatcatgacaagatcatatagttaacgattttttaaaaaattattattctattaatggtatcaaagctcttatagagcaagagaagggctgatatatgaaaattatataatttcattatatagttactattctgtttcgaatacatatatactttttaaaaaatcagtatatatattggtccagctattttatctttctgataattagcggtcaaccagtttgattactatatagagattttttagaaaatagatttagtattaggattaattttaagaaaattataacaaattgtaggtttatgaaagattttaaatatcttcttatattttggtattaagcattgaaatacattcttaagtgatacttttgatttgtccaagaaaaaaaatgatattttagatactactatttttagcttttgttttttctcacgggctttaaatacctcatcctaaaaaaaattctcaaattcaaaacatttgtgatagtttttgaaaataaacaaattttataatatttttttagaataaagcagaaatttgttttgttaagaattctacttctgtaaattatttttcaaatttaaaagatcatacgttataaatccttacgtatatctacatgtattcaaaggacatgtcacatgtgtattactaaatttatagaaatttgaaaattgtaaaaattatattttattatctgcgggatcgtatatacatgctggtcgatcggtccagacttgatatgtgacgaacacacaaaaataaaacttgaataggatgtaatcgaaagactgttatgaagtaaacatttaaacatatataaatagaatcactatttttaaggaaatttttatatttgcaattttgcaaaagtcaacatatatacaaagtcctattgagttgacccaatcccctcctcaacgggacccaagcaacgaagtttcgcgccaactagttccgtttcagtcaattgcttaaatatcatataacggatcttttatacaccactacgagtaattttatagaaaaattacactgaataaacgaaaaacataggcaacatgagccattttttcttattatgaatatgattttttttttttggggaatccgtttaaaaaaaaaagtagtcttgatcacgaaatttcttcttccacatgtttatgtatatatgatcacaaatgacggaatcaaagatacatcatttagacatttaccattaatttcaaaatatttattttcctcgctacaaaatattctgtattgacatattgtcatcaaatatgcatcatttaccatttcaacatgtttattttcctcactacaaaatattctgtgtcgacaagtagtagcatgattttccttaacaagaataatttctgaactgtcttcaaccacacattcaaatcttcacccgaatgcattccccataaaataatgttacttagatactgttataccgatacacatgatcttaaacttgttgactgttttttctttttcaaataccatacaaagtaaaaataaaataatctttactgatcctagctcttgatggctgctggaattaaacattcacgaaccctttaattccgctgtgaactcgacccgatatatatatatatatatatatatatatatattttacctactttgtagagatatatccatatacttaatcattttgtacatcctatatagcaatttttttcaacaatttgtttttctgccaattagtagtttttgtgatggttaccaacttcttgtgatggcttttaagatattgcgaacgaatttgttgtaacataaattttatgtctacttatcaaattgtcatatttcacattattttactgacttttagcaactactttgaaaattccctctccatatatataataatgcgatagagtatggaagtactggcaatagtcgtagctcagttgcaaacaatttgcgatgaattttttgcaacaatattttcgccagatactaatgaaacattatatttagttgtgaatttgtgactagctaaaaaatgagatgaaaccattgctaattcatgatatactggtattctcgtcccaataatatgcgacgacttcttttacagtcttttccatcacatagatgtttttgtacttgtaaagatgtttctattttcataatacactacagtcttttacagccttttccatcacatagatggttttttgtacttaaatacttttttgttaaagacgcttgagtccgtgactcgtgagtacggataccccacaaggccacaacagccgcaaacgaatccaaaatcagtatattcgaaatgcattacgtacttaccttttcgaacgaatctaaaacgtgtccagtttgagattgcatggctcatatcgttgttgtacatgcatgtacattgtttatgtaaaatacaataacttttaattatatacgtatatataatcatttttaaaatgtctattgtagcttcaattcaaatggttcgggagaaaaaatactctctaaacccatattaaaacttgcaaataattaatttagtatcttctaataataattaaatatatatacatcaaaactatcatttttatctggtaatgtttttcttatctggtaactataattaaaagttatcgaacaaactttcaaaatcattaatttttaatttataaattagaataaataaggataaatattttatatgatattctatcatctccatttagagctatgtgaatagctgttgcgcatttgtgaccaaaaggcgagagagctaaagatctcgttatggccatctattggtttactaaacgctaacattatctatgattttttttttcctttgtaaacaatatatcaaactttttttgttgtgaaaattcaggaggtggctcgtattattatattttaataaatctattctattttttctcataaactaggtagacttttattatttttattattattttctctatcattttcaattatatttaatattattgcgagctagaccctaccatctcgtgtcttatcgttcaaatactatagaataataatattaacaatatgtcaacggttttttggtaaggacgagttaagaagaagaagtcagtctccaagaatttgactcagaacaataccaaaactgctttaattcgtcaaaatatcaattctggactattcatttcaacgtctcctccaaaaacgtatgtatataaatacctacacccaccaacaccacaacttaccaagtctccaaacatagttcctcgcatttacatatatacatataataatatctctagaattttcaagagcatcaagatccatcaagatccaccaggtatatatatacgtgcttcgtacatacatacatctcctgagtttccgttctttgataagttctctatatttgctaattgattattgatgcatatgtacgtgacaatgtctcattaacagtgtaacggagaagaatgtcgccgtcaatgatagctccggtgatggaagaagagaacaagaaataccaaaaaggcgtgaaacatctttgtgaaaatggtctgaccaaagtaccaaccaagtatatatggcctgaacctgaccgacccatcttgacaaaatcggacaagctcatcaaaccaaacaaaaacctaaagctccccctcatagatttcgctgagctccttggacctaaccggcctcatgttctacgaaccatagccgaggcctgcaaaacctacggcttctttcaggttggttctctaaaccctaaagcacatgcggtgatatctagatttcttgctaaacaagtaagctatggtaatgggcaggttgtgaatcatgggatggaaggagacgtgagcaagaatatgatagacgtgtgtaagagattctttgagcttccgtacgaggagagatccaagtacatgtcgtcggacatgtcggctccagtacgatacggcacgagtttcaaccagatcaaagacaatgtcttttgttggagagacttcttgaaactctatgcacatccactccctgactatcttcctcattggccttcttctccttctgacttcaggtcagatttccaacatttacatttttcaatatgtgctgattttcccgtttagtgaaaatagaaaatcttaactaaatttgatattccatcaagaaattccacaaaaagatttagcacgtgtttaagatactgaactcaaaagcacaggcggttcaacatttacctacatgaatatttttaattacatctgaaaaggattagtcagacgaaatttctggtagtacacacatttttagaatctttcttcaacctaattcatctattttggtcacaaatttgcacatccaattaattatctagggcgagggcggttactaaatgtatttaaaaatatagatatgtaagtggcggcttgtaaatctataaagatgaatggaattattatacaactaaataacaaagaaaatgtcacattacgacttacttatctaatcttcatagctatacaccaccaccatataatagcagtcacggggttactttacgtatcacgcataaatattattaaatcatctcgaatatattttattgtaatacagtattcctatagataaactttattatatgagctttttactaaatttttctacgtataaaaaattgaaaacaggagttcggcggctacatacgctaaagagacgaaagagatgttcgaaatgatggtcaaagccatcttagaaagtcttgaaattgatggcagtgatgaggcggctaaggagttggaagagggaagtcaggtggtggtggtgaactgttatccaccgtgtccggagccagagctgacgctagggatgccaccgcactcagactacggcttcttgacgcttctacttcaagacgaagtcgaaggtcttcaaattctgtatcgtgacgagtgggtcaccgttgatcccatccctggctcttttgttgtcaacgtaggcgatcatctcgaggtatatatcaattatcatgtttctatctatttttgcttaccaaacttgcttcatagatttggttatatcttaaattcgaaggatatgaatgaaaatattctaaacatactgtaaaatccttaattagaaaaagctttttaatacttgcgctacaaaatagttaaattgggttgattaagattaaaattttaaagtgattagaacatcaaaataattttctagaatctgtctcatctttttttctcaattttgtttattattacatgtagatatttagcaatgggaggtataaaagcgtgctacatagggtattggtgaactctacaaaacctaggatatcggtggcgtcgctacacagcttccctttgacttctgtcgtaaagccatcgccgaaactcgtcgataaacataatccatcacagtatatggacactgattttaccacttttcttcagtatataacttctcgtgaacccaaatggaagaattttcttgaatcacgcaagattcaccatgtatgataaataaaatacctttttcctgatagtgataacataaatatgaatcaaaattgtgttataaatttaccaaagctatatttttctttatgagcatgattataattttcaaaaaaattaatgaaagagaatagagagataaatgagatttttcatccttcctcccaagtctttgtagctctgttatctaaatcgttttatgttccaggtggacatacaaatatattatatatctaaccaaaccaaattaaaagatatttgtaatctgattgattttataagagaaaatctcttccaatgaattgcatacaataataacaaaattaactccttttttggaaaataatatttgggatatgattctctcaatggctttgtgagaaggacacgcaaagtcaacatattttttcttaaaataaaataagatattaagatatatgctgaccataaaaaatggaaagaaaattaacaagaaatatagaaacgaatgctaaacaagggaaaatcgaagaaagtgaatcaataaaagaagatgtatatacataaaagtaaaactgttgtccataacattactgtaacgtgtcggtgtttttttatggaaaagaaaattaacatttattagatggattctctcctatttatataagagtctcaatgacttcgcaaaagtagaaaacgcaaacaagtctaattgtcgcataagtcataagaaagttgatgacgatggcttgtaagaatttggttgccattctcataattgtctctctctttggtcttcaccaatgtaagaatttgtgcatgttttttttttttctgtttccccaaaaacctaattccacaatagatatgctaggtttaagcatatgtttaatttgtcccttttctatctattttgttgtgtttacacataagaaattgtatgacacatggttaatttgtattttattttatttatgattacgacatggttaatgttgcatcgtatgagctaataatgaaaatattgtttgatatatgctatttgcaggtgatgatgatccacatcccaagggaatagaaagatgttttacacgatttgttggaaagccatattcattggaggatttgtgttgtgtcgaagctccctggatttgcttcgctggctaccttacggacgaatgcatcaagaggtgcccgcctttgcgtgaaggagtaccaccgtctccaccacggcgaaaaggagtagcaccgtctccaccacggcgaaaaggagtagcaccgtctccatcacccatgcggaaaggagtagcaccgtctccatcacccatgtcatgatcttgtttctaattttatattacaaaaaagtgaccaaataaaggaaaatatataaatgaattaattacatagtcgtccagaaaatcaaaaattttgtgttttctttggaaaacaatattaacatttatgtgatggattcgaattctctcctttttcttggatgtccccgaaggaaccgattctctaatttttatatacttctcaacgattttggaatgtcataccaaaattgaaagagttggaaagagcgaaataaggaagatgatttgcaagaggtttggttatggttctcatatttttctttctccttggtcttcaccaatgtaagaatttgttcaagctttcttattttttttccgaatcacaaaacttaacaatagatgtacgtatacatactaaaacattttatgtccttttcttatatgtagtctatttttcacatataactataacaattcgcctatacacatatatgaatataattaaattagtttacgaactagcaatttatgtttggtatatgatctttgcaggtgacgaagatattgatcatccgaagggaatagagtatttttttttttttttgaaagaatttaaaattatattcaatcaaaagccgtttgtacaatgaatgcttatgcattttgaaaaagagctgataaatttaacaaagacatttgaaaggagagcttataactgtgtggccaagtgatatctatgggtttggtcgagttgagaaccacaaccgtaagccgtcttcgtaccgacggtccccttggtgtgtgattgagctgaggcggttgcgaacgttcttgtcgaccatcacggttcccatggccacggtttccccgacctccagctagcatctcctgtaccgttattacttatttccaaggccttcattgaccaaccaaactctacactagctttttaacattgtctcctaaatggaataacttttgcaaaagaaaatacttacgcttgatacaaaatttcttcttgcggatgtctttatggtaaatatgtcaaagaatattgaagagattggagtgaattcttttgctccgagtttcatttcccctttggagtctatccttccgtcggcaacaacaagacccataggcggtggagatagactcaattaaagtctattaaactgtattctagactgacaatgtgtgtgaaagaagcaactacatagttaggttcattcaatcttaatcgagaaaacagagagccaacaaagagagaggattcttccgcatgagactttaggagataaaaactgataggtcttttactttcttcccaacatatctaatatggatatgctatagataccttccacaaatatgtttctgaaaatctagatggataaagaaaatgcgtgtgaaagaagttatccttctaaagccactcctctccatcgatgaaggagatgttggtgaaaggagccgcttccacatcggagagtagcttcgcataggtaacccttttactatgattggctcctggtccatagcacctatgctcgccgtaatacacagtactacaaaaccaactcaattcagcccacaatacacaatccaatgaaccatttcattgtgattttgtttactaaccgttgtgtcttaggatcccccatatcattccacccatcaagagaaacaactctagacatgtatgtcttagagaagataactcttgcataaggtctccatgcacgtccaagccacactcttgcacttcccgtgatcttgcaattcacgaacacaaatcctgttcggtctttcaatgtgtcctttccatttgctgtaatacacccgattgtattttcctttgctatggaatgaagtgtgcaatcctacaaaaacaaaattggttttgaattgttaacttacatgtaaaagtgtatatgtgaaacattacgacattgttgtatttttgtattacctcgtaaagggatctcccgttaccgaatatgaagtcgattgatccttcaatgaagcatcctttgaagaaatgacgtccttcttgatccaagagtgtgtcttgatttccatagaaaccgcatccatagaaggcggctttgtcgcctacaaccttcaaagccaccgcttgtgcatcgactgctccggggtttggtgcgggagccgtgttcttattccaagcaaatgacaaaacaaatatgttaagtggagatagagaatttcattagaaaccataaaacacatttaaaaaaaaatcattatatagcataaaacagaatctttttgtcaattgatacattattaaatctcaactatctagaaaaggtagaaatcataacatagagctaggaagcaatatctcaagcttctatctaagagatacgttcactagaaaccattaacacaaacataaaaatactcattagacaccttatcaaacttaaactatctatgaaggatgaaaacatttcataaaaaccaaaaaacagaggaaatataatttcaaactttaactggttttccataatctaggttcaaagcaataaaatctttctttgttattaagatgagacactaaatcataagttctcatgaaacaagaaactcaaaactaataaaaaaatactacaaaaaacagaggatattaccttgaagcttatgttgtaggcggtgaatttttctccaaaaaccgcaaccgaaaaactagaaaaagtgccattggaagaagctgtggtattgttccactcaatggacgtccttgagtatcccattccttgcaccacaagattgtttttgttctcatgaacaataaatctttccctaacaaaaaagacactcacattacacatcaaaatatttagaagtaaagaagaagattatggtaaataatttacctatatatgccaaagtcaattaagattaatgtcttgctttggcttgatccaatacttgcatcaatagcatcttggactcttttaaacctcccacaaccattgagtgaaaccttcaataccatggtgaatccttttgttggaaattttgagaggtggtcacactttgaaggatgatggatcctttgatccaccgattcaattggagagatgatggagagaaacaaaatgaagaatagcatgattgacatagtttaggttcaagaagatcaaacgagaagagattttgtgaaatgtgaagaagtttgtgagaggatcaaagcttcttaacacaaagcttcttaacttggggaagatgataaagttgtgtagaaaatggcaaatgctctagtatatctactctaaatctctcattctagacttagtaagctatgatcacaacaattacaaacattatttctttgacaatgaccctataccaagttcatttgatctttttgactctcatccaattaattctctctttattttttgttttactcttttaattcatatgaaacctttctatttaagtattttcaataatagatggttttgtagtttaggcatttaagaaaatttgagactcttaaacatcctaatgagttggtgtcttgcatagctttttgcacatgatgcttttaacattactcatcttattttggcatctatttttattaactaagaaacataacaacatttatattgtaacaacatttatattttatacttttgtattacttatcaaatatactttgttacgttcaaaatataaaatataaatgttattttggtatccattttatatattgaacgtaacaacatttatataatgattctcggtcgatgtcaatataaacgtaacaatgctttttacttggacttttgatactgtcattacttggactttttgatactgtcatcagcaatggaataatgctattttagggaattagtagtatacattaaatggttttgtagtttgtgcaattaagaattatttgatttttacatgtgagttgatgtcttcttgtacagtaatcataatgctttttaacactcaacttttgtttttgttataatctaattaaaattttaaataaaagcacacattagtttttaaggattttgcttttccaataaactttgtttgagaactctcataaaaacctacattattttcaaactatacaaacgctagaagaaaacatagaattatagattataaatatcaccacctaagccatttgtaataccacttgttggtttcgactcctctagatgatttgacattccattttccaacaatccagcattttcatcttcttctttgtaaaacttggtcaatttagtctttctagttctagtgtaaacaataaaaccattgacatgagttgttttaattctcttgcagctagtcctactcctatcaccagcctctccacactcactgtctaaggccaaccgcttaaccggagattgccaaaccgaactgatacagccgcctatcgactcgagcacaaaaccttcctcattgcaacgaatctacttaacaacaaaaccctcccaaggaaatctacacaaaacagaaaaaaaaagtgaagcaaactgatattaacaagttacgaatagatttagcaaaaaccatggaagctacagaaggaaagtgtttgtcatatgattccattaaaaatgcagagagagagatataagcttctgcattccaaaaccttccttggcctattgtatattatggacagcattttgctagttaccctgccccataatttttcgaccaagattaaatggaaagagaatcatcagccatgagctaaaccaatttgtcctttgtttaacagtactacttatcaaatcgatacaaaataatggctaccacatagagttctaattctaaatttcgaactgcagaggcacttacatgaaaattatccaatgcctgagacagaaccaattgggtttcaggagaagaaacttttccgctgatcagtctccatcttgttggaatctacatcagttccctcttgcttcatctgtattattcccaaagaagaatctgaaagcttctctgcccctccaaaaagtaacttttgtaatgtggagttgatcctcgtacagtccatggagcaaaaccaattttctttaagcaattcctgtcagaacatcatataacatcaaaacctttgcttgtaagacacttaaacataaagctaatgggcctcggtcacgttctataggcccaatatgaaaacttcacaatggttatggcagttgggctaatatgaatatccagcccaaacgcataaatatcgatttttttgtttggtagtgataaatatctatttttgataaaacgtttacatatttatatcttttaatttcttaaaacgtagaataccatgtattatacgtatcccaatcttatccaaattgattatccctaaaaaagaaaaatgagataacagaagatcaatgattaaaacgatgattttgtttttctgtgtaatttaatgtctttgcaagtgtaacaacacacatctgtattatcctcaaataactcttaattataaggaaatacatgttaccaaaagaaaattaaggagaatcatgagaaatatagacatgattgttaggaaagggaaaatagaaaatgaaagtaaccaaataaaggaaatatatctatgaaattaacattttagagttattgtcttttcttaaataagatttaacatttatgtgctggattctctcaatgactatgcgaatggaattgttgaaacgcagtcataatatatatctcatataatagcagtcgttgattaaactttatgaattcaattcattgttgctatatttttacgtaaatagattttttttttttttatgtaacatttttaaggtaatgattgtgtaggtcaacacgatcccgatcatccgaaaggaatagaaaaatgtttccataaatttatgggagagccatggacactcgagtatttgtgttgtgtcgaagctccttccatttgcttccctgaatatgacaaaaaaagttgcctcaaaatatgtccgccgctacgaaaaggtagagcaccgcctccgtcacctagtgcaacatagtcttctctatgaatgctcattgaaatgattaagctctttgaattatgttctctctgatagtgaaatatcttcaatttcagatttgttggaaatgtcttgatagaatgatagagctaattaaacataccgaaatctcatattaagatatacagtacatgagtttcatcttcatcgcaaatcagatctcaatgtgactacatatacttataatatgtatgtatctacatctaaatgttttttattcatgtgtatccttatatatgttagtaaaatcctataagatcatctccaatgtctttagatgtatgctcagagactatgttagtgtgacggagccattcatcaccatctataaaagatacatctatgaaagaagatgcttctgaatctgtgagttgtttcccaaacaaaaccctctctttgtaatctgctcccggtccatagcatttatgctctccaaaagtcaccgtcctaaaaaataaaacccatacaagacataagtaagatcttttatgtatgttgagatgtgtatatatatagtctcttacttttctttggtcgagtctccccagttattccatccttctggagtaatgattccagacatgtaagtatttgagaacacgactgtagcataggctccccaagctcttccaagcaatatttccccactgccatcgatcttacaattcacaaaagagaatcctgactgttcatcttctgattgtcttccttgagctgtgatagatccggtaactccggatgtattcccctttgctattgaattgatagtacaatcctgtttgcgattttagagtattatggtcatgtttggaaaaggtcatgcatgaatgtgttttatctttaacctggtagagtgatcttccattgccaaatataaaatctatggacccttgaatgaagcactctttgaagaaatgtcttcctttatcatctagaagtgtatcttgagccccatagaatccacaaccataaaaggcagcttggtctccttcaatccttagagctactgcttgtgcatcagcttcaccaggatctggttctggtgcattgttcttactccattcaaaacacatacacacatgaaaactcatatcattatatgcgttagctaattaggtttaattgttgtgacctcgatatccttaccttgaaactaatgttgtaagctgtgaagttagctgcaaacactacaaaggagaagctatcagcagtgtttccggcggattttgctgtgtcgttccattcgatggatgtgttttgatatcctcttccttgaataacaaggtttgtcttgttttcattaaccgtaaccttttccctgcttgcttaaattgaactcaaacattactaaatatatatatcatattacactataaaagaaaattattgagcaatggagataggggaaaaagaacaagagcttggagttgaagataggacctataagaacccgaattaacgatgatgagagtcttggaagagcttaaatcagggacaacatcaatggcgctttgaacattgctgaagttaccacaaccatgcaaatcaacagtcaacacaagagaagtcttgtattggtgtctaagccttgacgtccatttctcacaacattttattggttcatggtggtgataatgatgatggtgatggtggtgatggtgatgatggtggtgtttgtgtccaaaaaatgttgaatattttgctaatgctccgatagttgtagctatagaagagagagatctagaggatggcaattggatcgtgtagagagcaagaatgatggataaaagagctattagggtggttaaaaccggtttgatgggcatgtttaagataatagtagatgggtttagtgtgtctcaactagttaaaagtaaaaagaggccaaatgttgtttggtatttatacatgtgtgaggaagagtggcgtgagagtaaagtgaaggatgggcttcgaagacagtgtggtacctttttcttcgtaaatcagatacgttttatctaaagtcatttctgaacaatttcgtgataattaaacaaaaaaagtatatacgtcgctttagaaacttagaaaaactgtggaataagttttctcataggcatcttcaatcgtttaagttagagacgcaataatggaataagatgatgaagtatttttacaaatatcagacgacaattatgaatatttttgacttactaagtattgtttttttttggttttgggttagaaaaatcgaaatcttgtttttttcttagacataacgtctgttttgcaagacttataacctgaaagtttataattttttttcttttaaagacatttttacatatgaaatattttatgattttgcttaatagatcattccttgttgtattaaccatcttgaaaacgaagtatcacggccagtcggctatcataacaaaaagaaaaagaaaaacttataatgaaatctagccaaaagcatattataaatttttatgtaacaatctataaaatttataagagttcaatttagaaatgggtgacttatatgatgttggaaaaaatagttgttgagattataagagaattttcaaatcaaccgacaggcgagcgagttgggggtggtacacgccaagatggttaatgatgcttaataaaaccatttcaaaagcaacttttactatattttaattttgcgttgtttaataaaattgtgagtgttttatctattttggtaaaaaacactgactcatttatttacagaaaccactgagtttgactcgtcgaaagaaaaataatttcatttacataaacaatgcttttctccataaactttctaactccaaatttggtatcggtatggttttaggagattacataacagtatgaattactttgaaaaatcttgaactattaacatcttaatgagtcggttgacgtactgtatatttattcaagcaatgatgcatggatccagaaactattttgagccgaggcaaaaataaacgtaaattaatagtattgaacaataaattaaacaagaaatgaaccgtgtaaatttggaaaaagaaaacatcatttttctacgtaatttatcaacattgatctattttaaaatttcaaagagtcttgcaaaacaaattcgagttcatcactttctttcaatatatatcgtctcgtgaatccaagtgaaataattgccatgaatcatgcaagatgcaccttataaaacagaataaatttatcattttttccaatgctaataacattaaggcgaaataaattgttttatagacttacgttgtatcatgtatggttaaagtcttaaagagatagagaataacaaatacacaaagtgtataaaacataaagaagagacttgagaaatgagttctcaaccaaatcaaaccgatcacacacgattagtaaaagaaaaatttagatttaactgcaatagttttataaattctaaaactactcataagaggttaaacaaagtttaaattttcaactcataattcctaacaatttaactataacgcacaacataaatgcagttgttaattctaggaaaaaaaacagattagtaagcgcaagttttcgaaatgggcattaggcccaattgatttatcttcaagaaatacccattaaaaaggttaatatttacgaaatctgccactgctctaaagactgtaatttactgcgtttttctctatcttccttcctctccagtggctgcaaaatcctaaatctcaccgaaaaggattttgtattgttacatcctcttcttcttcctccagatccatgtatgaaacctcccctgaaccctaatttagctatcgaatttgagattcgatccgatgtttacttccaaatcttcgtttcgtctctgataatataactccatcgtaatagaactgatttcaagacggttcgtttcgttttcctctatcccagattcggaaagctaccttgttttgaactccatagttttcccgaatctattcatcacttgctactatcagtttgcttcttctgttctgtgtagatttccttggagggggtttgttttgacgcagtttcgttgcaaatgaaggaagatttagtgcccgagtcgaacagttcggtttggcaatctccggttaagcggttggctgtagacggcgagtgtggtgaggctggtgataggagtaggactagctgtaagagaattaaaacgactcaagtcaatggttttattgtttacactagaactaggaagactaaattcaccaagcttcatgaacaagaagatgaaaatgctggattgtcgaatcatctcgaggagtcgaaaccaacgagtggtgttacaagtggcttcggtggtgatatgtgtcgcagcagctcggtaggtgaaactaacgttagtgggagctcttgtgttaagaatacacttgttgagagctcctccgggaaagtcgttgtgatagagcggttagttactggcggcttagctgaaagtccggcagttgagactgacagtagctcattagtggatgttgtaattgacgacatcaattttgtggaattgttacatgaagcgattcctgttgaaattctgtctgaaggaagcctggattttgaggtgaaaagactaggaactaaagttagaaccatgggaaaatcctatagcgtctcggagaagaaaaagcatggatcttttaagcgtacagcacagatctataaatctattgtgagaatgaagaaggtaaataatttggtccctgagaatgtagaggttcttgcggaaccagactttggccgtgagggattagatgaacagagtcattctgtcagtcttgcggacaagtccattttaatccgcagcaggccagaaacagtgagggatctttttgagaccggtttactcgatggtttgtcggtggtttacatgggtactgttaaggttgggccattcagttttgttttgtatgcttttgtgaccatttcattgtgtcttgatctaaaaagtgaattgtttatgtcccagtctcaagcctttcctctccgtggcatcattagagatggtggaattttgtgctcatgttcctcatgtgattgggctaacgtaagattttttttttccactctgcaacttagaatgtaggatgaatttgatgatctctagtgattctatcagacttactctcgtatataaacattttcctttttgtaggttatttcaacttccaaatttgagattcatgcttgtaaacaataccgaagagcatcacaatacatttgctttgagaatggtaagagcctgctagatgttctaaatataagtaggaacactcctctacatgctctcgaagcaacaattctggatgctgttgattatgcatctaaagaaaaacgttttacctgtaaaagatgcaaaggtgggtctgtttctccctagcttgttctaatatttgtcgacttcatagatttggttaaattgaactttattacctgtgctgtctaggtcccttccctttctcctctcttggccatagagggtttctgtgtaagtcatgctcggaggtagaaacttctcaggccagccttgctgcgacaaggacctcaactagtgctcctgcgtgcataacatctccggttaagagtagattgaagataacaagaaagttggtaacctttattctttgtactcgttgtcataaggtgtcttttctcctgtttaggtttacatcttatgtgcagcgaaaaatgattttctttgggcatcatgcatgagtataaatattcatttatgtgctgtcttgttttgccttttcaggccatcagaatccacgtcaatatcaccagtatttatgtcatcacttggaaatagcactcgaaagataacaagaaagttggtaccattttgttgctttttgttttgttatgtattttgcatcttcatcaatcattgcatgagaatctacattttcctaaatcataagatagtcttgatgttcaatttttgttgtcactttagcatgttatattaaatgcatgtccttgcttttcttgactttggttataaaatcttaaattatcaccatgcgtctcagggctttacgtcaagctttggttgggaaggcttatctcagtgcttctacaaatgtatcttcacaaaagaagtgccgatcaaaatttaagaagatgttggtatttttacttcataatgatgtattgatgttagcggaaccgacactgatgataaagagtctgattttgctgcatctggtttccttgtatgtcttgaaggttgacccaacattctgtgacccccaaggctttgaaaagtgtgtccctttccgtttcttcgaaaaagaggagttatagattagcaagaaagtgggtatcatttatttatttatagcaccttaattttgttattctggttggtttccatttattaagttttacctatttctcctttttcacagggatcaaggattgcacaagttagtgtttgatagagggggattaccagagggaactgaactaggctactatgctcgtggacaggtgactaactaccttatcctctgtgtggttatatggttgtatccctcttcacctggccttctcttttaagacatatatcactgtggacagaaattgctcggaggctacaaaatgggcgctggaatatattgttactgttgcaagtgcgaggtatttttggatattttacaaaccacatcataccctatcagttagttcttaatttggcattttgcgtgtaggtgagcccctctctgttcgaagctcatgcaggctgggcatctcgtagaaaaccgtgcgaatttgctcttttgtctcttgtatattggttttggtacattcccttagttactgattattctctatttgttgcagttatttttacatatatacatctaatggtgtatctcttcacgaatgggcaactactttctcacatggtcggaaatattctgctaatgataataacgacttgtgtgttatttgtgctgatggtggaaatcttttgctctgcgatagctgcccaagagctttccacataggtaaagctgtacttaatcaattttgcagcatgcattttccttctctatctctcgaataattttgcccctacttctgtacctacacttgttgttaaatattacatgctggattagttaatttgtatgtttaaaatgctgatatataaatagatatgtatattaacaagcaggatcattttgagaacctttcccattttgtcactttgcagcatatctgatcacgtctcttaaaaagagggtctgttgacatccttttatgtttttgataactctgttgaaatttcaatcacttttactcacatatctgtctggtctatgtagaatgtgtttcccttccgagtatacctcgtggtaactggcattgcaaatactgcgagaataagttcacgagcgaaattgctggagagtacaatgtcaattcttctgcagttgggcaactagaaggagttgatcctgttgatcaattagctggacgatgcattcgcgttgtcaagaacatggaagctgaaacaaatgggtgtgtattatgcaggtaaatattctgagtagtctaaattcttctgttaatgtgtcttatgctaaaatttgtttgacaactctgcccttaaagttttatgggtgtcaccttttctgagagaatcaggtctatcttaaattaattgtttcggaagaacgctaggtctcttaaaagtattacatgtttcgatcgaccattatgtctatgttaaagtgtcttaagagtagaggttttgatgtgatagctgcattttgtatgtctggccaaatagtaaatagataaaactaaactggtatatatttttataatcttagctaataaaagattttgtctgcagtggttctgatttttgtagatcaggatttgggccacggacaatcataatatgtgatcaggtactttctcaatcgtggcgagatcttaaattagattattctgtaaattttatatcaaactatttatctctattttgcaacagtgtgaaaaggagtaccacattggatgtttgagtagtcagaatattgtggatttaaaggtaaccacatatagcttcaaccccaactcacaatcttctgcgttgacatagattggatcattatctttattgtctgccctgatttcaacttacacggggtatatgattttctgacaggaattacctaaaggaaactggttttgctccatggactgtacgaggatcaactccacattacaaaagttacttcttggtggggcggagaagctttcagattcttctttgggaataatacagacgaagcaagagagaaatgatgtatattccatcagtgatcttgacatcagatggagactgatcagcggcaaagttacttctcctgaaagccgaatgttactgtctcaggcattggctatttttcatgtaagtgcctctgcatttcaaaacttagaattaaatctttatgtgatggcaattttgttgttttgatttgataattagtactgttaaacaaaggaaaaatctgtttagctcattgctgattctctttccatttaatcttggccggaaattatggggcagggtaactagcaaaatgctgtacaaaatacacaataggccaaggaaggttacataagtctatcttaaaagttgaatcatgtatgtatatatgtatgaaataaattatcttgatttggttagtatgtacaaatatctctatttctatgcctacaatttgaaccaaaggcataactatgcagaagtttatatctctctctgcatttttaatggtcacatatgacacacattttttctcaataggaattagctaaactttaccatcgtgccctaagtttatttcagtgtcttccttacaggattgcttcgatcctatagttgatccactttctgggagcaatcttattccgagaatggtttacgggtgaggactcttccattaatgccctcttcaagtagcctgactttcaaataccatcaataacaatcacaagtgcctttttcgtttaggaagactatgcaaggacaagactacgggggaatctgctgtgctgttttgactgttaagtaagatctcttccctacctctacctaaccataggccatatttgtattgcggttaagcattgatttggcttttatacagtgcgactgttgtttctgctggactattacgagtatttggccgagaggttgcagaacttccattagttgcaacacgcatgtgcagccgagagaaggtaatgtcttcttgtctcttgaaaattcgtatctagaagataaataccgtttcgtgattgacttaaggtttcatggggttttatataaaacagggctactttcaattgctcttttcctgcattgagaagctactctcatccctgaatgttgaaagcatcgtggttccagcagctgaagaggcagagcccttatggatgaacaaatttgggttcagaaaacttgcacctgaacaggtaaaaacgatgactttgactcgtttgtgaattgtgtagtttttgaaatttgttctaagagaatctgacaacaattaaatccttcgttgctacagctcagtaagtatataaagatatgctaccaaatggtgaggttcaaaggagcatccatgctgcagaaaccagtcgattcacaccaaatcattgacaagacaatcgaaaccggtgcatctttagaagaaaattttgatttgaaacaagccaatgagttgtatgttcatcctttgtgttgaggcaaagcaagtcatggatttagtgaaagatggattaaagggtgaagcgtttaggttttaaacaagttcttacaacatatactagtgtaaatttttgtagatgcgaagctcttttttgttatgtttttttaggttcacatttttacattgtgttctttttgggaacaaaagtttacgtttctaccaatacgtttttattggattatatcaagatggttactcgcttttcattttctgatccatgataccatttttattcaaatgcaccaaaattgtaaaaacaaatttatggaggaattgagtcttcaaactttaccaatggtctattcatcgagcatggtgtattcaatcgagcatttgaagtaatttgtgataaactaacactaattttcaacaaaactatcataattacattgttgcagagaaccataatatctcaatagcgacatgttcaaaaaagatggtcaactttatagagatagctactaaaaatgtatgcaaaaacaaacgtcaaagattagtctttaagacttggtattttcaagaacatctttgtatcttcttcctcacatctttgttcaaacattttctaagattcagaagtctaagagaaagaatcatgatttttctcattgttctactctctctctctcgaaaatccgtttttcttcttcatcagaatcttctttcacttcaaagttagatttctttccaaaccacaatgactttcatcagaattctcttgtgataactattgatctatatggtaaaggtaactttactaacgttcaaaaggccatcgatgttgtacctgatttaagctcttccaagactctcatcatcatcaattcagaagtttacatgttgttactcaactttataacacatgttctttatgttctctgttctagacttctactgatgtatggtttcactggaaaaacagggaaaaagttaaggttggtgtaaacaagacaaacatattgatgaaaggcagaggatatcaaagaacgatcattgagtggaatgatactgcgcattcatcaggaggaactgcaaatagcttctcttttggtatattttcagcaaatttcgttgcctataatatcagctttaaggtaaacatattgtagatctctcaagttataacctaattcgtttatatcgttgagttctcatatgttttgttataaccaatcttaagagcctaattcgtttcatatgtgttgttatggccagtcttaaagagcctaattcgtgtatgttgttgagttctcatatgttttgttatgatcagtcttaagagcctaattcgtttcatatgttttgttataaccagtcttaacagcctacttcgttttgaaccattatttagttacgttttgtgcaaacgttaagctgtttttgagtgattatctagataaactatctagacttaaaccaagtgatatacgtgtatctatataaatgtacatgttaatatctcacacatgtgtataagaatatactaaaaaattgtgatttttgaacatttacaccattgtgatatatgtgtgtgtatataaatctactaacgtgaaaccgaaaatgaaaacaaaatcaaaggaaggtcacgactcacaaataaggagattttatgaaaagtttctacaaatttgttgatttgttttaaaaacgtgtcaaaaattaaaaaatattataaaggaaatgaaaatatataagttgactcaatagttaaaagcatgataaaatataaaagtaagtacagctaatatgaaaaaatgttaaaatatgacacctatcaaataccaaaagtgcaaaagatttataataagatatgtctatcatgatatatttctactctaagctttgataacatcatattagtcagtggatacattttcatgctagaatgggtagaaaatattataaattagaagaaaatctcgaaggaagatccatataaagaaaaccattatttttcataactatatagaaaaaaaaaatattattataaatgtattgctatagtaataaaaaaatatttctacctaaatatctattttaaaattcctgtagtccataaagaaaatgaatagtgaatttaatttttattacttggagataagattgtcatcacaacttcaaaactataaatagagagttactttcacatgataaactcatccattgatcaacataaacgaaaaagaaagaaaaaaacacacacaaacagatacaacaaaaatgggtaagaatttgagcatgatgttgatgatggtgatgataatagtggcgattctgatcggaggtgaagcaaaatcggagatagaatgcagtattttgtgtcgtccccattgtaaaagctcatcatcagctggagaatgttctgactgtcatagaaaatgtgagcaatctccaccatcagtgaagaaacagattcttaagaacgagaacatgaccaaaaaatatgatatacttgactaatttataacatatatgatgattgtatgattgtatcgatggacactttagtccaactgttgttgcttatgtacttctatattatcttttaataataagaagagaaattgcattcttgttctcagctcatcctcatattggtgaaaatattaacttgaatatagacacaactagttaagtggtggaatcaatatacatattcatatgcttttcattaattacaacacaattaagttgactgatatacaatgcaattagttatgtacttatgttgggtacacaaaaaataaggttatgtacttaagttagataaaacactcccttatatgaaaggatatgtatacgtttaatgatacatgatggaagtcatcttttttttttttttaaagtcatataactaaagactatgcatgcatatcattttaaagttagctttatactcaaaagttagatcatctccattggaagtatctcaatgagataccaaaaaaaaaaaaaaataattaaaaaaggaaaagtatgagagaagggagaaaaagtaggagagaaggagaattgagtttctctgagaaactttgagaaactattctcatccaatttggacaagtgtcatcatgctgttagttcaattattaaataataattaatgtatctgttttaattaaaatattaatatttttttgtttgagaaattttcttgtttttactgatggagatggtcttatattcttcatcttcaacacttctctgaaatttctactccctatatttggactcgcatttgatgtcttagctcctacattttaaatcgaagaattgtattttatgcatatgtcttctctctttagattatcttgcttttttcagttatgttagatcaacaaaatggttagtgataagattatgaaattttaagagatgtatctttgtcaagccgattaaccggcggaagtctccatgtcgtaaaccaccattttcgttgtaggcacaatttcggtttattttttcggacaactttcgggatgtacaaaccgagcaattagcatggttttcattatctcatcatgtctctctttttttttgtcatgttatatagatactccttttgaaatctttttcgtagcatacggttcattttaacttaagtattactttgattttgtgtagttggaataattttgggacacgtttttattgtaagatgaattaattaagagcatattgatccaataaaaagaaataaaaaatcattgaaaagtggtatttttgtataaaattctcaagtcttaggcagtatattcttaacttgaatcgagtaagagtggttagagatactaatgagaggtagtgcaggaaaaccccaaccgaataaatagtattgtatacagactttaaaatttaaaactcagcatcatctcataaactatggggtagtaattatcaagtttataacagaaaccacaaacaaatatatatgaaaagagagtgagagacaagaagaggtaaataatacaaaccagaaaaagtgaaactatgaaccaacacaatttgatcagaactctcaaagggaagaagatacagacatcttcttcttcttcaatcccacatcgaggaaatgccaaaggatccgagttgccctatttacatatataagagaacccgctggtcaagacagcggattccaactccgagaggttcttcaaagaagagccaacaccaccattatgtttttggtattgttttgtggagagagttccatatgatgcttttatgcttctttatagactcacacatacacatatctatataattatatacacatgtcccttgtactataacaaaagtacctgatattcgatttgttttatgaattatatatcatttgattatattttactctctagctctcgatttgaaaaaaacattatgggttgagaaatagggaatcttccaagggatatgccatatttccattagctagctaccttttcacttcagctccaatcgcacaccatgcattatattgtatcattttgtcataaatcattttactttactttctcgcatactttaagaaaatggtatgtgttttctaaaattatcctttgtaatgaatatattaataatacctatgaaagttggtatctggtagaatcatggatcatacgtatgcgatgacttgacgtaacatatatatttgttatgtcttcttaacttgtaaataataatacaaaaaaaaaagcttgtagatgagtaaatatcagataattaaaaattcgggcatgcaattttttgttattctggttcgtattttacatgtaagatatacacataatataatgtcattcactcattcggtatatgagttctgagatttattatttttattttaatattttcaaactaccatcaatcattcacattaattagtatatgctttcatgtgagattaactgacatttgtttatctagttcttgtttgctgttctttgggaattcaagtgaaaaacgtaattcaatgaatatgagtgtaaagctgttttgtatataaattttagagatattttattaattctcaaaaactacttttaatcgttatagaaccaaaattaataacattaagccagagccaaagcttggtttcatactttgagactttgagtttgtgtcatgtgaaagtaaatgattaagtgttaactttttgttattgaataaaaaaaaattcagaatacaggacgaaaactgagaatcttccattggatataccaaatttccattggctacattatttaatggtagctccaattgcacaagccattcatattttccaaattagattttacactttacataggtgtcgcattttctttcatcgcgtacggtagagagtaaaaagtatagcattgaagaattgatattttaaaattttaaacaaagaaaaatagacaatatgctaaactctaaaaaatccttagaatttgtaaaaaacaaacatttaaaagttaaatacatggaaaattagagttgataaactcttaaagactatctccctgatatatctttaattatatacaaattatttagagaaatatagtcaacaattaagtacttatgagttatgacattggattatgattgattactgattctttttaatgaatttttttaaataattgtaagaaaaacttggtattaatgatcataaatgtttcattaataatttttgaaaatacataaaaatttattgtccttatggtttgattatttaacttttatcctagtccttcaatacatctagaaaatgttaaaatgttgaatcaaatcctggcaaattttaagatatttgtaaaaaatacatacaagtaagaagagaagtcaagagaattgattcggatcattcggacaccaaacgatagtcacatgtcaactgaaacttgaacaaatctaataattcatagatggatacatattcagaacgaggatcataccctgagaagaatctatgaaacgaccctcctagctctagacaactctctccggcgatcttcttcatcttagtttccttcattactctcctaacttctgctgcctcagcccacatcctcgcttccgcaaacctattcgccacaatcaccaaattcccactcctctttggttctaactcaatcaatctcttctttactttctcaccaattccctcatcatcttcatcgtgatggatactacaagcggagagtagagtcctccaaacaaccgcatcaggctcaaaaggcattttctttatgaagtcatacgcctcgtttagtcgacctgcacgtcccaagatatctaccattgctccgtagtgaatcatcattggtttgatcttgtgtattttctccatttcgtggaaatatttgtacccgtcatccaccaatcccgtgtggctacaagcgcataaaacaccgagaaatgttacgtagtttggtctcaccgatgattctttcatcatcttcgagaatagttgaagggcttcttctgcaaatccatattgtgctaatcctacaatcatggcactccaagtccaaacatttttgtcaaccattctttcgaaaactaacctagcatactctaatccacctgattttgcatacatgtctacaagtgcagtacctagtctacagtttaactctaactctcttaccatcacctgtgaatgcaccaatttccccaagctcaagttaccgccacaagccgaaagcaaaaccaccattgtcgtctcatctggacaaaaccgcttaccaatcatctcacaaaaacactcaaacaccaaatttaacttaccattctcaacaagagcagtcataatcgagttccaagaaacaacatttctctcagtcatttcgtcgaacaccttcctggcatcagaagttttcttacaagtaccataaagatggatcaaattgttcccaacatatacatcaaaatcaaacccatgtttcaaaacctcaacttgaatctgtctcccagcagtgagacctaaaaacgaagcacaagccttgagaagaaaaggaaaagtgagcttattaggtttgattcctcgtctcttcatctcagagtaaacccaaatcgattccacaggagaatcacttgaagaatagcctctactgagcatattccaagtagaaggagtcgaatctgaagagtgaagcagaagggttcgcgcaaaggcaaggtctttggcgagggatagtgatgaaacccgtacaagctcgctgatgataaagctgtcattttggagagaggagagatggatttgaccatggatctgtagaaggtgtttaattgaggaacatagcttgaggaagataagacattggtgtttcctggatttgaagcatgaatctgaactccaaatcattatgccattggagctcttagaaatcgcaaaaagtttcaattttcaaatcggtgatatatttatagatttggaacggttttaacggaaccgaagtaaaatcaaaagcttattcggttcggtttaatgtgaaattgatatttatcaaccaaaacatatcatctttacaaggtcagtaatatacagaagattacactttctctctgattctgagatgggtgtcagaggttttggttaggaggatcaatctctgattagagtgttgttgtttccatttcaaagctctgatcatgaaaatttcctccatgaatgttcttctcgcttctaatctctgagaaccaaaaccatggtcgtgggaagatccatgaatgatgtatcacaatcatgtgagatgcagattctgcagagcatgattacaactgtgagttcatgatcatgtttcatgaaaactaaaggctttatattaatatactaaccaaatcagggaggtgtttattaatctgaatcttcttcactctcttcttcagactcggagctaaggaaacgagctgagcttctgagggaaaatgatttgttactctttggaatcttcgttctcttttgttttgttgcaaaacctttcgccactagtgtatcaaacaaatctcccatctccattttctttctcaaaccatcatgttcgtccatgaaccttcagaacaataaacataagactgggaaatatcagattctaacactaataaagacaatgtaaatatcaaaggcctgtttcactcgataacattcatttgcttgatccgttagaggaaacaacagatgaatacttctatagacaagtgaaaacatcgatgcagcaataattggatcaagcaacacctttcacgtattgctttgaaggcgtctctagttgcataaggaagacccgtttttggatcccggtacctgtatcagcaatacacacaacagctaagaactagttctaaaattgcagagaaaagataatcaggtttctaggttataacatcatttcttttcgagaagtatatatcaaagaaactgataacttctttttagtagacctaagagagtctacttgtgttcatcccagagatcttgttcttccgatgaataaagaagaagaacagaaaaactcttacttggcaggtaatcccgtaatcacacatacagctttttctggatctggaaaagagaaaacaaaccaaaagaaagacagagatcagtatagatcaatatgaacacatttatgttcatctccaaacaccactcaaaattacttacagggaacagacttcgtcgacaactctgaattgaatgacgcaccattacagaattctaaatagttacatcctgcatgtaaagttaaaagtttaaacaaatatagttcttacttttctggaaagatccaattagactggattactattttactggagagcttaccatcttttgaatgataccgaatctgaggacccttgtagactgctttatgcacaatcgctttcttttttacttcttcttcccttgccaagacacgttctaaattcctcaagttcatgatttctgcaagaacctgactttagcaattttgagtttctgatagagcaaatcagatgcagcatcataaaagccaaacctgtttgagcagcttccagcagcatttcttcttgggtcatccgtttttcctcccctacttttttcctttgtattggctgaacaaacacaaaaaagaattcaacatggcaagacttagaaaagagattaaagtgtagccatgaatgtaaatagctagtggggatgagttctgagaaacctttgttgttgcttgtatagcagcacgcaatgcatctctttctgcttgccgtacaaccactgaagtccgtgttgatttcctaatgactttctcaccttccatatcttcttgtgcttcattctcttctttttcttcttgttccttgtttcccaattcttcacctggcttctcatctccaggaatatattctagttgtgaaactaccttcgtcttctttttctttttctttgaagcagttttcccagggtaaatcagccgcttctttggcagatccctacaacaatatgcaaaattgtaacaaaattaaaacagacacacataatagccatcataagacaagctttgaaaaaattcaaacctcaattctttttcatttacagcgactgcatcaggctcaggctcctaatcccaaacaaaaggcaaaagaaagaaattaaaaagaatggaaatataagcaaaaaccttgatgaataagtactcaatacataagcaagacataaatacatcgtcattgaagtcactgtcaaactcatcagcaacctcacgttctgcttcatattcatcatcatgttcttcctgcagataacaaaagtaaagagatacataaatgtcagcaaacacacgaaagtttctgcgatagtatcttgtctacaaatctgatttttttccattatatattttgacatctagtctaccttaacaaatcattaacatctctttaagagagtaagctatatataaaacaaaacaaacctctttaagagcttcttgattccaaaactgttcatcttcttctacttcgtcatcaagcaacttggtcatcctgaaaaaaaacagaaaactgatgaataaagcttccacaagagagtttctgatacatctcaataacagtgagacaaaaccacaatcttcaggtgaaacacattcatcaggtaaaagcttaagctcaagtaattcttaccgtttaccccgtgttgctcttgttgtacggtccaagaacaccattggctcttcttcatcgatttccattgataacttgctcaactcttacttctacaagttcacaaatttaaacgaaaatgtcataacacacaaattaacaaatcagcaaggaacccccaaattagggtttctcgcaatttcaagactttacgattatatcgagagggaaacaggaacaaaaacccaaaatttgagtgatgtacacagtaatcgaagaagagcccatgaaagcgagaatgaaaagtaatttgtgtgatgagcttaaaatctcgctcgaggagttaccttcggaaaattttaggttggagaagtttcttcgacgagcacacgtcttcgccggcgaccgccgcacctctttgattcactctttcacacacggtgccgctggttcgtacaccattgttattggacttgagatattaatgggccttccacttagacattttcaaagcccatattatattagaagattctttttgtaaaataaaacttacaatgatagaccgctggggaaaaacgttttatttttatttttattaatgaccttgagtaatttctttttacactggcatatataaaattttaaattaaatttacgatgaaaaatcgtaacgtaaataataccaaaaaagaaagatgttaagatatataaatcggttaacaaaattgtccagaaatggtaatatcatagatagatttcaattttcaagtcatgcatgatgtcattttggatataacacgagttgtcaacttgtcatgatcgagaaagcaaaagtaaacaaacaaaaagtgtttctacactcctctaaactccaaggagcaagcaatatcgaagttgcgatctcatgcaggaccactggagaaggtttctacactcttctaaagctacagaaaaaaaaaaagtatataagaaattgtgtttttttcttcaatttgagtgtacgaattcgaatgcttaataagtatgtactaactaagatgttagtataagattcgataatagagacaatttcaaataaaactatcataaattgttcttgaacaaagagaagtaatcgagaacaaacgtcacaatcattttttttgggtaatacaaaagaaaagttacaatctaagaaaagttacaatcatttcttgggttgttctaattgcattatgtcttgtagcaagaatgtgatgttggaatgagaagagcctccttcttccacagccttgtgagctaattctccaagctctttcactctttttcttctctccttagcatcattactatcacccatcaattcctccactgccttctttactccttctttatccaccagtactcctattttctcctcttctccccatctcatggactcttcaaccccagctctcacaccggcttttagtatctgcaccgccaatttctcattgcagaattggtctccaaacagtggccacgtgagtaatggaacgcctgaagtgattccttcaagagtagagttccatccacaatgtgtcaagaatcctccaacggcaggatgtgtaaggataagcatttgaggcgaccatcctgttatgagaaggcctctttctttgattctttccttataaccgctctctgagatccattcaagtaactcgttatacttctcccaacctcttatgacccaaatgaaaggtctttgggattcctcgaggcctaagccgagctctttgagctgagacagaggaagattgcatatacttccaaggcaaacatatagcaccgacccttcttctttagaatcaagccatttaatacactcgtcttgatcaatgtccgccttgtttcccctctcagcttggtcttctcctaacttgttgcacaaggaaaccggtccgatgctccatatcttacccgctttaaccttcttgtagtctctaacataagctggctcgagctcttcaaacgtgttaacaatcacaccataagaagtgttatccccttctgtcattccgtcaaggaagtctttccaatctccagcaactaataccattggaagctgagattttgtgaactcaactctgtcagggaaattaggaatggggaagtattccttgtcagactctatagtttccaagaactcgtggttttggtgcattatgtgcgtacaaagaagattgaagcaacacatgccatgaaagatgatttttggtataccaagattcttggcaattctgtttgtataaggcaaacacatgtcagcgattatgcagtttggcctaggttgaatctctttcaagagcttctcgactggttcctcgagcaggctaaatgctttgaagaaggttaatgaagcccccaatgaatcgagcaagtccaaattctcctgtccttccggtgaacccgattcttgagatggaaactttacttgcacgagattgatgggcaagccggattggatagcccggctaagaacgttcttgaaccggcctgcgttttgaggtgtagtgacaatggttatagtcaccccgcgctgagccaggagccttgcaatatctaccattgggatcatgtggccttgagccatgaaagggaagagaacaaaatgaagaggaggacgaaattccgatgccatgaggaactctcttctaaggtttattttttttgctttggttccgataatgtgtgtgtttctctgtgcctacatatattaagatgtgatgtaagaaagaacaaaaggaaattggcttattattcgtaatagttacaaaacacactaagtggttcacagtacatatcgtggcgggcactcatatgttcttttgtattcatataagcccaaaattttaagagaaaatatcttttagctagaggtacgtcgaaaagatagtgaaaagtttatagccgtaaaaattagtattggataaacgaataaagaaagaaaaatcaaattcggaatatctcagtctctccttctttttatgtcgtatggacaaacaagcctcaacatttgtcttcaaactaaatcaaagtgtgtactctagatttctagctattctagtcttttttttttttttttttttttttgctttatgacgactgattttgataggatattaaattaggatatgtgaaatacttggttgttttcttaaaaacgtattttttgtttcctcttttttttttcttccgaaaaatcaaaactcttaatgaaaatttcatttaaaataaaatctccttaggtgcacaaaaaaaaaaaaaaaaaatctccttatgacaaatatcttgattgtttgaaattcagattggtgacaagataaatcaaattttgtatagctattaaaatatgaaaaactataaacggatatacataaaaggaattattagggaaattgtagatttctttaaaaaaaacattattgataataagcctaaaaccgctagaagaattaggaaagttgaactccgccggactaccagcgcagctgtctatacaatgaaattattagacattggctctttctacgatttcaatgtatataagttgtagtttttaaaatatttacataattctaatagcaaaacaagacgaattcgattacccaacaaataactgataagatattacatgcacgcacaatgatttaacaaacaacaacaatatatacaatcaactcttggattctacttgttgcattatatcttgtagcaaaaatatgatattagaatgagaagagcctccttcttccacagccttgtgagctaattctccaagctctctgactctttttcttctctcttttgcttcatcactctcgcccattatttcgtccactgccttcttcactccttctttatccactaacactccaatactctcctcttctccccatttcatgacctcttcaaccccaacacttacacctgcttttagcacctgcacgatcagtttctggttgcagaattggtctccaaataatggccaagtgatcaatggaacccctgaggtgattccttctaaagttgagttccatccacaatgtgtcaggaatcctccaacggcagggtgtgaaaggataagcatttgaggcgaccatccttttatgagaaggcttctctctttggttctttcttcaaaaccgctctctaagatccactcagctagttcatgatactttcccccacctcttatgacccaaatgaatggtcttttagttgcctcgaggcctagcccgagctctctaagctgagccagaggaagattgcatatacttccaaggcaaacatacagcaccgactctacatctttagaatcaagccatttaatacactcgtcttgatcaatggctgccttgtttcccctctcagctttgtcttctcctaccttgttgcacaaggaaaccggaccgatgctccatactttaccagccctagcctccgtgtagtttttcacataggcagactccaaatcctgaaatgtgttgacaattacaccataggacgtgtcatcagcatccacctgttcgtccatgatctctttccaatctccactaaagtttgttttcacagtaacttgaagctttgtaaattcaactctatctggaaaactaggaaccaagaaatactctttgtccgactttaaagcatgtaagatattgtggtttcggtgtagaatatgcatactcaaaagacaaaagcaagacacgccatggaaaacgatctttgggatattgaacctcttagcgattttgcttgtataaggcaaacaaaaatcagaaattaggcagcttggtttaggtttcatctcttccatgagcttcatgaccggattttcaagcatgttaaccgctttaaagaaatgtaccattaactccattgagtcaagaaaatcaacattctcttgtccttcttgcaaaccagcttcttgaaaaggaaacttcacatgctcaaccctaatgtgcaagcctgactggatggcccggtttaggacatctttgaacctggctgcgttgtgaggcgtcgtgacaatggtaatagtcaccccgcgctgagccaagatccttgcaatatccaccatggggatcatgtggccttgagccatgaaagggaagagaacaaagtgaagcggaggaagaaattggcgggtcttctcgaaagccatgaggacctatctctaagttcttttttgctttgattccgattgtgtgtgtgtgtgtgtgtgtgtgtgtgtgtgtgtttgtctaaatgtcagtgcatactttaatcttatatttgttgattcatgaaaaagaataaaaaacttggaagtaccaaaatcttggttcacagagattattagtacattacgttttgtggcgggcacctatcttttgtattattttgtattcatatatttgataactacatctaaaataaagtggaaagaattcacaaccgctaaaatcaacttgattaagaaaataaagatatcaaacgtaactgggactctatcgacagtgacatataagagataacgtcttcaaaataaatcaagagaagctatataagaaacaacgtatgttggtgtggtatgatttgctcttatgacacatctacctttactattagtatttgatatttcttttcttgaaaatgatatagtttttaacttgagaagaggtctgaataaatttttaacctgaaaatgatttaatttaatacggtggctagagtttatgttaattttactagtaaatttagtccgcatacagcggaaatcatcatctagtgcatcattataagttttttttaatacatctcagaagaacagacttaatttgaattaaattatggtaatgttactaaaaatgatgtaatcagttcttggatttcacttgttgcattatgtcttgtagcaagtatgtgatgttagaatgagaagagcctccttcttccacagccttgtgagctgattctccaagctctttgactcttcttctcctctcttttgcatcatcactcgcacccattaactcttccactgccttctttactccttctttatccactaacactcctattttctcctcttctccccatttcatgacttcttcaaccccggcacttacaccggcttttagtacttgaacgaccagtttttggttgcagaattggtctccaaacagcggccaagtgatcagtggaatgcctgaggtgattccttcgagagtcgagttccatccacagtgtgtcaggaatcctccaacggaaggatgtgaaaggataaggacttgaggtgaccaccctttaataagaagtcctctctctttgattctttcttcaaaaccgctctccatcatccactcatatagttcattatacttttcccaacctcttatgacccaaataaaagatctttgggatttttcaaggcctagccccagctccttgagctgagacaaaggtagattacagatacttccaaggcaaacatataacaccgaaccatcttctttagaatcaagccattgaagacactcatcttgatcaatggcggcctggtttcccctctcagctttatcagcacctgccttgttgcacaaggaaacaggtccaatggaccatacttttccagccctagccttcgtgtagtctttgacataagcaggctccaactcctgaaatgtgttgacgatcacaccataggatgtgtattctgcttctaccatttcgtccaagaacgctttccaatctccacttgcagttgtttccactggaacttgaggctttgtaaattcaactctatcaggaaaactaggaaccaggaaataatctttatccgactttaagttcttcaagatctcgaggtttctgcgtagaacatgcatacacaaaagattaaagcaacccgtgccgtggaaaactatctttggtatactgaatttccttgcgattttgcttgtataaggcaagagcaaatcagaaataatacagctaggtctaggtttcatctcttccatgagcttcatgaccggatcttcgagcatgttaactgcttgaaagaaaggtaccatcagctccattgagtcatacgaatctatattctcttttccttctggcaaaccaaattcttgatatggaaaattcacatgcactatgttgatgggtaaaccagactccatggcacgacttaagacattctcgaacctccctgcattataacgtgtcgtgacaatagttactgtcgcaccgcgctgagccaagagccttgctatatcaatcatgggaatcatgtggccctgagccatgaaagggaaaagaataaagtgaagaggaggatgaactttgtgggatttttcggaagccataccggttccaactcaatgatgaactctcaagttttgtggtttttggattgtgtgtgatcatgtgatcgtgactttatatatagaagatggataagaatagtggtggtccaaataaggcttcattgacatgtgcaatagattacgtaacaatgttgttgttgtacataaacggcagatgttattacaagaggacacctcaaggtcaatactttcttctgtcgtccttttgtgaccattttgcattttcttgtgtcttttctttaccaaaaacgcgtaaaaaatatgatacttgatccgcaaaacacgaaatcaatattggagtctcagttagctataaaagtccagtaattcactaacaaaatatgactctttcagacattaccaaaatcagaattgtgtttgaaaacatcactaaacatcactctctatttgacgttttaaacttcagttcagttcgtatacaaaaaaaaattcaatgtaattcatatccatagccgccaaatctgacacttgagtcttttcaagaaaacgtactatatctactagatttcatacatataacacttttgacaaaaaaaacaaaatcattataaatttataattaggtcaatatgaaaaagcagggatagaaatgagattaagtcaatccacaataaactgtgttcgtcgtttatgataattaggtataactgccttacatttatttttagatatgtcgaaacaagttttaagccagctttttggaagatatataaagataacttcagaaattatcactgatttatcttcttctgattcattatccacgtgtttaacaaaggctctgatttaaatttctccaatatagaaatcaaaaactgtttaatgtttaaatttctatgaacataaaatgacatatgctcaattcttgaattgtgctagttgcattatgtcttgtagcaagagtgtgatgttagaatgagaagagcctcctttttccacagctttgtgagctaattctccaagctctttgactcttcttctcctctcttttgcatcatcactatcacccatcaattcttccacagcctttttcactccttctttatccactaacactcctattttatcttcttctccccatttcatgacttcttcaaccccggcacttacaccggcttttagtacttgaacgaccagtttttggttgcagaattggtctccaaacagcggccaagtgatcagtggaatgcctgaggtgattccttcgagagtcgagttccatccacagtgtgtcaggaatcctccaacggaaggatgtgaaaggataaggacttgaggtgcccaccctttaatgagaagtcctctctctttgattctttcttcaaaaccgctctccaacatccactcaaatagttctttatacttttccgaacctcttatgacccaaataaaagatcttcgagattcctcaaggcctagccccagctccttgagctgagacaaaggaagattacatatacttccaaggcaaacatagagcaccgaaccttcttctttagaatcaagccattgaagacactcatcttgatcaatggcggccttgcttcccctctcagctttgtctgcacctgccttgttacacaaggaaacgggtccaatggaccatacttttccatccattgcctctttgtagtctttgacataaggtggctccaactcctgaaatgtgttgacgatcacaccataggatgtgtattctgcttttaccatttcatccattatctctttccaatctccacttgcatttgctttcacaggaagttgaagctttgtaaattcaactctatcaggaaaactaggaaccaagaaatactcttcatccgactttacattctctaggatctctaagtttctgcgtagaacatgcatacacaaaagattaaagcaacccatgccgtggaaaactatctttggtatattgaagttcttggcgattatgcttgtataaggcaaacaccaatcagaaattagacagctaggtctaggtttcatctcttccatgagcttcatgaccggatcttcaagcaagttcaccgctttgaagaaaggtaccatcaactccgttgagtctaacgaatctatattctcttttccttctggcaaaccaaactcttgatatggaaacttcacatgcagtatgttgatggccaagccagactcgatcgctcggtttaggacattcttaaaccttgctgcgttgtgaggtgtcgtgacaattgttatggtcacaccacgctgagccaagagtcttgcaatatcaatcatgggaatcatgtggccttgagccatgaaagggaagaggacaaagtgaagagaaggatgaaattggtgggttttttccgtagccataccgtttgcaacgactcaatgaggaatactcaagttatgtgtttttaatttcttcgatcatatatgtgaggttatataagataagaaaagtggggataaaaaaaagcttctctaacaagatgtagtagatgacgtaagacacgtagagtaatgggataataattgacaaatttggtagttcttactacaagaggatattccgtgtccaaaactttcttctctcgtctttttgtgaccattttactggtaaagcttacaaagatattttattttaaattaaaataagatacttgatccacgagacagaaaaataaatttgggctctttaagttagttacacgatacaagtctcaaaatcgaattctgtttgaaattttaaagttcaatttgttctggtagatgcatgacactaaaagatgatatatggatccacagtcgccaaatcgaacttgactctttccaacacaactttatctactagacgttaacaaatattgatgggtcacatgcacatgtagtaatataaccggttatatatagccattattaattatttaaattcacgtgattagttgaaaataagatagttaacgttataattagtgttatgttttttttaaaatgtaatattaatgtgcgaatactaactagtactaataacttttacttggataaagatcgaaccaaattatttctctataaatagaggattatacataatgtttaattttctaagtttcgtacagttatagagtaattttgggttatgatatgttaaattaaattatgatttttaaattaaatttattatgtatgttaattaacatcttgattcagtcacactttttaagaaaaatcatgttgaaatttgaaggattaatcggccttgaataaaaaatataacattttcaaaagatggatagattcacaatcattaatgggaataaattatttaacaatattttacgaatcatttcacctcaaatgtttttgggacattgaaaagggatagaaaaaggttatgtcgtcaatcgttcttggtttaggttatctcgaactttaaaccaactttgtcaaagtaaagataactccagaatgtggaagttacactagttagttgtcttctgctaattcgtacaaatgtgtaactaagactctgttttaaatttcacaaatacagaaaacaaaaactatagaatgtttaaattcctttgaaaatatgacatatactcaattattggactgtgctagttgcattatgtcttgtagcaagaaagtgatattagaatgagaggagcctccttcttccacagccttgtgagctgattctccaagctctttggctcttcttcttctctcttttgcatcatcactctcacccattagttcttccactgccttcttcactccttctttatccaccaacactcctatcttctcttcttctccccatttcatgacctctttaacctcggcacttacaccgacttttagtatttgtacgaccagtttctcgttgcagaattggtctgcaaatagtggccatgtaagcattggtagaccagcagttatcccctcaagagtcgagttccatccgcagtgcgttaagaaccctccaacagaaggatgtgaaaggataagcatttgaggggaccatcctttgatgagaagtcctctatcttggattctatcttcaaagccgctttccgagaaccactcaactaactctttgtatttctcccaacctcttatgacccagatgaaaggtctttgggattcctctaggcctagtcccagctcaaggagctgagacagaggaagattacaaatacttccaaggcaaacgtagagcacagatcccggttccttagaatcgagccattcaaggcactcatcttgatcaatatctgatttgtttcccctctctgctttgtctactcctaccttgttgcacaaggaaacaggtccaatggtccatgctttaccagaccttgcctccttgaagtctttggcatacgcaggttcgagctcttgaaatgagttgactataacaccataagatgtcttatccgcttctaccatatcctccaagatctctttccagcctgcaggaacatatgtttccaccggaacttgaggtcttgtgaattcaactctatcaggaaaataaggaacaatgaagtactccttatcagactttaaattgtccaagatctcacggttcttgcgcagaacgttaacacacagaagacaaaagcaacccatgccatggaagaggatctttggtattttgaacttcttggcgatttcgcttgtatacgacaaacacatatcagagattagacagcttggtcgcgggctcatctcttcaataaggttctggactggttctttgagtaagttaaccgctttaaagaaagatgttatctgctccatcgtggtaagcaaatccatattttcttgtccttcttgcagaccagcttcttgatatggaaacttgacttgcactaggttgatgggcaaaccagactcaatggcacggtttaggacattcttgaaccttgctgcattgtgaggcgtcgtgacaattgttataagcacacctcgctgagccaagagccttgcaatatcaaccatgggaatcatgtggccttgagccatgaaagggaagagaacaaagtgaagaggaaaaggttcgttgtttttttcgaaagccatgacgatgcaactttagtaagaacctctcaagttttgtttcgttttcggttaatatctgtgtaagcttatatatagaacaagatgcgtggagagcaagaaagaaagtgaacagaagacgtaaacagatttttacttgccaaacacctctttttaagtccacagattgtgcttgcgacagactttagtaaatgcttaagtttgtccgtatgtgaccatcctacatcttctagtgaccttccttctcagaaacattttagagacatatcttcataatgaaaaagaagataattcacatacacaaaaacagcaacttggagcctcactgatagctacatctatccgcaagtctcaagaagcaaaataaacaaagaggaggccacatacataaattactcatgttaccaaaatcgaattcgtatatgaaacttcaaagaccgattaaactctcatataaaacagtaaatgaagataaatccaacgctggaatttttcaagacgattatatatctagcagaagcctcaaaaatataatcaacaaaacgagttcgtgtgaatgtttctttcgtcagttcaataatagagatgacacacaagtgacaatatcctttacacgatgaaaacataataaactttacaacaaacacacaaacataatatatttcaacgaaaattagaaaaacactaataaaatctgttattaaaaaaagcatgagagaaatgaacttacttatttatgaattttcatttcgtgtcaattttggaaattagaaactaatttatgatttctttttcatccgtttttgtaagtaaaagaaaagaatttggctatgtagtgcatatttttcattttattagtactatatatgagtgaatacaacatttttttgaagatatgtcttaacgaatcttaaggaaactttttggaagttaaacatgacttcagatttggtgatcaaaaaaaaaaaaaaaaaaaaaaaaaaaaaagaaaacatgacttcagaagtgaaagttatcactgagttgtatttagcagctgattcattcatccacgtgtactagtaacttttagttggatgaagatcgaaatcaaaactatatctctataaatagaagattacgtacagtgtgtttaatatttctaagttttcatgacatatatattttgagtatttttgggttatgatatgctaaatttaaattattatgcatgttaattaacttctagaatcagtcacactttctaaacaaaatcatgttgacatttgaaggtaaatcggctttgaacacaagagataactttttcaaaacattgatatactcacaattgtactttttaatcattactgggggaataaaatcatttaacaaaatttgtgtggaaatttcacctcaaatggttttgagacattgaaaagggacataaataggttatgtcaattgatcttggtttaggaaaattaggcgcagccttaatgttagataagtctaaacgaaccttaaaccaactttttcaaagtaaagatgactcgagtatgtgaaagttacactaattagttgtcttctgctaattcgtacaaatgtgtaactaagactctgttttaaatttcacaaatacagaaaacaaaactatttaatttttaaattcctttaaaaagatgacgtatactcaattattgggttctgccagttccattatgtcttgtagcaagaaagagatgttagaatgagaagagcctccttcttccacagccttgtgagctgaatctccaagctctttggctcttcttcttctctcttttgcatcatcactctcacccattaattcttccactgccttcttcactccttctttatccaccaacactcctattttctcctcttctccccatttcataggctgttcaaccccggatcttacaccggcttttagtacctcaacgaccaatttctcattgcagaattggtctgcgaatagcggccatgtaagtagcggtagaccagcagttatcccctcaagagtcgagttccaaccacagtgtgttaggaaccctccaactgatggatgtgaaaggataagcatttgaggggaccatcctttgatgagaagtcctctatcttggattctatcttcaaagccgctttccgagaaccactcaactaactctttgtacttctcccaacctcttatgacccaaatgaaaggtctttgggattcctctaggcctagtcccagctccttgagttgagacaaaggaagattacagatacttccaagacaaacgtaaagcaccgagccatgtttcttagaatcgagccatttaaggcactcatcttgatcaatgtctgatttgtttcccctctctgctttgtcggctcctaccttgttgcacaaggaaacgggtccaatggtccatgctttaccggaccttacctccttgtagtctttggcataagcaggctcgagctcttgaaatgagttgacgatcacaccataagatgtctcattcgcttctaccataccatcaaagatatctttccagtctccagctggaacatatgtttctaccggaacttgcgttcttgtgaattcaactctatcaggaaaatcaggaacagtgaaaagctccttatctgactttaaattgtccaagatctcacggttcttgcgtaaaacatgcatacacagaagacaaaagcaacccatgccatggaagaggatctttgggatattgaacttcttggcgattttgcttgtataaggcaaacaaaaatcagaaattagacagcttggtcgagggttcatctcttcaatgagcttctggactggttcttcgagaaagttaaccgctttaaagaaaggtatcatccgctccattgtgtcaagagaatcgatattctcttgtccttcttgcaaaccagcttctagatatggaaacttgacttgcactaagttgatgggcaagccagactcaatggcacggtttaggacattcttgaacctcgctgcattgtgaggcgtcgtgacaattgttatgatcacaccacgctgagccaagagccttgcaatatcaaccatgggaatcatgtggccttgagccatgaaagggaagagaacaaagtgaagtggagaagatttggttgtttcggaaaccatgattcaaccttagtaagaaactctcaagttttgctttggttttggttaagatttgtgcgagcttataaaggataagatgcgtggagagtaaaacataaagtgaacagaagacgtaacagatgacgtaaacagttttttacttgccaaacacctctttttaagtccacagattgtgcttgctacttagtttgtccgtatgtgaccatcgtagtgaccttccttctcaggaaaagtttagaaacatatcttcataaagaaaacgaagataattcacatacacaaaacaacaacttggagggctcactgatagtgatagctacatctatcgtcaagtctcaaaaatcaaaataaacatagaggccacataaataaattaccaatgttaccaaaatctaatgtgtgtttgaaacttcaaagaccgtttaaactctcatatgaaacactaactgaagataaatcaaacgttggactctgtcaagacaagtatatccaacactagcctcaaaaattataatcaataaaaagaggaccacagcctacaacaatttcgtgtgaatgtttctttcctgagtttggtaatagagatgacacacgagtgacaatatcctttacaagatgaaaacataatacactttacaacaagcacaaaaacctggatggtttctcattgcacactgtacctatggatatatatcgcaaacccccccaaagttttcggcagtaactggttggtattcacacagaccgtaatgcacatgttatttcttaacagattcgagatcattggcttttctacctgagtcggtcccgtcaagtcgagctcctctccacagtgttgacttgcttgatcttagcagtaacccaaaggctgatgagcatgctgctctcacaactgaatcttgcgaccgggtcatcttgctaaccagcgtttcaaacacctgaacaagatgacaggcttgagaactaataaagacttatgtgcatgttatatgtagtttctctaatatacctgtgggtagtagagagagattatgtgctgatcctctgagagtgacaacatggtggtggagaagtgtattgcattcgcctgaattactggccacggtgcatcaaaagcctgcaacgggtagtactcacttcagtttttcttgtatatatatagtttatgaatttggcaactatgatgcttattcgaggagagccgaacctggatggttgaggccatgtaagtatcaactctttccgactcttgaaccaagtgctttgagagatcccttacgaagttttcatagtcagttctgaaaatacaaaccattttagagataacagtggtcaaagtgcacaaaatagatttggtactcataggacggcgagacatacctatcttcagaaccaaaagcacgtgaatcatagagggtagaatagtttattatgtccacgagtggagcaaaccgcttgagggttacctattcaataaaaagggatatgtaaactgaaagatacctcaaagcaaaaaaaggagcaataggctataaagaaaaaatacccgacaagcctgtcttatgctaggatcatcgtcatggagatgcactaccaagcgtggaagggtggaatgaatctgatattagacattttcatccaatgagattaaaactgaaaaaaacttctttcctcgacattattgaaaaggaaacgaaaagggtttgtgtcacctgctcaacaaatccctcacgttgccctccagtagcatatttacttaaagctccaagtgctgaaaatgcattggctctcatcttcgggtccatactaacctgttacaaattggaatttcaagtaaaattagtggcaacgcactcctacagaaaaaatgtatctgacagtatagtgaacttagagaactggttttgcaatttttcttctgttcaagcttgactctggcctaaacgctttatttttattaatttcagttataaaaacattttgggtaacttaaagctagaccttacctgaaggttacgaagccgaacagataaattcagcaagataggttcaacagcatcattagaagctgactctgtaacctaataaaaagaaaacaagtatatgaagattaaaaaatattgctaacagatctgacagacagtcagaattcagaagccttgagttgttaatgggtttgagcattaccatcaacaagcatgacactgcagttagttgcacagactcatccagatcatcaagcaacgctaatattacaccaataacttgagttgtgtagtggctcatacaagcagatggcatctggtaaaaccacgaaacagctaagtgatgattctcaggaataataaatttgggaaaaaagagaaacagcagacaccaattttaatttcgtaaaccaccttagtccaaaaactgataagctatcctctagcatatgttacaagtaactctcattgcatcaacatgctataaatatgtgtataaagttgttttacttagtggaagataacacatctccataatgagtgttttagggttctttagatattaactgttgatctgacatcattgtaataatccaacaggagcatatactttatggtaagcctactagaagatcatgataaggagtaaaggtgatccgtataactctttcttgcactagtactcttagacaatcaagataagtaaataaacactgctgaaaattactcttacttgcactaatcctcttagacaaaggcgccttacagtcggagaatcatcggacacatggcgacagagtgcttcgaccatctcctccattacagaactaaaatcaccactgcaactcagaaatattagtagagaaaagttaagaagataaggtaccaaggaagtgctttgtttacaacacatgtcaggcaagatgcttcagtcctttgactttctttccttatcttttatatacacataacttagaactaaaaccattattgtcactttgaccttaactttttttccaaacagagcttactagatagatggttacatgcatctagatcaatgtgtcactaagccgagtaagactacataaaactacacctgtaggaaataaaatcaaaatggaaaaaaaagaaagttttaaggacattgaaaacattatacctgtagcgtataaactctgacaatgcagcagcagcagcttccctttgaaatctttgtggacggtttagtgcttttgttagaatcatgcaaatatgtcgaacctgtaacaccagtactaaaacttaagtctaaaggaaaattgtaatctttgtggacggtttagagttttttttatattactttgtcgtaaaaaggtcattcctttttcagactgaaagaatccctcatgtgtattaaactactatgcacatatatcatgacttcccaacaagaatggtcatgtgaaaatccatattgccaccattgattactcaactattgagccaatgatcaattggtgaaacacaacagtttggctacaaagaccctgaaaacacaactgcattaactaggtacctacctccttcggtctcttaattgaaatgcatccagcaatatcgccaattagaccaacccatttttctttttctatttgctccccattacgagccaaaatctaagcaaagacagagtatcagttcatcatactagaaactaaacagaaccaatttaatgttaaagttaaaaggtaccttgcccatctccagatcaccaacacactcacagaaagcctgaaatgaagttagaagtactctgccaagagggaaacaaattacaaaggctttactaaaataagagtagcaatcgttatctgcctacagttctcttgaaagtcgatgagttaccgtaatgggtcttgctgaccagaacttgcaagtccatgacagctacccaattgaagagtaagtgccccaacgacagaagagtagcttttctcaacagctttctttccaatttttccgccacccctggttaattgagtatattagtcatcaaaaatgcatcatctattctcaagtaaaattgatggtttatgaaagctaccgaaaaaaagcagtgagagcaaaaatggcagcttgaagaatatcatcttctacatgtgtttcagaagaagagctagtattctctcccttatgtgaatcacttttaactaaagaactacgattgagaatggatattaagtgttccatgaacaaaactgaaagctccgtatgttgagagaaagcctgcatcaaaatataattggcaatgaggggcctcgtcaaacttcgagtaagacaatcattcccaaaattacgttaagacttctttagaagatgatataatcatgaaagaaaagaatacaaagtaatatcatgtatgagaataatcaatctcatattataatattgttccagaggaaatggtacttacataaaatgcatcttgcattggccatcccccacgcattctagttatgtcctttgtcacgatgtcttttccagcagtggccaacacttcattaaacacaattgacgattgtgtgttctctgctagtgcagatatcttcatgtgattaaggtaagcagtaatacaccaagagcatacaagataaaatctagtgagttttatattatagaagtgtcacgttacaacttttctaacagaattaagagaaggatacagctccaatagcttcaacacgtaaattcttatcagttatatgaactgctgccgagagtaaggagtgagttgtcctgccagaagaaaaccaaaagaagaaaggagaacaaggttgtcagataacaataaaaaaggactatagcccgtctatgacaacaagctttgatgtaccttgatatatcattgtcactaagctgactccctcttcttgaaacaaactcagtaaccgcttgaatggctccctcagcagattgcctgattttgtcacagatagctgcagtgcaactatgcaaggctgctacaagctacatgacatagcacaacatgatgggaccacaaccatccaaaggaaccaaaatttacacaaaagaaggagtaaaacaaacctcatgctccgttaagagagaacaaatggaagagactattctgttaaaaacttcagatggatcaatagaggcatcctgaaagccaattcaaataaatctgacaccctgaacatgaagcaaacaaaagaaatggacataactctgagcctaaccacaaagtgcttacacttttcaatatggcaatgacatcctcaagggaagacagggctttataggagtcttcagaatccaacccgcttgtaagtacagcttttggaagggaaagggaaatgctgaagaactggtcaagaatctaacaaaaataatagtaggagaaaccattagaaactatcaatgtttcactcagtttaaatgctgacccatcgtcttgtgacacagttgatcaggataagtactaatcaaatacctgtgccgaaattttccgtacttcagaatttgtgtcagcacagcgtgggagataggttatgaccctatctcccaaacataatacctcgcgatcaggaaataaaaataccgctgttggtcaaacaaaggaaattaattaattagctggtagataatatacgatataaagatcaaacaaattgttgaaggatatcttcctacatggtagatttgaaaaattcccctgcatactgcggtcagcatactttctatgtgggcaatccccagaacaaccaagagcacaatagccaccaacacaaagcttacgaaactttagaagcatctcatgaactgccacacaacctctttttctttgataatcaatgggtgacgaaacatattgatcaagctgtctaagcagatgcaaaagctgctccgctcgacttcttccatcctctccactagttcatgcacatatatcattgaataagcggcataaaaatacttatacaaatttgtacatacacttgtagtaggactcaatatttgagactccaaatccactaccataatcactgaatctaatctaacattaagtaacatgtaagttatgcaagataatgaaacagatcaaataagcttataagagacgaaactagaaattaagtctctaataaagtactttaaataaataagtaaaaactgaaagaataaacctagaacatggataatttatttaagaaattccactgaagacttcagttttacagaaagtatttcaccaatgggaataataaacagatcaagaaacttttcctaagattcagagaatctgcagtcacataacagcttggcgaatttaaaacttgtcaagtaaataaataccttgtaagaaggatggcacacaagagagtcacaagattgtctataaggggactaatgacatctgatggatcattaggcaaagcaaagaatcccagtgtagcctgtccacgaaaacaagtaaatccaagagaaaatgtataaacaaaacaaacagcactaatctcattcttttctttttatactcggttcaaacgagaaaataatcaccttcatgacacgatttcgagtttcaatggtcagctttggttccacagagacaagtgttgtgcatgcattcagagcgagtgcctgtacaaatttattagaaagagaaatggtatctgcctcttcgaaagaaatgtcacatggtacagattcttgacataaagtgtactacctgagtgtgtagaacttcgagactagattctgcaaaaccttcattttcatctcggcccatcaaagtcaatatataatcaagcatctgatctcttcttttcaatgggaatgtagcaccagtttctgcagcatttatgacagcacgaccttcacacaaagatacaaaagatcagggtcctatatcctctttccctaaaattatatccataccatgtaggcagtgtaacttgatagaaaaaatcaaagagaggaaagaaaccgatcagtcattgaatgaatgattccatcatctacatttcaacgccatactaacctaataaatcaatagcagttataacagcttgttttgctgtttgttgccgcacatgaagaagccgtgaaagcatattggtgccctgtaatacatgcaaacgaaatatgattatgaaaatggaatttgaaaataaacgtggtgcggagataacaaaaacaaggtctcaacagttcaaacataaatcactgtctggtcacaaaaaaactactcgaatttccgactcttcatgataatttaatttcataagatgagttttcttagcaagacttaaagtcaatctgacgcataagtttataacagattatagaaaaagaagcaggatggaagattataatctaattagaaatgcgattcatttgaaggtttagaatcatacgacaagtgcatctattctggcttcaataactgatgagggtgcatattttgcagcatatccatacatcaaagccaaagcagcgtgtatatcatcactgtcttctgttttatagctctcagagaagagagataagatcctacaataaaaacaagaacattaagtcagtgatatgtcataaattttgtaaacctgttgtaaaagtgaccaattctagaatgcctggaagcaactagatgactaagaagaagctattttctaatattaggaaaccttttgatataacattttctgcatgtgccactgtagctttaaatgtccaacttaatacacacataagaagagttgggataagctagaatttaagaaccttttagatacagccttccactactgaaatataaattatgatctaaaagagagaaataaactaataggttcgacaatgagtgacagatatgcaggcataactagatttttaacattagaaagtatatgtggtgatgatttcaataagtcaagcaagataaacctttggaaaatactctgcccaacattatccacgatgattttcagcttttccagtacagtgtccaagtgagaagccgcgacctacgcaataagttagcatattaacataggctgaaaatcaacatctaagagagaaaaaaggcaagtacactcaaaataccagccccatggccttcgccaaacccagtctatttgcaggtatagaaatgtcagcctgttcgtacatccagtcaatcttgtcacgaacatatgctctatcattaactttctggagaagtattccgatacacctgaaatcaaagcacaagaggtttacgacactgctcttcgctcaattaattaaataaatacagttttcagagagtttaaaacttatcagccatctctcagaatctgaaaaataacaataaaaaccacaagtaaaacaagcttgttcagccacatagtgaagtacacaaaacaattttatgtatactatcaatgcaggtatcggaatgtctctctttttataaactttgataatatgataaaagaatcagaaaatcaccagatacaaaaatccagaaagttatgtcaatcaaggaatacattttaaaattctgacaatatgcgacccacttgctgatttgatgttagaaggaatcaacaatccaagccaactatattttctcaacaactaacgcaaaatagtcaccaacaaaacgtagaggtatgtcaacttcatcagagaccagaaaaaaaatgaaaaaccaagaattttaccggtgtagaagtgctgcatggtcatcatccggagcgtaaagaatatattgttttgcaaaagaatttccaagagatataacccagtcagcatcctgggtgacatccaatgattctgctagaaactgtacaaaagaacaatgattagaagtaatatatagatcaaactttgataatatggtaaagaaacttcagctcagaaagatgttttctttttctttcacagaagttgaataagctcacattgattatcatgtcatcccaagtttcctggtaagttggatccagcttcagatcttctgtgtcatagacatacgccttcatttttggaatctagagcttaccaaatgtgaaaactaattagggtcacgtgtattagtagctaaaaaaggcaatcttcaagtagcgcttaatagtggtcataagattatctagaacaaacaacagtgtacctcatcttgccaaaacatgctgatgttctttggaaaaagaggggatagatagccaaggacctgaatgaagtaacaacagagaggttgacaaaagctagaacttgaaagatgatcaagcatttacacttgatggaaaacatgaacaaagaaagcattgtatagaattatgggacataaaatgttagtctattacaggatttctgaagttattgacgcaaactcaccgtcaaaatttgggatgctaactgctcttttgccagagggttgtgcaaaagaaccaccaaacgggtaaacaactcctgcaattgtaatatatgtgcatacatattttcaattttgaaatcttgccatacacgatatatcatttgaaagagtgtaagaagaaatttacctcagggttcggaatatcagcacgagctttacactcgatcaacatgggggtggttgaagatctacgacgacaaagttcagttatgcatctacatacctaattataccaataataatgttaactctggtccaatctctgaaaaaaaaaattctaggcaacaaaagaaagatcttactgatgcaacagcgccagtgtagaccttagggataatcattttcagtaggaaaggccaaagaatgtactgcaatttcatatactctttagcattaaaatctgaaagctataagtaatgggatggttctattatattaaaataaaaggtgtcgtacctccatctctgggattgtaacggtcaagagcagaagaccttttccacaaactgctcttagctgtgttggactaactagttccccttttgcctaagagaaattttgtagctcatgaaaaataagtaacagagacagtagtacttcaaacgtgtctgaaacaacactagcatatgtactctgtatatacagtggtaagaagactccaagacttgtagcaagtaaataagaagactcaataacacaacctggagtaagatcatgttccaggtttctggtaacgttagattattactaacagcaacacccaagagtcaaccccaacacttttctcaattattatcctagatgaagccgacaagtcactaatttttaaaaaacaacttaagcaggatggatgaaatatctaagcaccagaaaaaaaatcatggttaatggcaacaaggatacgaattcttcactgcatttaaaacactcggcaggacgtgaggatacctatatttggactgccttaccctcatatttcgttactttcagataaataacaacaaagaaggcagtccaaactcaataccatatgttatgttatatggtcttaccttcagatggtcactctctcctattgcagaatggcgtacaaggtattcaacaaataattccccagatggaccgaccagatagcagtgtgaagccatgaccacgatcaactgtcattaaagtagaagcactatgctaaagcatgcatattttagtagtaaataagaaaatctacgccagctcagtacctctgaaagggcttttcgaacagctaaactttgctcatctaacaaagaacttgcagtatccaccaaaagaggccgttttgagtgccatgcttcaaacaaccttcgaacacaatgcaacatcattaagttaggatggtaaattaactctgaatgataagttatactgatgaaggataaaagaatacacctcggaagcagatgtttcaagatgcaaagagcaccaaacgtcaaagggtcttctttcaacttgcatttctggtgaaagtatacaaggaagacagggatttcaaatatgtaagataaaaagcccatataaatatcacacagatgtgtggcaaggaatagttcttgagtctaatatgagtgctaggtattgccaccgttttgcgttacatatacaaagaataactagagccataatcataaaacaaaagatgtccttacgttaagaagaaatgtaaacaaatcctcagggtaaaccaagccaacagtcagaaaacaccgctgcacttcattgtatgtctgcaacacaaaaaataaagaacaggcaaaatattaatacatcgctcccaaaataaggctcaaaacatgatagactgaaagcgatcagtgacttaccttccgtcccacagaaatatctgagaacctttttctttcattattgataccgatcacaggaagaagtgttgacagaacaattgtgaggtcctgacaagaaacaaaacattgtataacaaactattttacatctttccagtaccgcatcacatccgaaaaaacaatgtgccagatgactgtagataaagaggcaccttagcaacaaaaaatgatggaaccaccagtacctcaaaatcaagcagtggaggaccagactcagaaagtaacgaggcatttaaaaggttgtgaagactacatgtcgccaaaagagcatcatcatgatctttcttatacctaaaaattgaaatgaaaggaatgaatgatcactacaattagaatttaaaaaaaaaagaagacaaatttacacgaaaagcatctcatgtctttgtacatacttctttctaacgtagcaaagctttatttgtggagtaatatatgaagcagacaacgaatatactattcgctgggcctttgagaagtaaagcttgagtagaacgaaacatagaataaaaaatagaacttacagttcaagtattgctggaataagccttggtaatgctgatttcagttgtgtccgcgtgataagaccgaccatttgacccagagcgtctacagttgatactcgtaccttattcagcagaagaggcacactttaaagtcacgagacatgtctggagagcaagtgaataactaactagcaatatcttctagagatgtatctctccatattatgaatttcaaagatacattactgggggaagaggaaagaaaaacccgaaaacaaactttcatttcttatttttatcttaataaagttacataccatctttcttcattgtctttgttataaaataatagtctgtgaacatttacgaaccatgttcttaccttggtaatctcttgaataatatttttaaactgaaacgcgcaatactattaaaacgtaaagtggagtataatgctaaaagagatcagggactcaccttatgatctcgggaaactgcccaaactctcaacaatagctcaaaaactgaattcagaaatgacctgcatcagatgaagcccttgatttgagagcgtttaacacaaaaactggcagaaataaacagaacaaagaaagtggtctcacatgacatcactgtcaagcggagaatctgaggtaagatctgtgatgtatagccacactgcctgagaccagcacttaaatgctaaacacacaaagtcgataattagagtgcgaagatgtacagatcaacaggttaataacctacttttatgttagtatgaattatattgccatattggttcagcaagaaaacaaactctgacctcatgacccttctagaagccagattagagtcaactaaccacatagtgcaagacaaaaaaaagcttacaggatgagggaggaaaattggcacaaaatagtagtttctgtaaaagaatttcactccctaaacaaaaacagactacaaaagtttcactgtaccatttgcaaatattggtcggtgtatgtcccgaacattcccaagaataggcgacacctttgaaagtacacctttcaggcgtggagtgaactgcaaagcttcaaaggaaatatgaaagtaactcaaaatatcagagaactgcaagttccataaacttttcaatatgagaaacaaaaaattacagggacacgaatgagagttagaaattaaccatcagatgaggcaaagtcagcaagtatttgaaccatagcaggtgcagctgtagccggaccagacagatgaagaaatatttcttccatcatctgtccatatcaattaaaaaatatcaaatatcttggactttatccaaaaagaagggaaatcaagccccacgtctaacgggataggctgccttctacctcataaatgacagtatagagacaaggaccagctttactcatgacactatctaaaatgtctcaatatagatgttaacatgatggcagatgaaagtctctactatggttttctcagcagcaactcatattatatcatgcaaactatcaaagataatccgaatcgtaatgcatctcaccaccaatcatgttaccaaccttttgtgtatagtaaaaggcaacaactcaagagtgtacagtcacatggaactaaaaaaacagttttttctcaatgtcaagaaatccctctttgaattagcaaacagaaaagaaaaaaacaagacttacaagatcaggaaaatgtgttccaattgagacgagcagccctgatgcttgcctttgccaatcagcatttagttcctacgttatgatgaaccattaaaagatccaaaattgatcaggaaacatatacgaacagttgcgagaaagtttgtgagcattgcaagaagtgtcccctgtttttatagaaataatgtagctcacctacgattccaagttcactacgtaaatctatctaactatcagtacgtacaaaaaagaaatctttaacaatgattcagccgtcgcaacacaccttggaagatataatctcagctgtagcaatcttagcaagctttcccatgaaaactgaatcactctcccctttctctaacgcaccaacactaaatgccattacttgaaaaaccccagccatgttaccaaaccgctgcaacaccaaacagcacaagatttaagtttcaacccaccaataaaaggaaacaaaagacaagcaaacagaacattacccttcgtcctccacgagacacagcatagcaacaatcaagtaccagaagcggattcctaaataaaaaaaaaaaaaaaaaatcacacaacagctcagtatcaaagatctcccgatactcatagttgcatgtcttgtgtacgaagtaaaatgagataaatagtacatacagggaggcaatatctctaagagaagccatggaagcttctctaaccacagaggaatcatcagctagagatgataccagaagttgaacagcctctgccaacaaaatataaaaaaagtaaacttgatcagataaaacagacattgccaaaaccaatgttgacccaattacacaattcaagagttttcgatcaaacaagccaatacactgatcaatttgaggtagattaaaaaatcgaaatcgaagattcaggaagaaagttttatacctggtgcagggattgagctccctaaacttgaagaagccatttcaaaaaccgatcaactatttcaaaaacccagaatttcgaagaccaaaaattcgactgttttgatcgatcaagatttttttcagacggagaagaatccgaccgagagaggtgagaagaaagagagagccagctctcggagctcggtagttagttatgaaatttgcgtcgcctcttgtcggagggacttgaatgttaaaaagaaaaagtttgggggaagaaaacaaatatatgaaaccaattgtaaccgatggacccatacccgacaagacgggtccgggtataatagcggtttttttaagcccgttgcttttggatcattcttttgtttctatagattgataagaatgctcaaattattggcccaataatttgagcggtgttctctgaatcactttgttccttttttctttcaacactaactagagtgtaaattatggctttgaatggaggaatgcaagtgttggatgcagcaaaattggagtagtaacactaataagtgacaattaggatgatgatcatctataagagtaattattataaactttggcttcatttttctatttccatttgtttgtgtactaccaaaaaatttacacaagtgggtaaaaaattcgttttgcaaaacactgctttcaagagacaagtatttaccatgactcttgtagatagagatcgagttccaattcctctaaccgataatttataaatctattatcttcacgtaggtaggataatggcggaagagtgaagattccatgagcaatttttgtacttcacacaccgacttgaatctaatgatacatgttagcaatattttccccggaaacatttctctagtcaattggctttgcttcttcttagctgttttcttatgtttgcttcttctcgccttctttctcctatattttttttttccatagtgtgataattaagggcttgaacctacaagagttttctttatttaattattttattaatgctttcaattttttcctaattattatatttgtaatagttaaatttaatatattatttttttcttttaaagaggtagaatgtggtgtgcaattaccaattaggagaggttggtttaaaaaaatggagaaaattaaataccctttttcagtttttgctttggactaagtttagccttttagctaaatatacgtaaaggctcgagcataacacaatccgatattctgaaaatctgtttcaatcacaagatccattatcgtcggatcggagaggagaagttttcaccaccgtcccactgatctcagattgtcgtctccaactagacaaatatgaattttcatggtaagagtaagagagataggcatggaaggcggaagaagcagagagacgaaatcgagtatatggccaaaagggcactaagtgcttcaaagaaactgaagagacagtcagttattgggtactccaatgattcaaacccttttgggattccaacatagccgagacattcgtgtggcggaagaagattgaaaaagatgttcatcatggagcatctctagatgaattc

SEQ ID NO: 339 - DNA, 134151 bp, Arabidopsis thaliana
aagcttcccaggaaactgatcactctccctttctctaacgcaccaacactaaatgccattacttgaaaaaccccagccatgttaccaaaccgctgcaacaccaaacagcacaagatttaagtttcaacccaccaataaaaggaaacaaaagacaagcaaacagaacattacccttcgtcctccacgagacacagcatagcaacaatcaagtaccagaagcggattcctaaataaaaaaaaaaaaaaaaaatcacacaacagctcagtatcaaagatctcccgatactcatagttgcatgtcttgtgtacgaagtaaaatgagataaatagtacatacagggaggcaatatctctaagagaagccatggaagcttctctaaccacagaggaatcatcagctagagatgataccagaagttgaacagcctctgccaacaaaatataaaaaaagtaaacttgatcagataaaacagacattgccaaaaccaatgttgacccaattacacaattcaagagttttcgatcaaacaagccaatacactgatcaatttgaggtagattaaaaaatcgaaatcgaagattcaggaagaaagttttatacctggtgcagggattgagctccctaaacttgaagaagccatttcaaaaaccgatcaactatttcaaaaacccagaatttcgaagaccaaaaattcgactgttttgatcgatcaagatttttttcagacggagaagaatccgaccgagagaggtgagaagaaagagagagccagctctcggagctcggtagttagttatgaaatttgcgtcgcctcttgtcggagggacttgaatgttaaaaagaaaaagtttgggggaagaaaacaaatatatgaaaccaattgtaaccgatggacccatacccgacaagacgggtccgggtataatagcggtttttttaagcccgttgcttttggatcattcttttgtttctatagattgataagaatgctcaaattattggcccaataatttgagcggtgttctctgaatcactttgttccttttttctttcaacactaactagagtgtaaattatggctttgaatggaggaatgcaagtgttggatgcagcaaaattggagtagtaacactaataagtgacaattaggatgatgatcatctataagagtaattattataaactttggcttcatttttctatttccatttgtttgtgtactaccaaaaaatttacacaagtgggtaaaaaattcgttttgcaaaacactgctttcaagagacaagtatttaccatgactcttgtagatagagatcgagttccaattcctctaaccgataatttataaatctattatcttcacgtaggtaggataatggcggaagagtgaagattccatgagcaatttttgtacttcacacaccgacttgaatctaatgatacatgttagcaatattttccccggaaacatttctctagtcaattggctttgcttcttcttagctgttttcttatgtttgcttcttctcgccttctttctcctatattttttttttccatagtgtgataattaagggcttgaacctacaagagttttctttatttaattattttattaatgctttcaattttttcctaattattatatttgtaatagttaaatttaatatattatttttttcttttaaagaggtagaatgtggtgtgcaattaccaattaggagaggttggtttaaaaaaatggagaaaattaaataccctttttcagtttttgctttggactaagtttagccttttagctaaatatacgtaaaggctcgagcataacacaatccgatattctgaaaatctgtttcaatcacaagatccattatcgtcggatcggagaggagaagttttcaccaccgtcccactgatctcagattgtcgtctccaactagacaaatatgaattttcatggtaagagtaagagagataggcatggaaggcggaagaagcagagagacgaaatcgagtatatggccaaaagggcactaagtgcttcaaagaaactgaagagacagtcagttattgggtactccaatgattcaaacccttttgggattccaacatagccgagacattcgtgtggcggaagaagattgaaaaagatgttcatcatggagcatctctagatgaattctctgttaaactaagaggatcagagaatgggagttaactaaagctcgtagaagagatgaggaattgcttgcttctcaagaaagagcactacacgctggtgttgaagctggtgtgagagaacttcttgatgggaagactcacgcggagcttgtacaactgcagtttgacatcgaatcgcagctgcgctctggagcagccaaagtggtagagtatagggaagcggttcttaaacgcctcaatagatataaagcaaaggcttgcttgaagaaataaacgctgagatacttcaactttaaacgacttcggtacaggcgataaggtgattggagttttggctggagaaaacaaaagtggggcagttatatataagactttggctggtgtactattaagggttgatttcaaataaatgaaatgccttttgtgtccagaaaatacatctacatggtggtagtttctatcttacaaaagtggcaagttataagacgttggctggctagtatcttgtttggtttgtttctatatacttactttccctttgttaattttgtgaaacgttgcttgtttattgataatctctatttcgcatgcgttcatttctggatgatgttccctatcttctgattttgatttttgtattgttaaaccgtacttcccatataacacatttttcattttgtagcaatgaccaatgagctttacttacaacatcttgagatgatagcacgaagtcgaactttcaagttagcagaattgtaaagggcacaaaataaaagcagtatatgggtaaatgtcaccaataaaatgcaccatggagagccggagagaaggtatgttatttgagtcggtatcaaaaacgaaaacagtcactggtcaggaaaagttacttctcccatatgatatatcggcagatttggtatgatgtgtgcgagttaagcatctcattcgttaataaaagcattagctataaacaaggaattatccatctttatataaccttattgcagaaatttctctaccatagcaatataaatacggtccttctaattttgattttgccgcttgattacttttgaaaataactaaatctggttactataattaagttttttaagtgaaatgaataaatttgtggttagatgattcatgattgtattcattaggggtcccataatctaatatatttatactatcttaatttgtcaacgtgatgatattattttctgcattgagaagccatttaaatttgcatacactctttatcacgttaagaaaaatcattaaaagtattatttaagtcaacaataataatgtgatgtgaattctttcttggttcaaaaagaaaacaaattcttttttttcttattggtcggccgggttaatagattgggcggtgtggattgtagttcgctcggatcatacttagaaatattgttggtttcttccctcatttttgtcgacttaactattttgggttgttttgaccccaaaaaaaaaaacccactattttggtttaatagacaaaatttagtctctgttgtttaattttgtttgatggaagtttatattggtccaaaatgagattcagttcaaattaaataaataaattatctatttaaccaaacttatttaaaagaatttatatgctctcaatctttttgtttgtaaagatttaaaagttaaaattttaaacaaataacaaaatggagcaacgacgaatctatcaacgtacgtacgttctcagacattacattgtacaattatttcgacaaaaaaaaaagcctcattgattatcatttatatattatatcatagagattcgtgccccttatctcgttttttttgcaagactaaacaagtaacaaattgcctagctgcctaaagaagtgaagataatactctttctaaaatcacaatattctcatagtaaaaaaaaacatatttatcatcatatcgtccaaatatttcagttttgttgtttgtttaacaatacaaattaacaatgatttaatttggagcacttgaatataatagtacaccgaccacaaccccacacaattcacaaacttgagaaagagagagaatatgcccaaactcaccaaacctaatcattttcataattaacgaaaaaaatagtttcggtaagatgatgatgtcttagttaacttttgcttactacttttttaatcattaaacaaaaaaaaatattaaaaatcgttttcacttgttcaatacatatttttaagttttatttataaggaaaaaaacttaatagcttattgcaccaaaactaatatggtccttatggatcagtttcatgtttttagttttttatgtaatgaaaatttgaattattttctaaaaatatgtgtacgatatggttcgatttaaatagaaaccatggttcaaaacgtcagattagtaacgttcataaaactgaacgacttaattatgtccacgtatacggttggtttctttcaacgtttttagatagttaatgctttgaaatcttagttagttatacaaaggtaaggtaaacggtccaaaaatgattgttctcaatcaagttttaaataagaaggagaaaaagtcaacaaggaaatgcaccaatcaataaagtgtcaccaaatatatgaggaattccgatgattagctagcgttttgaaaatacttcggctactagctatgtttttgagaagtacgtacatgtggttggtaaaagaatactggaacattgtcactagaacgttcgtgattgtacgcagtattcatgccagttgatgttgtgcaccatcaatgttcattatgtgaaccacccaaaaaggcaaaaacaatggatcatccacctaacaatccaccccaatctaggtagttctaaaatcacacgacttacatcaaaggaaaagtttcacatgtttatcaatcacaggtcacagtatgtttgaaagagatgatagaaaaaagatatcaaatttgtcccgtgttgataggaaagttggtttggtatcgtattataattttctctacacacacacgactcatgtttcatgtgttaaaaaaaaaaagcaatcgttttaatcccttccaatttatataaatctgcgggctctgtttttatataaagaaaattggatcagttgtatgaacttcgaactgtgcaaaaaacttcaaaatggttcaactattttgtcaaggcttgtaaaataaataaaaattagcacactgttaaaatttgtagtattatatttaaaaaaaaaaaagatcaaattaaacaaaagaaaaacgaaattatcacgtcttttatttattattattttaaataaataatatgacattttaaattttgtttggaaattaatcactttctggcagtacctctcagccgaattgtaaacctaaaccgcccaaaagggacagattgcatcgtggtggtaggacattcataaattattatttttccttaagtggagggccgtcacacaatactttttgcccaatagataattggcccacaaaataaaatgctaaaataaatatataatctttctgtatgattgtgaaaaaatgtgagattgtctcgaatgttaaaatttggtgccacaaacaatataaatatataatcacagaaaaattggtgccacaaacaagataacatcttataattttctcgtatacttggagagcgagttgaaagaattgcgattagaataaagcgtagtgatttggcattgaatatcatttatgctacataattctacttagcgataatataaaaaaatatcataacttatggttagcatgtaatgtcactatacgaatatcaaattcataaaactagccgtgacttatctacacagaattatttatgtttcgagaataaagacccaagagaaaacaacgacattataacaaaaaaacaacgacagattataagtaaggaagaaacaaatgactatagattagatatgaaatatttttagtaaccatctttagttataatttttgttttggagcttgctccgtatactcagttgagtatttttaccacacatatatcaagactaaattctaccactaatcaagtaaaaacctcttagcaaaatagttggagaaaaacaagaataaaatcgtattattttcctctagaactatcgatcattcgagagagagaatatgaaaaagggacaaaagctctatacatgtacaaacatgacaagtcattatccgccacgtagattggtcggttccgcttcgctggaattatagcgatgtacttgtttagcctgttttcaaaattatttaaatctctaaccgctccaatcaaataatttctccaccaaatattaataatatatcatccggtaaccggtcaccaaaatggcgccacctcagatataagtaagagcacatagtagaccagaaaaaatcatcaaatccatctcccactcttctagcatcttgaagcttaaatctcagccgtccgatcatgccgatcagaaacatcgccattggccgtccagatgaagccacccgtcccgatgccttaaaggcggcgttggctgagttcatttcaactttgatctttgtcgtcgccggttcaggctctggcatggctttcaacaagctcactgaaaacggagccaccactccttctggtctcgtagctgctgcagtggctcatgcctttggactcttcgtcgctgtctcagttggtgccaacatctctggtggacacgttaaccctgccgtcactttcggtgctttcattggtggtaacatcactctcctccgtggtatcctctactggattgctcagcttctcggctccgtcgtcgcttgcctcatccttaaattcgccaccggtggcttggtatgtcaaactaccctttagccctttattagatctctttttggacctaacttctttgtcaagtaactaattaaccttttgaaaattttaggctgtgccggcttttggtctctctgctggagtaggagtgttgaacgctttcgttttcgagatcgtgatgacattcgggcttgtttacaccgtctacgctacagccattgaccccaaaaacgggagtcttggaacaattgctcccatcgcaatcggtttcattgttggagccaacatcttagctggaggagctttctctggagcctccatgaatcccgccgtggctttcggaccagcggtggtgagctggacatggaccaaccactgggtctactgggccggacctctcgtcggcggtggaatcgctggactcatctacgaagttttcttcatcaacaccacacacgagcagctcccaaccacagactactgaattaatctctctttttctctcttgtgtaattttattcgactttgaatttgaattttaatgtctttttaatttccgtttgtgtaatttcgaatcatcaaggggtttatgatcgttcgatcttttagatgaatccttgtccgttggtttcaagagtggccattgcaatttcgactatataatgtgaattatgtatcaatctcatcttaagttttcaagtgttgcaatatctctttttgccattttgtcaaacttttaaattccacatcagtcttattacacattaactttatttatgaccgaatttataagaaatgagtaaacaaattatgagtaataaaaaaatatgatatataattatatatattttttaaaaaaactagaatttgatacaagtttcgatctatttacgtctaacaaaattcaccatatctttaacaaaaaaaaaaaaaaaaaaaaaaaagaagaagacaaattaaattcaccatatgtatatgtaaaaatttgaaagttggaatggttggcgttttgcaataagggaataaaatgatattgtaggggtcagtcagtgagggttactagtcaatcaatactcaatagtgaatacggcttttcttttttttatgttgctttgtatttgcattttgcaaagggtgtgaatttagaaaaataagatccaatgagaaagattaatctgttttccttttacttattttaagcagtaagattgttttgcaatagagatctcaagtctcaaccatacttgtcaaacaggtccgaccaaaatcaagacatgattcgatgaggtgctaagtttgacgttgcctaatgtcttcgtttgtccgataccattttcgggttttataacaaaaattagaattcctgtttggttttggcattttagagatatttcaaaatctttggccaaatggatacggattggcagaagcacgtgaaaacgtctgtaccaattccttacaatttcattgtcttttcttctactgatcaaggagagtttgaaacttcggtcgacgccactagcagaatcgtacactggtgcaattgccgacatattatcttccgaataagttatgttttctatacaagaacattgtaactttgaaggtaaatatgcttcgttacattagagtaactatctttcaaatgtgatcaccattttctataattagattttgagataatctgaagatttatttacgccattttagactcattataatatatgtatattgttgtataatttggcaaaattatatattatatgatattatctagaatgttcgatataatattcaatacccatgtgccattttggaaacttatacctaatgtttttgtaggtttctctttcccttttccctataaatgtgtaatttctcatcaacctttttgtgagtgaatagtataataagagtacactcataactcgtaccaaaccattatggtccttatcaatcatatggctctctcacaagccacaaatctagttcttcctttattaattagactaggtcggtcacatgaactaaacataaacttttcatacatacaccgtaacacgcagaatatttagaattcaatctcaagtgaaagttgaaccgcatcaaactgtaacaatttttatctagcactctagcagttatattgatgtttaaataaagagaaacgacctagctgcaataatatcaaaagcaattagatcaaacttgttggcgtttccttttatctttctgctattgtgaagattgaaaatatatacaaactaagcatcttattggcactaattaaccacgttagggcaaaagtgatttcacaaattcattatcgttaaatatgtcaaaacaaaacaatatgggatacagattcgcaggagggacaaagccaaaaaactatcaaaagtgattgaaaaatggaccgtaaaagaggacagctggttggtcactatctgctaaagagtaaatagctgagtgactgaccaatgcataaattattaatgtttgggtcccaaaattttcacagatcttcatcatttttaggttttcttctctaaattattttcattattagtattccagtcttctaggaaatgataaatagatttattatccttatgaattttgttgaactatgattcattatatgagagtattttgtagaaactaagttgtagtaaagaatacacatgattaacattttaagatactaaccattctcactcatagagtaacgtttttgtctgcatacatcacctttcttttaatacaagaagaagattaacaagtatcaatgtatcatcaaggtacattattagggttctcttttctcaaagatattgtttatacttttagggggtgttattcgttaatggattttaatagaattgaaatccaacactaatccactgttattcaactaatgattctaaatccagctttaaaatctagtgttattggaactcatatttgtaaatcatgcttaatagattttaaagtttggtgttattcaattaagattttaaatatttcattaaaacccaatgttattcaaaactaaaagacttgtaaaatctttgtatattaattgatttgaaacgaaacctttttggagtttcatgagtaaatcattagaatcaaaatccaagacatattgcagagattttgaaattcatacaaacatattcttaaaagcaatatcagaaaacaaatctaaagcttaaagaattgactttaactccataattgaataacaccatcttagagtttactttttgtttttctaaagtaaaactggtacacacgttgttgggtttgtggagagattatgttcactttttatgaattcaaatgggccgggcggtgcctaacattctctccgtgattatttaaagttttcgcttctttctgttactccaacgacaacgtcacttatcaatgatcttgtttattaaatcatatttcttacgtgagacaacacactacttggacaattttattccgtgagttttaccttaatcggtttagaacttcattttggttaaccatacgtctatggttagttatttttaggtcgaattctattttcagcgagtgttttaacatgtgtagttcgtgaaatcggtaaaagctttgtatcgtttacgatccatcgacgaaagatggtttattcttgactcctgagatcccattttggaactcaaaagagaacttcattcatttcgacaaggaatgagtggaaaacttgaagaacgatggagataataagcctttaaagacatttttaaaactgtcattaaaaccaattatttgatagtatatagattctgtctgtaaaaatcctctatacaaacacacgcacaccgtattcaactttgctcatatcagatctctctgccactaacaagttctggcgactagacagatatcccgcaatcccaaaactccaggtgtagaaccttgacaagtatatgaccggttatccactgtgcttagcggtcaatgaaggacttattcatcagctcgacagcgttgtccatgaactgcattctcaggaacaacagatagatcattgttaacttacaagttacaaccatcgataatagaaaacatcaattatgatcatgctaacaaaacagaaaataggttctaatgcgttcatactacgtgctgaacacatttcatttctaattatgataatgattgacccgatgctcaatcaaaattccggtctaaccgatattttctgccattagctgtttgtgtgcagatgattaatctatgcataccaattagagttcaggtttctcggttagaaccaagtggcttgactagtaatgctaccaggatccaactcccactaagtctcccttgttgagccacataattactttaggatttttcctaactaacgagcttacccacacacaaaaaaatgaccatctatgatcttgatatgcgaggagttataggatacaataacctaaccctctcttataataacttcacataacacactagccttaggcaaacaagagctttaagagttcaaattaaacaaatacagagaatgaaacaagattatccaaggtattggctcatattgacaaggtcatatacaagtggataaatttgattaagacacatagcaataaaagtgttggtctttaccttcccaagcattttcagctcctttcccactggttccaagaatttaagatcaacttcaacaggccacacctattcaaatacacccaaaaatgaaactattaacaaatgaaacctcatactccatgaatgattaaaaacctatggaataaaagaaactaatatttcccttatgttcagacctaggcagctctacggtttaagaaactaatctcaagagtgagccaaaaatcaaaacttacacaaaactaccaaatcaactcgaacattctacaaggaagacaacagaagatgacacttttcctgtatgaattctaagccaatttgaatactaaaaacttctactacacacatgcaagcacaacaaataactatcctcattctttccaattccaacactcaaacatcatcaagagaactcaaactaaagtagtaatttctcaataagtaacaaaccttaacaccaagtaaccgaagaggtgttacttggccaggaacaacgcattcaggtcctgcggattcaagtacagcttccatcgcaaacccacctcccacaggattcggatgctgcagagattacacgcaaccccataattaaaaaaaactgtgaaaattcccaaatttgattgcaatccgcaaaacaaacaaccttcatgacggaaatggcgtaatcggtttctgggttttgagagatagataaaaccggagagcgactgatcttaggcactggtcttcctgacgaaactcgccatggtgcatcctcagctagcgtcgctcctcctttcttcgccattaaagatttcgtttttttcgttggagaagcagaattcgaaattgagagcccttaatttattctcaaagtggatagaaagatttatctaaattgcaaagtagaaaactttgtggtcagctttcggattgtcttcgtgtgcttcttaaagagtcgccatttttcttaggtttctccttcactttttgcccctcattaagtgtttaattacgatatagccactcacttcatataatatgagaaaaatctcagctcaatacaacaaagagaaaaactttagcttcttactatgaaacccacacagtactcatttacaacattccaacgttctgcttttctctacttacaatttctcatcaacacaaaaagaaagactcaaaccatatatacacactgtggcttatcagatatatctcctcgtatcatattaatctacatacactcattgcatcataaagtgacaaatcttatagccatactctttcgatgagtctgaggttagctaatggtcctatactctgaaagattttcattcccagcccatcaaagttttccatacttcttcctctatcttgcttctcgggattggtaagctgtcttcttcgttgatcaacactttgtacacctcccattctctgtctccagtcacgtgtcttccaatttcagcctagtaaagacatcagattcatcgatatttagatgatacaaaaatggactgtttttggtatgagctcgaatgatgtgattgggtgagttatattataccgagaagatgcaggtatcgatcttcttgagggcaagtgctatgtcgtggaagacttgtggccgtccctttcctgataactcaactgggtttgtgactagaagttcagtatctggacctcgattcatcattaccactctcagaggttgctgtagctctgctcttaaacgagtaatcaatgcatttagcttgctcgagtcaaggatctttcggccatcagattgcactatgaacaagtcgatctcacagttctttcctagtttgattgtaaaacgcccatatgagatctgatcatcaaataagatttgagaaaacgagtctcatgtaaataacagtcgcaaggtttaagcaaagcatatgaatttgaagggtcagaaaaaacccattaaagacttgcacaaacctgaatgttgaaatccttgaaggtcctcataatatcatagagaagacctttgtgatcttgacaagtgatatgaatgagggtgtgagctgagcttagcgagttgtcaactgcaatagaaacattgcttgaagtgtgtaacccactcgaatgctctcccgacacatccgaggagaacaatgtttctgcaaccgacgaggaagttgagcaagctgtgatttcagggccaacaagttcaatgtcatagctgatcattgaatctcctatagcatctctcaggtactcatacacttcattccgcctcttaaccgtccctaaaagctctctgacaagaacaaaaacagaacacacctaacttaaacatccaaggaacatcaaaaatctcctttcaagctttgtttatatacctagtgtctgtgacaaagaacaagtccatcacttttccatcaggggtagtcgatatcttaactttctcaatgttaatctcaagcttgtaaagaacctctgtgacatctgccaatacagaaacagtaaggccacaactacctcaaaattcagaagaatcaataagcaaacagaaacaaactaaccataaagaagccctgtgcggtcagaacaagctagcttcaataagaaaagatcaggaagcttgggaggctgagactcagaatcagaaaggtaacatcttgagataccaaaggcccaagaaaaagaaggacttgcctctacaagtctcatcttcaacagattccatctcgtgtttggtttcccaatcacccagaagaccaagtagcaccattttccatcagttgagacatcttctcagaggaatttcatcgaacacattcaggttacaaaccagaacagatatcaaaaagaagaaattttcgaaaaccacacaaagtaaaatgatggaatggaattgttacctcctctgacaatgttgaggccgaagaagaggaggatacgacagagatcacaacccagaccagttttgtcaggacaattgatggttataacactcgggtcaccttctttctccgattgactgattatcactacgtcgtccgacaaaattcccatcttgtaccttaaagttttgaactttttcagcttctgtgatggtttagtttggtttttatttggagatgagaaagatagagtcaaaggtgttgtcgtgttgagcttaagtgattcgtcgtgttgttgtacttgaacccatgtttgtgttgttcctcctatgctttaagctctaattgtgatttcttcctcaaaactatcttattaatcttctctctttggtatctgatttattttttctcgttttagaggtacatagaacccactaattgtctaattccattttatatttttaactaacaaattttttaaaagcaagtctaaataaacaatggtggttggttactagttttttttttcttttttttttggttggttactagttattagatgaatattcttgattgatgaatattcaggagaattatctacttgtaggcagtgtatctaatccaaattttgtgtcccaattttggatcctagtaattgaaaatcatatcggaatgcttttgattaagaatttatttgagtattagtgagcttttgttgttcattttggaattttagtgaacctcagtttcttaatttaattgtattttagtcagaagcgtttactagtctactcctaaaagtgaggactttaggcgatagtgataagcaaatgacaagtcctacacgatttacgtgaccacactacactgtttgtgttttattaccagaacgatgtgagctgtgagctcagatgtttcttaattcttaattcaaattactttttccaaatctacttttttaagtcttatgtcaccacgggtaaattttacttcttgaatccacacactactaaattccacatgaaatattaatttttctgagacaatgatgtttatctgtcatcacgtatttgcaagcaatcagatctttccttgcgacaaaaatataccaattacgatgactgttacctaaaattatgattcacagtattttggtttaatgaatgattacataatcagcgtgctacgacttcaagtaccaatctaagcctagtaacattacacccattggcacaaaataaagtcatcacagacacccgctgaccactacctatagtgtaatataatttccaatttgatagttacaggaactagaaagagtctcttaaagattaaagtatctcagacaatcaacaaatctcattttaaaaaaaatcaagttaccaaaatatagtcaacctatgacaataaacagtaagcttagagtaaacaaaactaagattacaaccatataaaattcgagtctatgagcttccaatgatgttctacaaactctacaaacaaaatgtctaatacttcttctacttccacactaacttctctctctctctcgttcatcaggtctcaacattagctctgtttccggcaaggataatggagatttcaagtccgcgactgaaagcttggttgaagaggagccgagactggaacgtggagatgaaagggaaccaggaaagaagggcgatcggagaaaatatgagcatacccattgcagcatcatatatacgcccaaactcacggactgtttcccacaagcccaggaccctaagcacctgtttccatgtgatggctaaagagagtagagcccagccggtcgggataaaaccaaggacacatgcaaacatgtctggaatcgatagatctgtcattgcaatggctacaacgatgagggcgatgaatgtgatcgaagccactccctgtagaaaacgcagtgccagcagaatgttgcttgattttctgggactataccagaaaagctgaagtaacaaggaggcatgataatgttagtgtcatgggttaccaaaaaaatcaaaatctggagaaaacactaatgaacatcttagtacacaccttaaacaagaacacaataacaaccaaaacaacccacgagtagccatagagctgcaaaacacaaaagagaggattcagtcaggcacactcatgcaataatagcaatgtattggaatgcaatagctcaactgaattaaacgaggatagaaggaaaaaaagcaagcattaccgcaagtgaagtgtttttccgagtgagatcaagcttgtacacaatgccatattgaaacatgaaaaatctcaggctcaaaatagtctccaatatccttcctcttaatgtttggatatgcgcctgtaaaggaacacaaatagtaaaaaaactagccaatacagaatacggtaatacatcaaaatacaaaattttggacagacctgttcttcctcccaccacgactcccaactgagctctccctttactcccactccacctttgtacataagccaactgacccagtcttcaaaatcctcgacagtcctgtatcaagcatgaaagattacaggtcacgatccaatacaatttaagacatagtgccatctgtgtcaccagagaaaatcaattgaatacggaaatggaatgaagaccaagtaacaagcacagtactaacttttgccattcaaatccagagggattgaagatatagggtgcaaacaaccaggatattacaaggaaccaactgctgatagttagcaaaacgaacgaagaggcacccccgtccgtatacccataggcaatgtaaatgatcaacagtagagctacttcaaaactgcgcaaagttagtaagaagcagttcactaagcatccacatgataaatgttatttggcatatgtaactgattaacaaatgggcttacgctttaacaaaatgacttctagaataaagtctgtaattatcggcaaactttatgtgctgaaccacaaaacctctgccagttgctcgatactgttgatcaaataaagaacgcacaggcatttgagaaagtttaaaagaaaaaagaaaaaaacggaaacattgctatgtataaaagcaagtatacctttgcaccaccgtgaagaatagtacgtccaaagtaatgagttcttgtcccgagagaaaatgtgaaaaagacagaacacaactggaattgcattgtaatgaagctgaaaatagcctgtgatagaagaaaaaacatatgcttcaggacactttagtagaagagctctctcgaactccaaaaggaaacggagtgaataggtcaaccaacctttagcaacccaagttcaagtatgaaacccatcaccatagggacggcagtaaagattccaatctggactaaaaactgtgcgtttagtgcagcatccaatgcagtgttacctgacagtttggctactcttgatattgcacgatcagcaccagaaaaggcctgaaaaataccaagaagtaaatgatatcaaaggaggcaagggaagtgtcttaagaaataaaagacaacagatgaaaaaggaaagaaatgcataatacaaccaagttgcaagaattagataacaatacttttcccaagaacgttttccatgtaaaaaggtcaatcaacaagtttgatgcccagttgtgtgtgaaaagtgcaatatgcctttgatatttgaaaaggtgggtcaaatactacgcatccatattggtataggattacagaatatagttgacggcaaatcaatcttaaactacttgaggttgtactcttaaaaaattatgcagtaagcaacactgattttagagtacacatccgctactctacacctttcagagagcaattactacccatcattttaaaagaagatacagtgaaaaaatgaaaagatagaaggctccgtaacataccagataaactcttccatacaaaaagacgtacacagtaaggacggtcatctgcatcaaagaatttttttaactacatgtggttatgggggaaacagacttacagaacacaagagaatgaaagtaccattgtgcagacatagaatccaactgttgtgaagtagaatgacatcattctaaaaaagtcaaacagctgcccaattctgtagacatccctgctaagaacttgttctccatttccacctgctaccttcccttcaaatagggcaatctggttaagtcctacatctcttcctttaccaacctacatgaaagaatttgtatggatcatgtattcagatcgacatgagatacaagctaagtgaagaaacatttaaagcaagtaagtcgttgcctgaatatactcatggtgggtgatattcccctgcctgagtgtcgagttaaatcctgcaaatattgtcattgtttataggtaaaaagctcagatttttcaagaacatatcatggttaagcttttttaaaaattagaacgttgacagttcaaaaagaacttattaagtttaaaacagcaatcaggaatttaaatatatatagcaccaatctactacgcataccagcatatatatcttcactgatgttaataacacgggatgctttgctgattcctccgcgagttatatgaaatattctatcgaacacatctggatgcccatagtgcattcgaactctgcaagattagttttgaacaaattgaaactaagctgtcactggaaagtggtaatagattaaataaaaacaatccaataaaccggaaaacgagtgctgaacccattttaccaagtaaatgcaagcagatgaagagaaagctaaaacatgtaacaagctccacaataaaggaaagttcacaatgaaatgtagtcctattgcacaagttatagtcttaagcgagcatactcacttaagtggatatgctagaacccgttgacccaacgttacaaaactggtctcttgattcgacatgaaccacgccagtgatgaaacactgcaatatcaatttgccaccaatgtaaaagtgataaggataaaacatatgatataccaaaaaaaaattctagaaacaattttctaaggcgaaaactgcaaaccttcccgtgaaaacatgctctctaactcccaaaatagtaggacgtcgaattccatgttttccatgaaactcctcaagtagatttctcattttgattgcttcctccagataattgtcctgaagaacatgaagaatatagtggatcaagaaaaacagttggtaagaaggggccaacaaactcctgctacataatttgttcattaatctcccggttatcaatcctttttgaatgaggggaagaaaagtttgggaacctgatgatggccaaaagcggaccttaggaatataagacaatcactatcggccacatgcatgacgggtttagcttatccgcagtacgactctcttaatgtcaatacagaaatgtgccgaaacatgacaaagaagtgaggaaaaacctgattcatatctatggtctggatagcttctccccgcgtaaacacgatagcatgattttgattctcaggcttcccttcaccaagtttaggatctccgggaagtttaattgaataaatttcctatagcaaaagtgaaagttattgtgtgctatgtatctcatcaatccacttgaagaaagtaccaactatttagaccaggaaaaactttctattttggcacatttaggtatctaaaaccaatttgacaaattaaccattccaagtatccacaaaatatcatatacctcatcttttccgtgaatgtcagcttttactaatttagaatagaattcctttttccctccacttccaccatctccatttccaacatcctccgaatgtatgaaagcaactcgtagcgcctcgtatctagttgcaaaagaaaaaattgtaacatgggatgtgtgtaagatattgtcaataaaggatgttctgttaatgagaattcagagataacaccatctacatagagaaaattattgcaaataaatttacaaaacttttgcaggtttttcatatctggatctctgtactaatgcacagggtagcagcctactcagtctaccaaaaaaagggaacaactgcaaggttccacttcgaatatgtatctagacaacctaagaacaatcaacagacaaatgggacgaactgaactaccatttagccattcctgtaagacattaaacttcatgactagaatgattacatcctcaaaatttatatgcaaaaattaatattgggccaaaataaatgcaactaatgcacacctttgcaataaaagtccgatatcagtagcctctggtttcttttgctgtttctgttgcccataaatttggcacgacacaacatacgtaaacttaaggtccgcttgagctcgagcttcaattgacgattcaaatcctcgtggcatgttggtcagagatgcatcatccactgtaacaaaacaaaacaaaaaaaactgctcttacagatatgcctttcctttgaagggaatagtcacaaaaaaattaggaaaccaagtacctcccaagcctcgtctttctaagaaactctggagcatcaaagcccttcggtaatacatcatacctcgcacttaacaacaacaagaacaaattaaattaggcactcgagtgtgaaattcaccatatttctacattaaaatccaaacctattgaatgtaaatgtatttgtaagaaattatttcagaagtgataagcaatacagatcgtttctaaccagtcctcgctaaagtctgtcctcgataagatacccaaaaccgaagctccaaagcatcagttgaacttgcttgaagatctgcatcccctgttgattcagacctgccaatcctctccaagaagttctcccattcatctaaagccaaaaatagatggatatcagctctcagctaatgactatattgactaaggaacgacctcacacgcctagaagtagaagatatataccaggaaatatcttttgaagatagaaaagaatagatattccatcctcattctcacttcgcagttctgaggagctatagagcactgtctcactatagtatggggtgaagacactgttcacaagaatttaaaatggatatttataaattaggagggaaaaaataagttacatgtcagtcaagtgaaaccacatacctgaatggaaccatttcagcaacaggccttgcttggggcatatccataaataacgaatttgtgaaaaactccaatcttcttcttgcttctagattttttgggacgttagcagcggcatccttcacagtgagaagaagatgtagccgcttgacctgctctatctgttattataaacaataatactatttgcataagaccacaaaaccagtatctggaataaatttccttcttcttcttccagaaggacttacaatttctgggtccctaggccaagctattctggaaaagagacgcccttcatttcgagcccgtgctaaaatattccatgtatcaagctgctccctgttgcacatagatgaacccctaagatattttctccaagacggttgagaatacaagttaagatttgtgagggcaagtaaacctagtaataccttaaatcatgtgaaagaaggtcatgcgtgaccacctcgtaaaaatcaaacatagcttttgcagcaccttttgcaagatctggggtttcatttcgaatctgggatgatgttcagcaaaccaagtcaaacaagatgaaacaactgagattttaacaatcaacagcataaaattccgttagtcaaaagtactgaaagatgacattacaatctaagtatcaaatgtagagagacttctaagaaaaagtaagataatataaatacagtgataaattcagtacttattgacataataagactactcttgccctatacttaaggccacctataatcaataacagcaagaaaaatataatctaagagaagctagttgggatgcaataagaacgaaaagggaattcaaagctatccagtagagtaagaaaatttaaaagcctaatattttcagaagaaggattaataactctcatagcaaaagaaaaattcccagtattttctaaagaacaaaaagctgaaaaatgtataaatccccaaacgtaagaaaaatgaaaaaagagggtctaagcatcacaccagcctaaaatcctaacaggaggaaaatgacgaaaatctttcttccccacattatggcttataaagccaaagtcggaaattgaaaacagtaaacaaaactagcagcaagagaaaatacatttttcatggatatatcttttgtgtttctgaaagcagcattagttcactgaaaatcgttcgttaaccttctacccaaaaaaaaaaaaacaactagtcgcagatttaagaaggcgtaccaaaagcccggttaatgcagtaaatctggaaaccactaactgaagcttcttaagatttagagttatcgcaagggaaccctgttctatactgttgctgatctccagaaaaattctttccaccctattaccaaagtgaaaagaggcataaatataatgtcacatgtaaaattccaaaaacagcaatctatggttaacagacatgatcttcgcatattaaacaaacattgagattcaagcaaactgaaatactgtaccaacgtcgcccttcatcattaaccatggaattcaatattttttcaacactgtaatagcactcctgaactgcatacgccatgtattcatcatcgcatatttgtctccatagtacttcttgtgtttctttgcactccatggctaaatcaatggctaccagaatctgaaaaacaaaagaagcaagaataattcacacatgagagaaaaatgtcacgcctgagctctcaacattaaagagaggaaattatttaacaagctgcaccttactgcagagaagaaacaagggccactggactagtctaaggctccccgtgttactgggaatagaaagcaaatccatctccctacagtcaaagaattcaaatgtatgagtaagaggcgttgtacaaacggcaaaaaatgaaagaacacgaaagcatgtaataatcaataacctgttactgagataatcttcctctctcaagctctttattatctcattccaaaaaggtgaaaacatcgcagcatatgccttgttcatatcctgaccatcctgccaaaacagtcggaaaaagctctaagaattaatcattaaccagaaaagaaaggttagacagagagaaacaatcagcgcaatgcacaggacaaagtgggaacgaagagtacaattagggtataatgaagtattaggagagaacaaaacataggagctaaaatacatggcaaaaacaacattatagagttacagcaaaagctggagaaggacaattttctatattaaggactttcagaaattaaattctgttacatccacgatcaatgaaacaagatacaattacaagcatcatcgactttaattttcctatttaagcatggagtcacaaacatatgatactgagaacagttattgttatcacaaaagtagatgtttgaaactgttttggctgtagtggccaaaacatataattgttgattagatcacagagccatttttagacaaagaactaacaatgtaaggcaataatgcaagaatatctattaaaacatcgagtgataagacagagagtttaaacttatcactaacctgagaagcatgttggccaagtggtactctgaaatatatcattacaacagagattaggcggcgaaggaagcccaaaaagaaaaactttaatatactggtaatcataggcgtacaatattgtttatgttccaagaaatgtaacaaaataaagacagatccaaattataaccttttcacaacaggagagacaaggttctgagcaaaagcctctggaaaactctcaaaacgcttatgaaccatctcgatggtgcgtatctaagatagaaagataattgaacatggttagtaaggggaccagcaatataacagaacacaatatcgttctacaaaaagatttagcagtagaacattctagggttcaggagtacctcgcctaggcgagcttttgcacccatcacaccaccaataattgcagacaagagtgtgtaccatatatgaatatccataagataaatctaaacatcaataccaaatgccacgattagtaactcataaaggacaagagttaatggaaggtagttacgaaagaaactcttagacagttgatatctaattaagaggacaactaaggaatacactcaccgccaaaactggagcccacaagctaacaatggtcaacgcatgatcgttagctgccaattttttaatgtagcagagccacaggtgtcagcaacattttcaaagacagtaatcagtaacaagttctagtctgtattatggttgatcagatacaaatataatattattcagttaaaattcaacatatcttgtagccaatgaagcagaccttcctgactaatttgttaagtccgtgtagacacattatatttcttttaagtcaattaacatccagccaattaattcaatttgagcacttaagcataaatacacttacattttgagacaatatcatgccatgaatattgaaatggaggaagatgaatgatagtgttggtgggtttaacgagtggtttgatctgcaacatgaagaagaaccgtcaggtaatatcgtacacatgcttagttagttacttaataaatatacatttaacaaccaggctgcacgagaacaacaacttatacaatggagaaggaaaaagcattcaacatagcagttgcctatatacagcctcagacatatccccttgtttttttaatgagtacaccacaggtgaattcagatatgagagatttcaaattctataatagtagcaaatatatacagctgtagaaactccttgcctggaggaagtatgcaaatgtgaatttggaggccaggacaaccaaccaaaacgccacatacctgaaaattagaggaaaaactttgaataaacttaactcaggaaccaaggtttttgttaccaaattctactacgatcccaaatcaatcaaattcttcgaaaacagcaactaaaccattcaaacattttttgtgtaaagtgacgtttttttcaggaggaaactcacactttaacatgaagatgtctactctctacagacaagtatccctaagcaatctaattgattatatgtcgatcgtttatccataattcaaaacttattcgattaagcaaatgaattttaattagccatctaacaatgaacattttttgtaaccagcaatatagtttgaaaaggcaggtacacaacctgcaataatcacttaaattctcaaagaggccacgtcccacgaagtatcgttcctgaaagagagaagaagcatcaacactgtgcttactttttctattatctaaagttctactaaatgaatacctgatatatccacttaaaaaactggaagaaagattgatctgacatttctgacagagcatggcatgctggaagtttgactaaaagtccaaagatgaggcgaacagcggcataacaccccaatacaagaatgtataaatggaagaaaaactcattttggtttggtttatttctttcatccagaaccttcctgcaatatttgtttcacaaaaggttagttgttccgcatacaaactttatcaagaagaattagctcgcttggacaaatttgatacatacacataataatacaccacaaatgccgatcccaagccccaccaaagaaacctgataaccagcctggatatagccattcctcttgccatgctgtaggcgccatacataagtacaacatcaagaagacctgaagaaatgacaaacatgagatactcaacaagaagacacacgtacatttgcaatttaatctgaattttctaatagtaagccaacagagtcaaatcagaaaaatttacattcaatgaagttcataatagcatatgtaggcccagcactgagtaagatcttgaaagtttcgatattgagatgttcattcctgaaggctataatcgtcaaagactgtggacaagtaagaataataataataattaggaacattatcaaatatacgcagaacattgttcataaaaaccacaccaacctggaacataataaacatgaagatccaaagtcgaataaaacttcggaaaaggtgaaggtatgtccgatgctcaacaaagctacttttagcagtctacattaaattcaaagaaaatggatcaggcaaagttgttgcagagacatggaaatatgacaagaagacagaagttgaaattgtgggacaataattctcattggagtaattcccctacatagacgtcggagagaaatataactcccaaactatcagatataacacccgcaactggacaagacccattaaatgcaatcgtatataatgaatgtaagagttatcagataccatccaaaatgaaaaataagagaatcagggatagcttccaaagtaaaactcacgaaaattgaagccaagaagaagtaagtggtcacagatgattgaccaaacgaagaaggaatgaaacataaaattcatggaatctatccatatgaacaaaactcacccttttccgccctttcggcttgcttaaaaagcgtgactctgttttcataggccagcttaactcaaagcaagcaggtgtcctgaacataacaaacagttaatggaaactccttgaaatgagtttatactagcaaatgtaatagtataagcaaactacaaaccaaaagtattcattgaagtcatcataattccgccattcagaatgtgcagctttcccaccattgtttcgaacagtttcctacatgagtatcaatttcaaaaccaacttaagggctcacgcaaccatataccaaaaacattaatgtaagacgcgtcaaatccacattaaaacatgctaaaattcctcagaaacatagaataagatctgatctcaaatacgaagtagggatgtacttcaaatataggccagaaccacctaaatactatgtcaagaaaatgattagaagatctttaacgttgtactcaaattaacttaaaataatgatacttcccagacaactgctactaatttaagtaatatgggtttaacacaaaaaatcataacaagggtttagatactctatatacccaaaagctctggttagtgaaagaaatcactcttaaaactatcatttttgcctagcattaaactgttgaaatctaatttccataatagaaaattaagatgcacaaaatcattgtaatagcggaactcaccgctgagattgtttcatatatagggcagataattcgctcaagaaatgatacagaaccggtatccgttccagttaagcaactgtcagcacgaacagcttctccatgatccaattttgcatccaattccttggccatctaacaaacaaaaggcaactgtgtgagaagagatatattttcacttcgcatagggtgtaaaactcaagatcacataggccttcatttttcatcatttcagaatttgctaaattaaactatgtcaggctggttgtttaacagaagcaaagtgccacgatgcagagacgatcagatgctacagcaattctgacaagtctattcttggcttagatgtgtgtggtttacaggaggacaatatatatgaacagcaaaacaacactaacaacaaaatctgtaaaacctagacatttagatttttccacagtaaagaatacgaaacaaaacaatcacttagcaaactaataaacaaaacatgagtatactgatagcggaaaattggtgtataatcaacaacaatatggtatcttacgttgtgaaatatatagcagatacactctggaagaaagcggacattagcagcttcaccccagattaggaagtacaaagaaacaagaaacagcttcctgtcccggtcaatggcttctaacctaatagaaaacttcaacgtcaataaatgcacatgaagaaagcctgtatttccatatcagagctagattcaaaaattacttgttgtacacaacgcgtatcctcaagtatttgcaccacttgatgtagttgtccaaaacctttaagaaaacctcattgactgcattctcatcaattttctacataaaaagattaagaggtcaagattttaagaggacaacctcttaaccaacaggacaatcataactgtccatcagtaaaggagtatgccacaaaaaaataatactatcagaaggaaaaactcactgggtcattctgcccaggtatactaagctgggactgtgcatttgaaagtgtgagaaccaaatgctcccgttggttccttacattgtctctctgagacaatgctcaagacaaaaaaaaaagagtaagcaacaagaataataaacaatcagggaagaatttgatcaaatagttatcactatacctgaaacccaaagatatactccaataaatcaaacatatctgcatcacgttgtccggaaatctcaaaatcaacgggaagcctagggaaatgttcagtgtatctgatagcttggactgcaccacgtacctaaataaagacaatagagccttttctgagtgggaaaaacttgaaaagctaaaactactaatacaaaatgaaaatcaaagttttcattcttgtttgacttacttcagggaaaaccccaattgcattggtcatggactgcgcttctagagggacaatattgtaaggagttagttccgcagacaaagttgcatcagcttttttaatccgcccaagctgaaaacataaacaaaaatatgagttacaagataagtgtataacgtgacaacttgaatgattgatttaatgatcttaggaaacatttattatcaactcatgcagatgcaacttctgaaccaagatcttctcatcagagttattagatatgactttttgaacgcttggcatcatcagaacaggaagcgagaagcagattaaatagctttcgaaacacaacaggtaagggaaaaaagtacctcgtccctgatagacctcccaacaccatttggatcagcatctctgcttagcacctctaacacttcaattagggccctcaatgtggcaaacaccttcctcatcttcaagatcctatgaaaaggagggggaaaaaacaaggattaattatttatggtttacaaaaagaagaagacaacagtacatctcagaaaccatctccactacagaatcccatctgtataagtgaacagaagctatcaagataatttataaaaacgtccataccaaacaaattaatctacacccagaaaatcactgccgaatgaaagaacaagcatcaacacaattcaggacgcatgtttcagatttagagaatttcagccattttctagggatagaatccaaatactgtcctaaaaaaacaggaaaccacaaggattaaagatgcacatactcccccacgttagaagaaaaagttgttcctgattccctccacttttgctcttccttctgaatatcatccactctatgccgtcttttataaagtttgtaaaattcccatagtcgttcaatatcacgatcgcggtctattgaagcaccatctctcttggcaagtttttgctgcaaaaacaagtaaaccccttcgattcagaacaagtaaacataccatttcacataaaataaaagcaaaccaaataagaatgatgttgcgtcttatatctcaacatcaaatgtgcaacaattagactccaaacgtagaataaggatatattcccacagctatatgcatgtgaattaaaccaatacacagatataacattgtgagacatcgtaaacaaccaagatgatgaaaaataccttaatcacggacatcaaaccagttttgaattgaagaacacctctaccatcactgttagggtccaagttctgtgccatagagtacgcttgctcacatactacatcagacaaatacagtgttaatagtagagccaatgaatcccactcaaataatgacacaaatacttacgaattctagctacagaaggatcctcagactgaatctcatcagcagcttgtaagatagcatcgatatttgtagctcgaccaagtgatggcggaactgctccagcaagtccgctactaacacgctcatgaccttgacctgtatttctcagctgctctcttcttaaagtggctcgaaccagcctatcccaattactataaaccctagccataattttcaaatcctagaggaggatttcaaattctctcaaaccaaagcttgtgatgtccctaaagagggtgaaacaccatggcacaaagagagaagatgaagaaacgcgaatagctcgagctggaggattcgaacccggatgtgacggtggtgtgtcggatgggatctatggcggatttaagaaaacgagtcgatttgattccttcgtaaagtgggttttctcaaagaaaataaaatgaaaagtggatttggaaaaaaaaaagaaaaagttgaaaattacaaaataaccttcccgtttcgagccgttccttccaactatgtaatataactgtcgtgtcaaaacacggattgaatactaaaacgtcgtcgtgttcatgttagcgaaaccgcgttatcttacttttaaattttgaattatcggcccatgaacgaataggcaggcccaagatcaagatttgtatagaaaaacaaaaaatggaaatttaaaaacttaaaatccgacctgccggaatcgaaccagcgacctaaagattacagctactactacagtcttccgctctaccaactgagctaaggtcggtactgacagtttctttgttttatcttgatttattcgtattgttttgaaactatggacaattaggtaagatgcttataacatgtatattgtatcttctaagttctaacaataattaattacaatacattctattatttcgatcattaaaaaattggaacttttattccatgtactattttggattcacaacgttaattcgagattttaactataatttttcagatataaactcacattaagaatattaaaaaaattagatttcaactgtgatttatatctctagtttcagataaaattgtgagtttcttgttattcaagacgtacacaaagaggataaatgacattgaaaatactcaaatcttattctgtcagcccataagataaatcattcaattatttgatcaccacgagttgattatctataatgtattaattaccgaaataatgaatgagatttactaaaacacaaaaaaatgtaatgaaatagagagaagggaaaatgacattagctagaaaggagacaatgtctgtcgaaactcaaagacaaggctagcccactattataatctgcagatctcatgatctcatcaatgtccaatgaaatcatttcgacgtggaacctcgaaagcccttaagttttcttttgtttgtttttttcgatatttattgcacatttgtagtatattgtccataatctcatcaatgtttccaatgcttaaatttaccataaatatgatgtaccactaaatgccataccatgggctctacgtactacagtgtattttttgggagatgactttacaggataaagtttttagttaattcacactgtaatgtctgcaaatgaaatgttttgtcttttgagtgtcattaccattgagaacataagatttcttatgtcacaatttagaaacatttggtatctcaagtgcaaatttattggctttggaaagcttgatatcaattttaagcaacattttttcatgtctttttgtttcgaattgtttagagatatttcgttcaaactttacgtctctcaaaagtcaaaacgttgactagtaatttagtagtatgaaataagtaaatacctacaaatccatatttaattaataattttcacatggttccattaccttcgagtccatcacttactctgccactcgcataaatgtcacttaactgcacaccaccgatcctccttaaatattttgaattttacttgttcggacgcagaatcacattacttttttctttctacaatcactaccttttaaagacatttcttacaacaaatcttttaagtacaacaaaattcagtaaatttataagaaacatatactaaacttacaataaaatatgaatttaaagagttcaagaggttttcgatattgtttctaattaaaattgacaagatattgataaaatccatctaaactgcttacgatgtatctttcaaaaaaaaatgtgaagaaacattatcgttaactttgcaaacatatcaatatatatcaagcaagttaggagtaaaaagttttttattaatgatatatatatatatatatatatatatatatatatatatttgtttattagtataaataattgaatgtgaaaacattatcataaaacaccaaaggaggaaaagagaagaatgggtcactaaagctttgtgggctagttttctagacgaatgtttggtgtttcaattgtcttgtgcgcatctaccaaatgcggatataaagctacttcgcattgtttagtcgtattcgtccatttatttttagaaaagtagtgtgtgatggccacttcgtgcatgattttgcatatttctttgacagtggatggcttggatttgttatttatacagtaacagtagatactaggatcaccatagaatatacagcataaatcattttcgttacctaggctcacctgaatccatattaggtgtattcttcaaaattcctttaatcccattgatacaatccttaatttagaattggtaaaacaatagtgtatgaatgttgtaaagactagatcatcctaactgttattaccaatcaaaactttttagcttgaaaaaagaatcgaattcatattatgaatttcatatttttacaatgtataggttgcaatctctgacttgtcattttggtccttgcatttatttttttaaatgcatttgaaaatatgtcgactgtttttcctaaatgtgaatttcatttccctttttcagataatttgtgatatatgtttcgcttcatcatcatttttttgcttatcattttctaaggacaaaacattttacactccactttagtgatactttatacgtaaccaaaaaaaaatgtgatcacggtatggaataactgaacaacatttcaaacagttttgtttatgagacacagtcacagacgattgacaaaacaatatggtaccgtactggatacatttacataagaaaagatgataagtcaaaaaaaaaagaaaatttattttcgtgaaacaaccaaccacataataatagtaatgaaaaaaatcccaaaattgtaccaagctctttctggtattaactttgatgtgattaaaactctcaaactttgggactttcatcgaatatttcctaacgccaacattccggcgttaaagaatggtctcgcttataatctttgcaataattgtataccatactatgtgtttgaacccatctcatggcttggtgttgttgtcgggttaatccgccagaacggtatggcgaagccgacaacggatagcaccgagctgacgagtaggcggtgcagccgagcgctttaaaattggtgtatttagcagtgaaaggttgatatttatagtcggctttgtatttaccgtcttccgttgcccaagaagaagcatcccatatggaaccataaagccacattggtcttaaaggaaatgtagacgcactcttctttgggtatcttcttatgggaatatcatccaccaaaaatctgaaattacaaatgaacaaaataactatattagttgatatagtttcctactttttctttgttcaaaaaaaaaaaaaaaaacttttttatacaagaaatagattaaaatatcaatgttacatagtagcattctgataaaagtatgagaatttaaaaataaaataattggaaataataaatataaatgctaaaatttggtaggtagattatgaatgtcccatttatgttgtcgcactcgcacctcatagacttgaaggactcatacttagttaagagaattaaaaactttagttacaaataccacatgagaaaataatttaattattcataaaactccaaaaaaaatcaagtataattgtcaccgtcgtacaatcactgtctctttcttgttcgtgtctctaattacatctttccttgcccgaataatgcaacctaagggtaaagatcttttcccaattctaaaataaaataaaagttatgtaacgtatgtctatttttattgtttactatatggctctagatacatccacctaggtccgtggccaaaaaatgaatttgtcgtatcttctcgtaagaacacggatcttatatacactatcgttattaaagggttagattcaacaaaatgaaaaatataaaaaccatttttgtaggagacattaagtagaagaaggcttacatgatttctctagggctccaaagaatagcataatggtgaaaatctttagttggatcaaaccacaagcgaaacttcatctcacggccaatgattttcccatcaccacttcctctaatatacacatttgtctgaagtgtgtaaggcttcccaaatgttgtccccaaaaattctatgtctacctcatcatggaaccctggatgtgcctcattatttgatagctgcaaaattaatttaattagttttaattaagatcactaatgtaattaaaaagtagtttcttaagtgagtctctagtctcacatagagagatgtgatgactccagcagtgtagccaggttggagtttgatgtttgctccaaagtagcctgatctgaatggcttcactgacttgaatccacttcctatttatataaaccccaaatacactattgttaaaaagaaataaacttcacatcacacttgaaatacccacatgagaaaatgagaagagtttaattagtacctgaggttctatcaagccagatggtgagggcattttggtccattctctgatgctgaggaccccaaagattcctaaaacctttgtagaagttgagggaaccaaccttggagcttggccaataaccaggtgatggtggccaataggcattcactgaggatccccataacaccagcaagtggaagattgagagaagagagatcaaagagttacccatttctctctttttcttcttttgtgtggagtggaaagaagaagagtggagtactatataaacgcagagagagagagagagatgatgtggggattgatggacatgagtatggcatatattataagcttttatgatgaaaattggaaatgaaacgggtcctaactataaggacccactcatggaaatacattatgaaaatgagtggtccactcacctaagactcttaaacggtctaaaaatataaaaacatcactagcattacgttgctcttctgagatacacttacattctataaatttatggaaaatcttaggttaagatcacattcacacaaaattgaccgatacaaggacaagtggtttcaacaccgattggcatggcctactacaacatatgcgtagatacccctgcgtctcataatctccaaaatccaccaccagctttatctctttctttctttcttttttcttctcagctatcataggaatatattacaagatgaagtgatgttgtgtaaagctattaaggtaacgccaaagaagaaaaaaggttgattgaaccccaacttttgtaaatagaaagaaaaagccatgaactctcattaatcgtgtttggtcaatctttacattccgacaaacaaatttttcgttgttgagacacgagattctgatgattaattgagtataaatgagattagtttgattctcttaccaaccatagatgcttgttaatcataaatattagcgattttagatggttagaaagtgtaaatagtgccttggaagatggtcaatcttgacttagtcgtcatctatgctcaattataggttcttaacgtttgcgcttgctttatgcttgtgaaagtcgaagatataattgcttcatgcttgttactaaatccccaatccatgactagtacttgcgatccacccttcatgataagtaagtagttgcggtgcagagaggtattcatttgaattctaaaaaaaaaataaaaaaaaaaatccaaaattcgaaaacattatatactacatcgccatatttcatagaatcgccgatcatgttttgttatatttgtcctacaacatttaatattcgagttttacttgttttcactcgtttcacacaagctgtcttggtccatgccccataatggaaatgatctgaatgattagtatccaatagtgcacgtacgcctgatcataataaatactattattaatatagatctatattgctaatttaattaatcacatgaatctattctataaattcacttattaaaatttaaaggtatatatccttttgaaaagttttgacctcaagttttcgaacgagcgtaaacttacccaaaagagagtgatttaggtatttaaacagttggattaaattattaattatcatgattagtatttaaatctgatcatcattgtaagagaatcctatacctcccctttgtcgacataaacgtaggacctttttccattttaattatttttggttgcaggagatataaatcaaaaccttaaactttgcctttagtcagatctcgaaatatcgcatcgatttctttgacaaaaaaaaaaaaagagatcgaaccgattgattgaaggtgcatgctttttgggggaagtggtaaaaaaaaaaaactttcttacgtatattaacaattgttgtagctgttgtcaatttttttttatataactattaacttataatagatatttctaaaaaatattaacttataataactattttaaaaaaatattaacatatgctaactaacttttaaaatattaacttataataactatttaaaaaaaatattaacatatgctaactaacttttaaaatattaacttataataactatttttttaacaattgtcaaaaatttgttaaataaccaaagctagtgattaattttaaaattattaatcggcatatgtattgcttactagttactactattatttaggaattttctatcgaagataaataataattttaaatcttaatctaatttaatttataaataacggaatccacttaactcaataaactaataatatatttagatacgaatttaaatgtatgagcatatttaaaatttatgtaacatttttttatgatcatgatcagtattaattatagagagcgaatttttttagtatttttttagaatctatagttgttgtttgaaattcattggtaacaaacaaaagaacattacgaataaattatggagtacttccgaacctcttttgtctcacggatctacctaaaatgaagaactcggtagagaattaaattttatagttttataaacaaaattaaattgagaaaatgtccccggaaggacgatgctgaaattgaataatattggaaattaaagtagcaaatagtataataaatgaaattgtataagctttcactatttgtgtcggtaacggtgtgttacggtgatcgagtcttgattatcgacggttgcgggacccatctgaccgacaaaaataattcattaatccattagccaaaaccaacttcattatattttttttgcttctttagtttataatagtttccaatatatatgaagattagattataaataattatattgtttccgtgcatttatctcattgctttttgttttttgtgtggcgaaaaatagtttgttttgatgcattttcgtgattacaaaaaaaacgaataaatagtgatttggtgaaagcttttgtctacctattgcggactgagttgttgggtatattaatttttcaattacttgtagtataaggatacacatcgtgaaatttcaacgacataaaaaaaagaagaatatttcactcaacccttttctcttttgacaaaactgatgggaacagattgaactaactgcttttaatgttcttgtttagcgattatgaattctcattgtatgaagatgtgatcatccgactaaaacaattaatatagtggtttgtgtaagtaatgcaattgtaacaccttcttgattcaaattcgtatattgttaaatcattgaagtttgtggtaacgaatgagaatagtttcatttttctcgttctaacaatatatagatattttttattatacagcatcgagagttcgagtgtgtgaattaacatgtgttggagaaagaactatacaattgacatgattgtcaaattcgcgagttactggttaaatcaaatttggattgatcaggttgaagatcgtaacaaaaggtccaaaactcaacccaaaaaaatggtcgtacaatatccaatatatatgttatcaccaaatttgcttacaaagagaatatttaaccaagtaataatcaaccaactttattgattagggcatatgacgacaacatttacatcaattatgatctaggtaaggtatttaataaactatggtgtgtagcatacgtggactctcagaggagagtgtcttgactcttgaatcttgatttacacatacttggatgcatatatgataaagtaaagaaccatgtcaatatgtacataattgaaaaacgttaggtcatgttagtgttgataataatttatgagactttggatgcttgcaccacaatacatgccccacgacaaaatcaatgagttgagtgatcgatagctttctttctaatcaaatccatacatttttttctacacttaatcaataaatctgttttttgttctttgtttgtgacgtttggaaaccaaaaatcgagagatttgaaatctaaaatccaagctacacgtaatgattgctaggtgatataatgtacggacataaaagactaagacttatcttctaagatagagttcatccacattctggtggttttctttatcttttgctgttcaaaatcatatattatattctctttacaaaattctgtttttgtaacaaatgatatatcttgcattttggaataagaatagtatggttttgccggaaaaacataagcagtgcttcctataatgagtaaacactacaacaaagtaaattcaacagagcacattaaatcttaaagagagaaaaccaagaacctgacagcgaaactccctgaggactcaacctatggactctcgataacggatccaagtgacaacgaatgatgcttttaatctccataatcaaagcagttgcttgtctctgcgcggattcttgaaccatctaactccttcatcaaacaagtttggaggagaaacatggttccttgcagtgaaataaaaccaaacttccgcagcaaatgtaacccactttgtattggtcgttttttttatgcttcacttttttcttcgtaatgtacaagtgtaaagagaaagacgcagaatcataaatgaaaccatacccaattacccattatatataaaatatcaaaccaaacgaaaaatactaaagaatggagaacaatttgttgaataacctacaaaagattaatatatatatatattgagctattaatatgggataattcaccaagtaacataatgcttatgtgttggaccaaaaaaacgttgaaactttaaggtgtcatcagttagtagccactagccagattctccttgtattcaacaagctcagttccagtttcctatggcgcacttgtgtttaaagggacatcgacaagtgccccgaaaccactagcgacgagaaactagatgagatgcatggagctggagaagagaggctccatgagtatgttcaaagatacttttttacagttcaaagatttctaacttgcatgatattttcttataaaaaaaaaaacatcacgaggatggatttcttggttacacaatcaaaattacaatacaagagattaagagggaaaagaaaaagaaaaataaaaaagaggcaaaaattcaaaacataaaactcaaatctttcatttgcaatcttcgattaccagatatatgaaccgctggcctgtgttcgcgaaaacaaatgtgaatggtgacaatgcagaagctttctttattcagtcatttgcaataataatggtataatgataagttcccagtagttggggagtgactcaactcagttcttgcaattgccagctttgtttctgtctaggcctttggcttgagcggcttgacaacctcccaagtgaagtcagggtcatcacgcccgaaatggccatacgcagcggttttctggaacctgaagttacctcccctcttaaggtcaaggttaatggccatcattcccggcctgaagtcaaatgcttccttgatcaacacaaggatatccttgtctgggatggtcccggtcttgtaggtgtcaacaaacactgagagcggctcagggacaccaatggcgtatgatacctgcacgatacaacggcgtgcgagtcctgctgctaccacgctctttgcagcctgcctcacgatataggcaccgcttctgtcaaccttggttgggtcctttcctgagaaggcacctccaccatgagcaccccaaccaccataagtgtcaatgatgatcttcctccctgtaagtccagcatcaccatgaggccctccgatgacaaaacgaccagatgggttcaagtgaaagatggtgttatcgtcaaggtacttagcagggataacaggcttgatcacatgctccttcaagtcagcagcaatctcatcattggtgacagtttcgtcatgttgagttgagataagaacagtgtggactctaatcggaatcatagctccaccatcgttcttgtactccactgtgacttgtgtcttaccatcaggcctcaaccatgggcaagtcttgttcttcctcacttcagtaagcttagcaccaagcttggtggctaggacatgagtcaacggcatgagctcaggagtctcatcagtagcatacccaaacatatgtccctgatcaccagcaccaatatcttcaggcttcttggtcaaatgaccatgaacaccctgagcaatgtcagggctctgttgctcaatgttaaccaaaacattgcatttgtcagcgtcaagaccaacatcagcagagataaaaccaatctccctgcaagtggatctaacaatcttctcatagtcaactttcgcagcggtagtgatctcaccaaacaccatcaccatgttggtcttggtgcatgtctcacacgccactttgctttcaggatcttgctctaagcaagcatcaaggatcgcatcagaaatctggtcacaaagcttgtctgggtgtccttcattgacggattcagaggtaaataggaacgtttccatttctacacatacacaaaaacaaaatcaacactacacaagcgaagattccagtttcaagatctaattccatcaatttccgatcgaatttgaaaaattaagcaacaaatttcaaaaaaaaaaaatgtatagtttcacttccaccgacacattttctgcagagtgattccaaaattttccagttacagaatctaattcgatcaatttctaatcagatttgagcaattaagctaaacaaatctaaggaaacaacgtccgagcgtcagatctagtttcaaatcgcgaaacgagtgattacattagctaccaaagcaaaaatgaacagatctaacgaagagagtgacgatggatcggagaaaccaaacctgttgaaggaagtagagagggagagagattggaatcgagatctggaggagaaaaatgaaagcgatagagaagaaagagagagagatttattgagaacaagtgaggaaaactcggcgcgtgactcgctctctgtttgttttgcccgctcttctctcgtgcttcacatctcttcggtttatattgttgccggagctctgatcacgtgttttatgatctacagtattctcatgtttttagaccgttgatcttttaatgaagaatgaatggacggtgagatgtagacaactaatgtaatctcaccaaccccgttgtcgttggtatgggtgtggttggtgagagagaagagtaatacccgacaatacccgacccggattttgacatcgtaattagatcttggttatatatccgaaccggatcctttggataccacatggaccatgctggcatcaaatcaaggaggagtggtttagattttttcgaaaataaaataaatttattttttctttggatttaattagttttcttttcattatataaagatgttggttggtgatggtgtttattttaatttccgcatttgaaactctttaattcatttaatcaactttttttaataaagtttggagaagctaaatttgccttatgtttgtttgtaggaaatttagtttaattttggtgttctgaagataaaataaaaactctaggaagtaaaattctttgtgtatatgtgactagtagtagcagattagcagccaataaaaacatccttagtatatatataagacattagtttacaagcgtttttctctatatatcttcttttattgaaattttaaggctttaaagaaaaaaatggttgtggttgcagctgaagaatacaaacataagagaagagatcagtaaagaataattagaaactgagaccgagctgaaggccgaaagcagcatggacgaggaaaagcgccattatcccgctcccaaggatcccgtgcacgttcctcagttcgggtttctcctgcacattcaacgagtttcttgatcctataacttaataaatcatcaaggcttcacattgcaagatcgtgcaagtactttaccttgaacaaagatggtaagattgtttgaaccgtcaataggccaagacctataagtcctgtaacagcgtgcggactacattgcacaaattcgcaaccatatcagtcgcccaattgatatctcattactaagttaaaagagatcttctagatagcataagtgttgtttgtacaagtttggaatcagtaaatgagagtttactaggtcagaaaaatatacctttcgaagatgggtttgtcggaagtaagaagggatataacaccaccagttgctccaagggcgaaaaagaaaaacattccggctagaagctttgggtgcaggtcttttgcctttgccttctcctcctgaaaatttcaaggcaaatgaagaaaacagtttaaacaacaacgcttcttgtactactatagtcagattatttgggtaaatagtcttacaatgtcatcagaataacgaatccggaagcctaggtatgttccatagccacccatagcaaaaagtaccactgcctgagagaaaacatatgacaaatccaacccatcacacacaaatacagatgaatattcataacaaaacaagaacaagttctaaaggaactggctttagtacacagcttgtggaatcttgcagatgaggcaaaagttaaagaagcatgaaattggtatggagaaggaagctagtaagtaatcaatcataccatgttccctggatgtccccaatgaacaagccaatcaggtagattcaaggattttacaatctccacaacgggtccaaacacagatcttacagtttcggctgccaatagagacatgaattagcatactcatgtaaacttacaaaacagggttcttgtcacaacagacttgatccaattcatttacaggcagagaaatattttgacttcaacaagtgtcacaaagccacagatcattgacatagttaatgaaataactaattgatgtttctcactaatggttacttaaagattcaatttttgtttgaaagattggagctgagaagtataaattacctccagggagagaagcaacgaggaggagaggcaaaggagagactgataacatcaatgtctctctaatctcattctcatcatcacctcttgcttcaatttcttcatctccgtcgactatcgaagaacacgccggagtcaacgggatctttctccggcgaaaggtagagagcgcgggaaacgaagacacatttgagaatctggacagacactgagtggaattgagtaaacgcgacgacggaagtgatgaagcaggagagatatggtttgagagagcggagaatccggtgattgccgccattggaggatagagcttagtgtttgtgttggtaaagtgagggaaatggtaggggaagggaatgagatagtctgagaaaggtgaagaaagtgacacgactctatgttaaaacgctgccgttttgcattttttcgcgtggactcaacacgctccgattcccacgtgactctcacgtgagccttaaaatatgaaactctctaattcctttagaggctttcaacagttagtataccaatcggatacgaggtaagccaacagcccaacacggcaacacgtacccttattactttggcttagccactgtataatgtatagttgctgtaacaatcaactgttagtactaaacaataattaagtattgtcttttaaaatattgttcattcttcttcatatatagtatacatggattactagtattatattgaatagttacatgtcaattattcataatcgtaaatgttaacatcgcaaggcgattttccattatacacgtctactacattcatatgataggggaggcacctatttgagtggaatattacgacagatgcatattattgtatgtttatgttactaaaagagcacctttatcaattattagattaagtatgtaataaaatattggtagatagatttcgacctctaggtattaccatgtagtcactgagaaatcttttggggtagggactccatctcaataatcatgtagactaattattggcaatataaaactaattaaaatgtaacaacaaacatacaatccacaagttgacagtttaacacttcaaatggatataacagaagcaaagactcatcatacatccattttgtgactgtttaattagtaatggtgttttggtatatgaagcgagctacgataaagataatggggggtgatagtgtgttctagagcttactgatttgaaaagtgttaagaaattagtgtaacaaagttatctttttcaatttttggaaaccctcataaatattgttttgaaaagtgccacaccaacttaccaacttaaaccgctgcgccataaacattcaaatttattttgccattgtatacataaatgacatatgttattatatcttattatatatacacacaaattcttcccataagaatatatgtatgtgtggtggcctcgggatcaatcacttttgacaatgtcttgtgggaaatgacttagtcaaacctttcacttggttttttggaaaataaattacacatcactttcaccttttctctgatttttggttttaatgtcaacttttcgttttattttattttcttatcactgaccttcgggctgtccatgaactatttcctttttttttattggtagtgtactaagacaaaataaacaccataaatgtttgactctgcatgcaccatttttacgtttatatatatatatatatatatatatatatatatatatataatttatgtttgtcatagtatagtttcgtataccatgtaactaaacatattatgttggttctgacttttggttggttcgatttggtttaatcgaatacagaccaaaaaccggttatatcgatcgactaacgattgtttagtctcttcaagagacaaccatgcatgtgttcaatcgtaatgtggacattaaagaaaactttaaaccatttgtccaatttgttttcttctcacaaaccatttgtccaatttcttaaaataaaagagcattaaagaacttaattaattagtacttattgaattcttcttcacaaatttggtttgttccttttgatttctttctccactattcacaacttagaccagctgttcttgttttgcattggtgaccaaaaacacaactaaaatttatatgcactgtttctctctctccctctctacatatagatatatatatatatatataatataataatgaaggtaatccacatggggagaggagaaaaagcataatggaaggaaaatagaaaataggtttctcattgacttgagcgtttccaatacatagagcaataaatagatgtctttatctttgataattacagaaccagagaactctttttcttttcccttcttctctttcaaaaaacaaaacaaagatatctcaaccaaaacacttagaccaagagagacagatagagagatgggtagggctccatgttgtgacaaggcaaatgtgaagagaggtccatggtctcctgaagaagacgcaaagcttaaagattacatcgagaaacaaggaactggtggcaattggattgctctccctcacaaagctggtattttcatatctcatgattcgaatgggttaatttcttggacttttttttagtgttttctttgggttttggttgattttttttaataatctcttttataatctgatgtataaaggtttaaggagatgtgggaagagttgcagactgagatggttaaattatttgagaccaaacataagacatggagatttcactgaagaagaagacaatattatctacagcctctttgcctccattggaagcaggttaagaaagtcttagtatacatagtcatttttcaatattgatagatctgatctcttaaagatatgaaaagattactcttgtttaaatcatatgaaagaaatgaagaaagtgggtatcagaagaaaagaagagactatgtatgtatgtttcaaggatgattccatctcaattgttttattttccttaattaaaaactaatttctttcattgattttagcttttacatacccaccttttgtgcagtataattgcctccttttgtgggtatattctttaggtcataaattagccaaaaaaaaaacaaagtggaagcaaattcactttgaaaagtattgaagatttatggttacaaaattatttttttatttagcttattgtgataacataaaggagttaatcattgaaaatgcaggtggtcagtaatagcagctcacttgcaaggtagaactgataatgacatcaagaactattggaacactaagctcaagaagaagctcatagccaccatggctcctcctccacatcaccacttagccattgctacatcatcatcatcagcatccccatcatcatcatcacattacaacatgatcaatagtcttcttccgtataacccatcaacaaaccaacttctcacacctcatcagggtatcatgatgacaatgatgggccaacaacaacaactattttatcaagaagacatgggcaatttggtaaattctccaaacagaaacaatctcataatgagccatcaagaagacaaccaagagcaaagtacaaacaagggaataatgttgttgagtgatgtaagaagtgggtcgagtacaacaagtacagtaacaagagtgaagatggaacatcgtgatcatgatgatcatcatcatcatcatgaagaagatgagagatcaatgacctcggtagtgatggaagattatggaatggaggagatcaagcaattaataagtagtagttgtacgagtagtaacaatagcttgtggtttgacgaaaacaagacggaggataagttcatgttgtactactgatctcgagtaccaactttgatttaatctccatatatagtctctctcttatctctttccttgtcaaaaccaaatatgaattattaaaactttgttttgaggagtttaaacgtgattcacgagtcctcatgatcaaactctatattttgttgaacttgcaactgttaccgtgttacgtaaaatctttactgatcaagaaaacattaagcctaacaagacgatttctgtagacaaccaacatttctatggccaataagcttacatatatctaccatgaaaaacatgtgatacaaaaaactatcgtatcataacaatgtcgcatcattttctacttgtttcattttttctcttttttcactgtctattcattgaaaactattcaaaaagtagctttgaaattgtcgtacaatagaaaaaatgtttgcttatccatcagctaggttcatcacttgaatcgaattttgtagctagggtgcgcataaccaagaatatacaccttcgtatttgtagactttatattaatctatcatataacaatactctaataattggctttattaaaaaagatcagaatatttggtatgctaccttgtattgttcccctcaacctcattagtgaatccaaaatcctatcaataaacacaaattaaaacacatgcacacatactttgtatcttaccaattaaattcgaaaacaattcccacttgcatttctttaaggtattattctttctttaaattctctttgtatacactgaattatgtaattaaacaaccaatagttgatcaaagacgtccgattatatatatgttataatcatatccaatccaccaccacatctattatatatgtcgagataggccattttaatataatatggatcacaataataattcaaactattcttaaattttataattctcatttctcgactcaataatattcttccatcgaaactggtcgtcaatcgtaccggtaagagagtcgtacgaagattgggctccatattttgctatagcattattggtacagaaatttataattaacttgtccgtcaaattttgttttcttcttcgaccgacgaattagaaaaagaatcttcactgtttaaataatctagtacatatagtattaatgtacatgcatgatcattatatatttgtagtttgaatagtctgcattataagggaatgaagaaagatggcgttggaatttgagtggagaggaacttgacaaaaggtacgacattgcctctctgtaaaagatgcttatcattgtgctaaaatttaataattcattgaaacactattacatcgactgataaactttagtgacaagaactaaattactaagataaattttttttggacaagtgctatcattgactattggcttctattgcgatgaaagtctaatatgacaaattctgcaaagtcatatacaagaagatagctacggaaagctcaaactcaagcacaagactatttctagtattttggaattcacatagaggaataaagtaactcctagtaaagacaagaactagagtttgtgtaatgttttgaacttttgacattttgcattgatcaatttgcttcttcttttttagtacaaaattgatatccaaagaaggaaagagagatatcagctgtgataagaaagttggaacaatgaatgatatatacacacttgcggttgagtgttagagccaatgtttggagaagtttgtaaacattaaacattggctctaaattacacatttacatttatactagatcttaaaatcaaaggataacctaccttttatttaattgatgaaataaggattaaggggtatttatagcaaatgtaatggttctgtacaatgaatggatatataaacacttgtggttgtgagttagagccaatgttttggagaaatttgtgaatatatcacaagaaatgccattgccaataaactttgtctacgatgcctccaccggttcgaactgcaaggtgaagcctttctgcagccggaggaaccccccagagatatggaaccgcaactgtcatcgttagcttctcttgtaaaccacttgtgctctctgtctctgtagcaacaatctttaaaacacacagagtactgattcaattagacaaaaaaatgttaagagagaaagaaagagagatttcatggtaaatacaaacctctccaccgtgttctaagacagtatcttcaacaacatcactaagcatctcaacagaacgacagaatccaaagatacatagtcttcttcccatatccagtccctgacattgtttatacacaatgcactgcattatcatctgtatgttcaagtttaacaaaccaaaaaagtaagcgttgcatacatttgtcgctgcgatgtcaaagagagctccaagacatagaccttgagcaggatccatgtaagcactttcatgaaacttttgatgtttttctagtgatctagatctcccatgtttcttctgtcacaaaacatatatatgattacataaaagagtaacaacacctctcaatgaaatgaaatgaattttacatacattagatgatttgatgcggcgaggaaccatattgccaccaatctgaactaagccatcagatgtgaaaagtgtaatcctttcttcaggaacccattcaatctctgtaccaacaaaacagaacattgaatcagaaactccatttagtccaaatttcatctagtgatcaaaaatgccccaagtaaaccggttccggtttagttacataattcagatcacagagagatcatcaacctagttcgaattttctaaaccagtcattgaaattcagatcacagacgattaccgttgtttgcatcggaccaagggaagaagttgaaagcatcgtcatcggagaagttaccgtaatgtgatgctttaaccgcgaatcgtgatggccgaacgcgggaaagaagagatgagaatcgagcggcggagggatgagattggcgaaaaggagagatcgtgaggtgagaggagaaggtagagaagagaagcgtagaagtctctgccataaccacaaagacagaaacagaatcacagaaacagagagatgcgtgaggcggtggtggaagaagaaggagaaggacaaaacgtgagcgagtctacgccacatgctttttaacgccgatgctgccacgtgccccgacttttgtttttcttttctttctttatcttaagacaaaactaaacaaacggaactgaatatggttaatgtcttaatgtagaacaaagtgtataacatgtcatatttttgtaaaacaatgtgctatttttactatatgcgtatatgtatgagaatagtaaagaaaatagatatcaaagtattcatcatgttatatgcgatttaaaaatttcaacaaacgctgaatttcaggtgtacgaatcactcactcattgtcattggtatcaaaccaactaattctagacattctccacaggcttgcattacaacaagatttctacgttcacagactattttcactgaaataggagcttctagggcttagctcttttgctgaaagattgttctcaacgtgatcatacgttcacagacttatgaagaacttggatctgattgtgtggaaattggaatttcttccttcaggaggtgatcttggaatatcaaatcaccagacatagaagagacacaatactcactgacccttggggttgaggtttctctcctcatctttgtctactctgctgaaagattgatgtcggcagtagatgcattagcaggatcacttttaccttcggaaaggagtcatctcttctcatttgacctcttttgactcaaaattccatgcttaggcttatctggatagtgaggaaccagactttcaagacttgtttaaggattcagagaataagagatataacgaggttgtggttggacatgttaaggtgcagaccccttctcatcaatatagcctacgcttgtcatatatctgagcaagtcctgtgaagagcaattgctgtcctaaaaaaggctaatgatgacaagaaactcatcaatcaccttcctaaatgccaaatccagctctagtgagattcacatctcctcctagttttatttggggtttggtttagttttctatccaggatttacgagtttcttggactttctaagatttaggagacatggtaataaccaaactacctaacatagtaaaagtcactttgattcagctttagttttagtttgtattcaatgcaaaggaaactatttttacaatcacaacttgatgagctaagatcagatgccaaaaatgtcttgtaacagggcataaacaaccatctgtgcaactaagccgtttgattttcttcggcttagcgtgtccatcttatgaacagatataatatgacaagtgttgcgatcataccggcatatttgatccaagtatcaacacgattgcgcctctcaatgagcctcagtaccgaattggagagccctactgtgttcagaacatccaaagctttacgctgtgcactctgagaaaccaaaaaccccaatgtcagaaaacgttaatggcaccaaaacaaaattcacaagaattttaccttcaaacgatccctttgttcagcatatttggagaggatagcaacaccactagaaaacgactcttcaagcattctctttgagttcttcacagagctcatagcttgagcttcctcatcaaatatctgcaaaatgtgagctccttctccactcgctctacctagcaaatccgctctctctttagcttccaacatcttcctctgattcctcgacatgtatttctccagacttagattcaaatactcagcttcttctccaacttgttcagtctttctgcaacaaaactcccaaacttgcttatgatttcaacacaagagtatacaagaattgcaacaaactactcttaacgtttaagaagcactacttcagagattctcaaaccattcatagatcatccaaatttgcttgcgatttcaacacagagtagtacatagaagaattgcaagaaactactctaacgtgattcagaaactactcttgagaggaatgaaattagaaccttctccagagatcgcgctgagatttaacaggaattgagcgccagagagtatccatgttagagcagagagatcggacctcagtaatatctcgtttcacggaggaggctagatcgggagaatccatagaagatgattcgaacctctctaacctctcgattccgtcgcgagccttgagtagaatccttttcgcactactatatacatccgataaggatccgcctccttcgacgataccagacgccattgtatctctcagatcaggacttctcgttaccgaagcgtctctgaatcagatatattcgtatacaatgagtaatataacaaaacaagtgtggagaggaacaaaagagcggatcgaaattcaaaatcacctgagcaagagagagcagacgagagacttgtggcgccgtcctggaattagccgcaggataaatcgcaatcggagatgttacgacgagaaaagatcgagatttaatcggagttagaggaaacaagaaaaagcgctaaatgcttcgttaggcccatatcgaaatgttttatgggcctgaaggttaagttgggccaacacaggcttacaaattgatctctatacttatttctctaatcaacgagagttttgtgaagcattttttttgtgtgaagatgatgtggaatccacacctccactattttctcctttactttttctttgaaaaatattaaccaacttttcgttttagtctaaaagactatgttacatttttcgcatattaacgtagtggaaggttggagaatcctattaatttgtgtaccaacaaggggacaaactgaaattcactattctacaagctcaagaatatttttctgatagagtagctttagtgcatcatgccggtattaatatataaaacctatactattcagatatattttttaaattacgttcttattagtgtaatattgtaaatgtcattatcatttgacgaaaaaaaggaacacctaggtagatagatatatattaccaactcctcttggtttaaaatacaaagcgacacatctttagttataaaacaaactcgtaataatacgatattgttgttcttgtaatagtggtggaaaacattgcagtagctaaaagttgccgatagatgtttcgtttcattttcgtcatcgtcaaattataactaaatgtttgaacgtaggaagagactggaggttggcggtaagtaatagtctaatagattgagttcactaatctctagtgttattcttgtgaacacttacttacgtgaaatgtatgaaataaactttgaagtttcaacgattcacgtgtacccttgtttacatgaaagatatgtgataaatttcaatgattcattttgtgtgaaacttcaattgtcactagttaggtacaaggttgtttcataagaatagtaagattggaaatttagtggtccaagatgtttcctattattgagtggacttcccccgtacatctttttttgcacttctctttttttttttttgcatatttgattaggttttcgttttaattaggttgtctttgatttttgttcattgtatctttcctatgacttatatcacacaacaacgccccagtcccaccacatttcacaatcacaaaagtcatattcacatgcatgtgcggatcgatattttacatacagtcaatcataaagttctcacaaatccaggtagaacaaaatattcttcaaaattagctgagcacaaaacttgtttcactttctttcctttttctttttaggcaaacaaacttgttacattacttgtttttttacttagtgtatgtatacagtctacttttgaaaggacacttaagtgaaattaggcaaattaaatgtttctaaagtttcgttatataactgaagtgatgtttaaacaatctctacttaaaatgcatgtatgagatttaaaacaatcatgaattataagcatgatacatgtaggtacaaagttatctgaaaaaatgaaaaggaaatcgtatttggataagttcgagttcgaccaatcaatcagtaaaggaaacaaattcagatatggacatatacatatgtcttcaccaaaagcaataaggtcgtttcatacactttctaggcatttgctagatgtcacggatacgtgaatgagatggacccttgaaactctagctactaccatatttcatttgttttatttagtttcaataataatttaagaggtacaaaaatgatagaatagaaaggaaaaaaaagtttgggaaagtagtaagataacggaagaggattagtgcacacatgctttccattttccaaagagctaacgtttgtttctctatcatatccaagttttcaatgcttctggattaacattattgcgtttcatatggtcatagcgatgatttaagaaggagctaatcactaatcaaatgtctaaaagatgggaggatattgatcctaattcctacaaatccgaaccacctgtatcattgaaaaagtttatacaagttttgaatgatgagctagtcttcatttaattaacaacatgcattgagtaaacctcgaattaaattttgaaaacatgtaaaagtgttgggtgtacgtattttggaaataaatctagttgtgcgtaagttggctgagtggtctaataaatggataaaatcataaaagcatcaacaaacaaacaaaaaatgacatctcatgaccgtacaatcatacaattagggttaacgtgcaaatataaagctttcacaaaaagaaaaaagatataattcttgattggaaagaaaattcatgaaaataaaaaatttcaaaaaatttataatgtatattgaaaataattgacatcgagcaagctaacatttagagaaaaaaatgaatagacttttttttagtgcaaaaaagaaagagaaaaagtcattatgaaatgaattagagtgattggatgcaacacagtggcaatggagaaaaatgatatataataaagaaataataacaagatattcttagatgatttatcgtttatttaaatagtatagcaggtggaagatggaaatatggaataagaactgttaaggtttcagagagatatacaatatcggtttagaggatcagatgacatcgtaagttaatctgaacctaggtgggaaagctgagaaatagagaattaaaaatttagagaaaagggattaaagcaaagtggtgacacatatgaacaagccaaacacagattaatttagaactaacatgctcacacatgcctctccacccgccaatatgtgagtgtaactatttcatgaaaattaattatattatttttattgaatgcactcttaaaaggactgtcttatagttctctaaaactatatatgtacgaaacctgacaaataaagatgggagattcacaacaccaagattccttaacctttacaataattgaaacagtcgtgaaggcacttgcgaaatttccagcccactcatatggcatataactaattattagattaaaattcaaaaactattagccaattattaagacaaaaagcataatattaaattacaaagtaaatattaatctaaaaagtgactagaaaatttgcatataaacaaagacgacgaacataaagagaaaaaaacgaaggaagggcacgtgtggagagttttgcagtgatttttcttcagttttggtggaaaacatcaaactagacttcttatttctcttttgctcaaaaaaaaaaaaaatatttatcaattattttgctgtaattgataggtttccctttagtttatgcataagtttatctatatttgatcgactcactattaataatttagctcatatcatttttttcttaaacagttaatttagtttctttaataaatttgttttcatcataaatttcgttttgaaaaagaaaataaaaacagaacttatactgaaaagaataatgatgaaaactatatttccaacctctttattaatcaccagatacgagttaatccagtttcttaaatattgccaaccgataaatatatactcttttataaaatttgttagcattaggaatttgaaaactatggttatatatgtgtgtataaaaataacaaatggtgtttttgggttgtcctggactccagaaaaaattatgggccaaatgtttgtaactcctacggtttataatataaaacatataaataatttaatttttcgtaattaaaatgaatgttcagactcatcgattgcacatagtaaattttgaaaatggaagtcatacctgtttttagtgcaataattaagattgaaccccatagataaattatgttaattccattatatatggtattatcagttttgcaaatgctttccatgcataagctggcgaatcaatgttcatttgtcgtcatattgctttattttattcccttcataattaacttttatggggattattccactaaaatcaaaaatctcagtgccgttacaaaagttagacattggtttttttttttttttaaacaataaaaaatctcagtagatgggattcgccactcgtgaatatccctcacacgttctagctagtcatataggttgctgctaaggcgaggctgtctccattgtaccatctcgaaaggaaacaatgcaatacctcaacatcgacagagtccataatgcaatccatgaaataatttcataatatatagtaacaaaaatattaactatttccttacatgcgaaaacgtagacgaacaataaccaaataactaacaaacgtgactatgcctaaatttagaagctttattgcgagttaaactttaataacgatatgacatgagaaaattgaattattttataataacatcattatttttccacactgtctgtccttgttatcggatcgacaaagcaatgtgagttctcctatctcattgttcagatttcaagtaaaaagtttggatctaatttgactgagtcaataatcgtagagtttcttgttaatgagataattgaagtttttacttcagattcgcgtaatttcaaaatgttttttattaaagttttcctctaagaaagtcaaaaggaataaatgtgtaaacagcaaaatcaatgaatgcgacttttgatagatttaattgttaatttgctagtcctcgaaacattaaaacagtgtaagaaaatgtcttctacttctttgccaacagaaaattttaatcaactaatcttcatctcatttattctattaaattatcaatttttaaaactttgatggatgtgattatctggaatcatttgactaatgaagaatgcgttgacttcatgaatcttagtttttttctgcctcaaaatagtagtaattctaagtttctaaccatacgaacttcagtttcaaccaaaaaaaaaaagctattaaaaccaattaagtacataattaaacaattgattaaccctaaattaatgaaaaatgtcatcaagagagttaaggaaattcgggcataatgagtgtcacgtccaccacttttcaatagaggtacttgagtgggcattcgagtatttttgttttgtctctaattcaaattctacaaaaacaaataccactcacactcatgtatgtgttggtgtatatatccaagagtgtgtgatatgcgtcttctttttgttctgtgtcaccgatcttattaatataaagataccgaaaattatatataatccctttgtttggggagggaatttggaccacataactttatattatcatatacttagttgttaataatttactttaataatagctttcctgaatagagactatgcaggagcacatgatctctgattactaagataaaatatgattagaattgatgaatgaccttcaatttgactaatatgttgctgtaatatcgagtttgctatgaagaaggaactggagcttgaattcgcgaaccacaattaaggcatggctaataatattggagtagttagttctttggtttgttgaacaaaaaaaaaatacgttagttctttggttttgttgttggtctaaaatccgttcggaataactgtatatagactcgagtttactcgtttctctttattcgataatttatttggttttgataatattatttttgtaaaatgtgtggttgaaaagaaaaataaaacttatttcggaaattatagttatataataaaatgaaaaagaaaatccaccttgtcgcattaaataatcatcaagtacaagtggtgaagtcaatctcaaccggtaagataagtcaatatgtttgcatggatatgtgtctataacaaaaaccaatacgtatttgcatttatattcacacggacacgatattactttctgtgtttcaatctttcagatgtaagtaatgaccggatctgattgcaagagtcggaaattaccttactttcaatttattaccactttccatttacgtgagtgtcctatgtaccaattcgagtctccctgaagttaattttagtgtgttgtcattttaaccttattttgtttgacatgcaccgtacgtaacatatccatatttctacctacggcttaaatagttaattttgtgttgtaaaaaactgtttgatgaataatgaaaatttactattggaaggtctcttatatagcatattcacaatcacctaaagttctgataaaatttaacgtcttatttaaacatattaaaaaggtggtgttttagaagcatccgaaaatattaaagtggtttagttatgattcaggtgattgaagtaacaatggaatgatatttaacttttataatatctttgaaggcaatccgtcgtgaattatgttaacatcagtgacttttgtgtaagtgaagataaaagtatgcatcaaagtcagaggacatgtgttgatctcgtggataaatagactgatttccttgaaattacgacaccattattacaagacaccaaatataacttctatttacaaagtcaggtttttcgttgtgctctattcaacgggacaaggtcatggaaggtgtagtagctaagttaaccctaatgtcaggatcgtagtagcttctctgcagtctgcgaatattgtctccattcactgtttaggaaaaaccaagtgggccaatgactgtagtaactttttaaaacaaaggatttttaaccaaatccatttcgtttagttggacaaaatgattaattaggataataaaaagtagggtaggttttgttttcaacaaacgggcaaaatcaccgacgtgactttcggttaacaaacagattcgattcttgaaattagtttaggtgaaaataattcagaaataaattttcttctacgcatgagtaaaaaaaatatatattacatttccaaaataaacgtttttagtccaaaaaaaaaaatgtcagagtgatagaaaacaggaaagatgactatgaaaatccaccttcattgttagtgttacatggttatttcaagggttttgatcaacgacataatccattgtttttaggctttttcaggtgaaaccatagttaaaagttttttttttcactattatgatgagagtggagttctttttttgcatacgtattacacataattaaaaagattatatgacaatattgttaagccgttataatcaatcagctactatatgccctttattttgctaattatctcaaaaaaaatcatagagaagttgcactcgtcattgtactcttgacatttactaattaaaagatttcttctgcataagaaaatgaggagacaatttaaatttggatctctagaggcgtgattaaagcagttctttcccacaaaagatggctttcattatattatactactatttaatttccgtaccacagtgtcttactctgactctgattttatttctttttaattaaataatcacataaataattcactatcacgactttcgtttttccatttaaattaaactaaaccggttagattcgtttttcttcaccaggttaatgtgaaccccaatttttctattttgttaatgatgttttataattgtgattaatacaattagaaaatatctaataattaaagttgagaccataattaaaggaaagggaactattgtgtgaacatatatatattcttacacactcgcagagcaacccttcttcacttgggctcattggaatgtgatatcccaaaaagaaaaggcaaaacaaactactactaaaaaagttgagatagtaaaaatacaattgtactttatcatataataattcaatgtacaacaaaactcaactaccaaagtttgcttattactctcaaagaaaaaaacactgattaaaaatagcaaaagagatttgtttatctatatgaaaaataaacttatatagaaattcttatatgattagttgcaattgtaggtgtaacatttaatcgttgatttgtttttttttttggggtgcatttctcttgtagttgtaacaatatttcacacttaagactttcagacaatagtttaaaaacaaccgaacagaagttgcaggtacctataacttgtgtatgaatccatccacagttttgtaaacgttgactgtttgacattttgaatgtaattttatttaattagatcctacacaacaataatcacatctataatttgccaatacattttaataaaaccacttaacaaaatggttttaacttttaatccagtaattttctgtagttggtgtcatgatttataactactgtacacatttccaagatctaacgaacaatcataatcgataataattgtacctaccaaatttggtctaaaaaaatagaagaagtgattatatatatattcttttttgtttttgatgctaaatattttttttttaatgtgattatcgtttatcattgcacctcacggtaattattattgtttttccctgattttataaaaaagatatatagagagattattgagaccaatgaagagcagaaactgttgggagtcaaaaaaaacttatctccaatttctaacagtgttctatgtcggattccatcaatctctctctcttccatcatctgtcactttctttgttttctacgcaacaagaaaccgaagaaaaaaaaataacaatttactaaagtattaattcctttttttgtgtgacaaaataaaaacccactaaaaagcaaacgattccaagaacatggaaacaaatgtgtaaaaaggaaataaaaacatcaagcgtgggctgaaaatcactacacgaaaatccaaattttggtaattctattaaattttttaagttggtaataaagagaataaatacacaaattgactggccagtacacaagttgactgattaatcgcaaattatacataattaataattaaaaaacggtaaaaaacgttaataaataaggaaataaatcaaaacaaatgaagagtgggattagtaaagtattaaagaaagcatatagagcggaagaaaactgaagatggaagattataaaaataagtgttgtgaagaagaagctattcgatttttatagtcttgagttttattttattttaataagaaaacaaaataagatttttaaaaaatagtatattatttatttattaattttcttcagggctgttgtggtttttgaggttctctataaagcaaagtaagaaaacatctacacaaatgtcccaacaatctgatcagaaaaaagtagacgaagaagaagaaattaagtcacttgaacaatggcgttggtccgaaatgcaaggccttgagcttctccctcataacaccaacaacaactcacgaagctccagagaaactcaccggaaatggataatgacggtggtgctcctcctcctccgccgacactagtggtggaagagcctaagaaagcagagattcgtggagttgcttttaaagagctattcagattcgccgacggattagattatgtattgatgggaattggctctgttggtgcttttgtccatggctgctctttacctctgtttcttcgattcttcgccgatcttgttaattcctttggttctaattctaataacgttgaaaagatgatggaagaagttctcaaggtactaactttatttctttctcttcatcttcaatctttgaaaacactaacttgtttttggttattgcagtatgcgctttactttttagtggttggtgctgcaatctgggcttcctcttgggcaggttagaagaaagttacttaaagatctaaacttttatactgttctcttgatctgattcggttttaaatatggtttcgttgttgcagagatttcgtgttggatgtggagtggagagagacaaacaacgaagatgaggattaagtatttagaagcagctttgaatcaagacattcagttctttgatacagaagttcgaacttcagatgttgtcttcgccattaacaccgacgctgttatggttcaagacgccattagtgagaaagtaagaatcttcaaattcttagtctttttgtttcttcttccttatctgatctgtttttttttgggaatctcagcttggtaatttcatccattacatggcgacttttgtttctggattcatcgtgggtttcactgcggtgtggcaactagctttagtgactctcgcggtggttccgttgattgctgtgatcggaggaattcacaccactactctctctaaactatctaataagagtcaagagtctctttcacaagctggtaatatcgtcgaacaggtagagtgcacaaatccctagaaataaataaataaagtttctatttttgtcaaatccagtaatcatcagatcattctatcatctggtttttttttgggtctgattcaatttctgaaaaaaatggcagacagtggtacaaatcagggtagtgatggctttcgttggagaatcaagagcttcacaagcttattcatcagctttgaagattgctcagaagcttggttacaaaacaggtttagctaaaggaatgggacttggtgctacatacttcgttgtcttttgttgttacgctctcttgctttggtacggtggttatctagttcgccaccatttgaccaacggtggtctcgctattgccacaatgttcgccgttatgattggtggattgtaagcaactctttgctcttctctgttcatcactcttgttatcatttggtttgatattggtttgttgatggtgatgagtttttttatttttgtttaaagggcattgggacaatcagcaccgagcatggctgcatttgccaaagcaaaggttgctgctgcaaagatctttagaatcattgatcacaaaccaacgatagagcgtaacagcgagtccggtgtggagttagactcagtcacgggtcttgtcgagcttaaaaatgtggacttttcgtatccgtcaaggccagatgttaagattcttaacaacttctgcctctctgttcctgctgggaagaccattgctttggttgggagcagtggttcaggaaaaagcacagtcgtttcgcttatagagcggttttacgacccgaactcaggttaacaatcttaacattctgttacatttcaagctgttttgttcgagcattgttattttaattaacacggtgttatcgtctctgcaggacaagttttactagatgggcaagacctgaagacgctgaaactgagatggttaaggcaacagatagggctagtgagtcaagaacctgcattattcgccacttctatcaaggagaatatactcttaggccgtcctgacgcagatcaagtcgagatagaggaggctgctcgagtcgcaaatgctcattcctttatcatcaaactacctgatggcttcgacacacaggtctgatggtttatgtgaatctgtgttcttttgtttcttcaattattcattagtttaaggtattttgaaagagtcaaaagagagaagaggtatggtcatggaaaagcatttataacagagtaacatgggtttggtcaacaacgcatgtgagacccagacaagtagttttagtcatgtgtcttgatgttgaattttttttagtgttcatgtgcttgttttttttcttgctactttaacttgaaaaccagcaaccactattccaatggatttttaatccagatagacatatgtttgtttatactcatgtggtaaatgtgaataatgtcaggttggggagagaggattgcagctgtctggtgggcagaagcaaagaatagcgatagcaagagcgatgttgaagaacccggcgatacttctattagatgaggcgacgagtgcattggattctgaatcagagaagcttgtacaagaggctttggatcgtttcatgattggaaggactactctcatcattgctcatcgcctttctaccattcgaaaagctgaccttgttgctgtgctacagcaaggaagtgtctctgagattggaacgcatgatgagcttttttccaagggagaaaatggagtctatgctaagctaattaaaatgcaagaagcagctcacgaaaccgccatgagcaatgcaagaaagagtagcgcaaggtatactcttattcattttgtgtttgttttttgttttgatgatgcttttttttgggttactgatgttaatctatttgttgcagaccgtcgagtgctagaaactcggttagctcgccaataatgactcggaattcgtcgtatggaagatcaccttattcacggagactatccgatttctcaacttctgattttagcctctccattgacgcttcgtcctacccaaactatagaaacgagaagctggccttcaaggatcaagccaattcattctggcgactagctaaaatgaactctccagagtggaaatacgctttgctcggttcagtaggctctgtcatttgtggctcccttagtgcattcttcgcatatgtcctcagtgcagtcttaagcgtctactacaacccggaccacgaatacatgatcaaacagattgataagtactgttatctcttaatcggtctctcttccgcagcacttgtcttcaacacgctccagcattctttctgggacattgtgggtgagaatctgaccaagagagtccgtgagaagatgctgagcgctgtactcaagaatgagatggcttggtttgatcaagaggagaacgaaagtgcaagaatcgcagcaagattagctcttgatgctaataatgtgagatctgcgataggagatagaatatcggttattgtgcagaacacagcactgatgcttgttgcttgcactgccgggtttgttctacaatggagactcgcacttgtccttgtcgcagtcttccccgtagttgttgctgcaactgtcttacaggtttgtgttcttttaaagcatgtgcatgctctcattgttgttcttggatctgaaactttgtcttgtcttttgaacagaaaatgttcatgactggtttctcgggagacctggaagcggcacatgccaagggaacgcagcttgctggtgaagccatagctaatgtcaggacagttgctgcatttaactcggaggcaaagattgtccgtctctacactgcaaacctcgaaccaccattgaaacgatgcttctggaaaggacagatcgctggaagtggttatggtgtagctcagttctgtctttatgcatcttatgctctcgggctatggtacgcatcatggcttgtgaaacacggcatctctgacttctccaaaaccataagagtcttcatggttctgatggtctcagccaatggtgcagcagagacactcacactggctcctgatttcatcaaaggtggtcaagctatgcggtctgttttcgaacttcttgaccggaaaaccgagattgaacctgatgatcctgataccaccccggtcccagaccggttacgtggtgaagtcgagctcaaacatatcgatttctcttacccttcaaggccagacatccagattttccgtgaccttagccttcgtgctagagctggcaaaaccctagctcttgtgggtccaagcgggtgcggaaaaagctcagttatctccctcatccagagattctacgaaccttcctcaggccgagtcatgatcgacgggaaagacataaggaaatacaacctgaaagccataaggaaacacatagccatagtccctcaagagccgtgcttgttcggaactaccatttacgaaaacattgcatatggacatgaatgtgcgaccgaagcagagatcatacaagccgcgactctagccagtgcgcacaaattcatatccgcgctaccagaaggttacaaaacgtatgttggcgagagaggcgttcagctctcgggaggacagaaacagaggatcgcgatcgcacgtgccctcgtgaggaaagcagagatcatgctgcttgacgaggctacaagcgctcttgatgcagagtccgagagatcagtccaagaagcattagaccaggcttgctctggtagaacatcaatagtcgtggctcataggctatctacaatcaggaacgcacacgtgatcgctgtcatcgatgatggaaaagtggctgaacaaggatcgcattcgcatcttctcaagaaccatcctgatggaatctacgcgcgaatgatacagttgcaaagatttacgcatacacaagtgattggtatgacgtcaggttcaagttctagggttaaggaagatgatgcttagtacttactactttggtcatatagaagaaaaaagaaggagagtaaaaaacaacaaacaccagaagatgtttctgataaaaaactctacgaactcatcattttctctttttttctttctgttttgattttggggttacttatttttggaactacgtttcagatttgatggtatagtattattattgtgtattatcataattaatctaatttttcacctctgtaatatccatttatatgccatatcaatctatgagcctctgcctttctagtgaagtgaagaaggtgatgatgagaggtatgtatctcataatcatcgaggcacttgttaccatatatattggtttggtcttgttctagatttcaggataagcctaacttttcaatcatgagatccgttctaaaagaaatattatggtatatgatgaaaatgtaatcttttaaggtttttaattgtattggttagatgggtgatgggtctcgaatgttgtgggtctattttaaaatctattgtgtgtacatcatgcttttatactagatcatgattagtaatgtaagcatataaataattaactatgacaatattgtcaaaaagaatgctttagatgtatagacacacgaacatacgtggggaacaaaattatgaagatgagaaaacagaagatgagaaaaagaagatgggtccaaaaaggacattgaatgagatgatgagacccaaagctaaaacaataatgaaaaaaagaaagaaaagacaacatttcttttgtgtttatataactttttatgaacaaaacaattcttgacttcgtttctttgtgcaacacacgcgtgcgaccacacacacatatatgcatatgggacacacaccatgatgatgatgactactttgttttagctgttgaatgcaaataaatttgtgtttaattatgaacaaacttggaaattatagtggtggagaagaagaagcactagctcctctcggcacatgtcgttcactaattgagaaattcatagaaggccaataatttaagctacagtactggaattccccactttctattaataaaagtttaacaatgtcaccaaggtttttttactcttattttttttttatgtaaagtagcatggatactggaacttgaactacatttataacttttacaaatcaacgcaagattttttttgtaagattagattatatttttgtgaacaccgtgaaaatgcaaattaaaaataatgaaaagatatgcaacagatggatactgggagtgggacataagaaaagctctgaagataaaacatgcgcaagcagagaaatggtatagatcaagatgagatttgcacctcgatccgtttgatattcaagtctattacgcctattcctaatccaaagaggaacagcgttagaagagtcatttatcaaggtgttgcggatgatgaatttaggctccgttatgggcttggaaacaaaacactagagggcctgcatacttttcccgatcactttgagtgtctcttgtctgtgtaacacttaatttagaatttcttggtggatgccttagcggcggggttttctcaaaatgttatcactcttttatttgaatccttgccaacattttggattagcctttgcgaataatatatatatatatatatatatatatatatatatatatatatatatatatatatatatcatcacttgcggtctcattagtccctcatacagtatctctgtgaaatcgttataacgataactctcttagacgaagaagaaatcgcgaaacgagaatgtcattctcagacgattgtacatctccatcggaaaagaatcgagctcgtacgagtcaagaaccacgagagcgccctcaagatttgtctttcttgtcatccaaggtaacagagaagcaaattatgagccaagaaccgtttgaaacgtcttgctcctctgtttctccgatgaacagagacaaagaagcctttaacagtcgacatggtccattctcgaaaaaccaaaactacttcgaaagtaatgacatcaccatgaacactgaaaacctgctaaatcctttccatttcggaggaggttcttgtggttgtgcctttttatcaacagagtcgatgttatgttcttttaccgtttcaggtgaagaacatggcacaaacaattctgacactttgggagacccaagtaacatttctcttcgttgttttgggagcattgaatccatattgaaggtagcaagagatggaatagagattacgatgatgcctatccctagacttgtcaacaacgcacctcaatggaccatcaagaagagactgaccgagcataatgttaaccctacttatggccaacttcgtctgcccagaagcttcttcgaacagcagattcgaggacatctgcctgaagctgatttgcaaaagcggactcattgttaaggtataggacaacgacacgagcacaatgcatgagctgcgtctggcagtacaatatacctatgttctaacgggtgactggctggaagattttatccaaaaggagaagtttgaaagaaagagacgatataggactcttatgggattcttctgcttctaggcttcactttggcgtgattgctcgtggaaaggcaatagttccccggaagagaacaaggtctgcataatgtgatctcaattacaaacgcatatcagcagctgagagagctagtgttttgttctttctattttgtcaaaacaacgattggtatggcttatatggttaagttttttatgcaaccaacacaaacaatatatgatttatcagatttaaacttctaagtgaagctaaaccagtaactgcatgatagatacttggcaacagacaaaaaacctgtatcattaatttaggagattatagttttacaacaaaatttcgggttccattaactaaataaggaaaataactgtaaaaactcaggcagacatcagctttggaccattgtctggcattcccattccaccagctaaatctgcatcgagttgcgagtgtggcgctggtcgctctatcttcttcacactgcaatcacacaaaaatccaaatggacaatagaaagatattaagtctgagtacagagcaacagacatgcatagatcaataatataatcatacagaggtaatcaagttacaagtgctaaaacatttttagctacgccagtgacgagaaatagctttaacattgccagcaagatgaattcaaagtagacgagcacaagaaccaaacacagttccaagatcaaaacaagatagaaaccaagaccaaggaagaagaatccacataccgctttttgtgtttcttagtcttgaaatgataatccatcactgatgcattggagaagttccgactgaaaaatatcaaggtagagagacaaggtcaatcaaatacaaacaaatgttcacacaaacatggaaatctagagtaattcaaagattgtctttttgcacatataatcttactggcagagtaagcagttgaattgacccattccaggtaaatcctccgtctctggtttacgcaactctgtgaataccaaattagacatcagctttgggccattgtccggcatccccattcccccggctaaatctgcatcgagttgcgagtgtggcgcttgtcccatcatcatattcacactgcaatccaagtggacaaaacacatataataagtcttgagtacagagcaacactgcaacagacatgtataatcatacaaaggtaatcaaattacaaatgctaaaacatctttaggtacacagaagtgaagagaaatagctttaacattgcaagcaagaaagtaaacgagcacaagaaccaaacacagttccaagaacacaaaacaaaatagaaaccaaggccaaggaaggagaagaatccacataccgcttcttgtgtttcttagtcttgaaatgatcatccctcactgatacgttggagaagtatcgactaaaacatatcaaggtaaaacaaacaaatgggtcatatagagtaattcaaagataatgtatttgctaaaaaaaagtttcataaaccaaaagaatcgtcaatagagtaatcatagaatctctcttactcgcagtgtaagcagtagaattgacccattccaggcaaatcctcgtcaagctgtaacggcttaatctccgtctccggtttacgcaactctgtgtaaaccaagtcatcgcctttgacttcgaatttgtcacggcgagctgttttgtgagataatctcctcttcttcacttttctagtcggacatctacccattttagcttcctaagtactgagatcgaatcatcaattgaaaaattagtgactaattgataagaatctaaacgaatttgcagattaattcaaaacttacgattcagagaagaaactgtgtaggaggagctgaagacgacgaatgcggaagaggaaaccctagaaaaaatatcagtttcggttataaagtattgattaacctaaaaagggcggtttcagtgatggagactttgacgcaaggcccatttattaaacaggcttagataggcccattaataattaatgatttggaaatcagtaatacatacggaaccaattaagatctagtctgaaattattctgaaatagcattgtaagataagtcacagagttctagcaatgtacttggaccgaattagtgacagaagcgtaggtttactgataaatctcataaccttgtttttagggttccattaatttattagtataacaagaaaccaataaattcttagaagtggagagagcaagggaatgaaaggcctctttgcgttgcatactcttaatgctccccacaatgatggttttgttgtcttggggagggtttgaagcttgtttcttctctctataattttttttgtcaccaatacgtcatgtctccaccacacttactatcccgagtttgaaatgctttccaattaatgttttaatagaaccgatcctacttatgttatgtggatttacatctagagcaaggacaatgtgtcattctcattcctccagctagataatacgtggttagcaagatttgtttgaaatgtgggacgttccttttttctttccagatacttctacaccatattggttcgtcaatggggtctaattgttctaataaactaaggtgctcctgccgaggaatacaataattgtaacaatgatagtgaaacagaccggtaccaaatccaaacttttcatattatttattagtgtaataatgttgcatggagatccatttagatgtttaaaattgagttcttgatgagttggttctactttgtctctgcccccactaaacttgatttcaaaacgtttctatagcccatctttttcatgttgtcttaattatcagatagattttactctttagactcctaagaccaagttactgtatatcattttgattatcttattttctttcactttctaactgtagtttacttttaggttccattccgtaaacattgctatcgttttgtgatgaacacaaatttcttttaatttgttctttcctcattatttcctagcaaaatgaatggaaattatatttcataaaatgaatctttaatagtttaatccatgttacagccattttcacctttacatgagagacaaatatgtacggcgaactttctagcaacaaaaaactgacatgcatgaagatggtttttttttttttttttttttgccagtcgcatgaagatggtttataaccatattgaatggtcatttttgtaagctacaacgagaggcgagcaatgagacttgccaaaaaaatatgaggaaaaatggtgacttgcatgtgtacttaaaatggcaccatatggatggatgaaactacttaaagggttgaaacgagacgattttctgttgccatatttttcttgattttgtgtggctgtgtataccataatctctaattgcaacctgaaattaaaatggtctatttatgttgcaattagtgattatgttttatattaaccttggtaaagttagttaaaattatccaagtcagcctgacgtgttacactgtggaacacgaaaacaaatctttgtagtttgtatgtgttgaaatcgtatttagctacatataataagtgaccatttctaccctaaacttccaaattactgaacaaaacgtttcaaaagatccaaacatcgattttcaaaatacaaacacaaacttacgtacgttgaagtttgtggtcattgtgatcgttaactttacgaaagattttagataatagacaagaaagttctcaatcaaactctatatttcatgtgtatataataatatgtgtccacctcatgtattacgtcactcataggaccatatgaccaaaaaaaatcaacaaaacacaatgaaacatgatgttgacaaaatggaccggtgaaaggaggaacgaaacgcaattacgcaacccttgggacattttttttttttaacttttcttatccttttactgtttatgcagttgaaagattttcagataaaattcaattttcacacagcgaacccaatatgttagcattcaaagaaaagtaaaaactcagtgagttaatattgcaattcctcttgtctctatctctataccgcagcccatgttttttgtagataggcggttcttggctgtttccatgaagctgaaactaacaaaaccaaagtaatcatttaattaaaatcactaattgtgctctttaggagagcaaaattcttttgatttatgcaagaatttaaaaaataattatataagctattggtgctgaacgaattatgtaaagtagtgtatgccagtaggtgatagtgatacgaatagtgtattacaacgaaacgtgaaattacattcttgatactcgaaaacatatacaattttttaaaaaattgttcagatatatgatacacatttttgttgatgttaatttagtaatatatgtacattacacacacatgtctcgaattcttctatgtactagtatcaaatatattaatcggtcaaactacttgacagattaaaaccatgtgcgacttctcgtatagcttgtattttaaagttttgatctgatcttaatatgcgtttattggatcatataatataacatgtggtattttaatatcataaattttggtttcttttcctaaaaatacaacaaaatatctaaaactttttgggaaatctgttagaagatttttttttgaatcaattgtagtaaatcacttcttaaaatgaattttttaaataatataaaacataaaagagaagagaagaggaggttccatcaacttcacttacaatgagaaaagactatgcaatttgcacaatcatgactttaaccaatacacatttatcagaagaaaaagaatctatctttatctttaatctctttacaaattcttttttattgataaaatttcaaaaatgatgtgattcaaaaatacaaaaatgatttgattaaaacatcacttttcttcctatatgaacttgtaataataaacgaattaccggacttcataaaatgatttgatttcgtatttaaggccatgaaatcttctaactaaagtttgtttctgataaggtataggatgtatattctttgaattgtgacaattggtcgaatgtatttttaccttaaactgatataagattctgctaatctagactcaagtcatcaagtagtcaaagctgagaaatgatgctctttttgttttcaaaagcaatgttacctttaagaaatcattaaacttgatcaactatttgcgtcacaaacaatttttgtttttaatattatccacggatgattaaagtaatgttgttcagaaacttggtgccttcgtgtctcgtaccatcacttgtgtcaaaccggcgtcaaacgcccactctcgctgacctcagcccccaacaaatacacacatacggaaatgaacatgtaatatcaaaccatataatattcagtaaaaaatcagtatcgataatatagtaaaataataaccttcacgcattccttcttcttctataaatacacacatttgcctccacttactctcgttcaaacaattcttcgtcctattaaatacaaaaaataaaaatccttaaaaatatatccttatcttcaaccaagaatgggagaggtccaagaaggtcccaaagttgaacaagagaagaagccggctgccaccgtagtcccagttgagactactgacggcaagccaaagagcggcggaggagattccgcggcagcagcagcaccaccggtcgccgcggttgtctctgcctttgtttacaaagtggatatgcactgtgaaggctgcgctaagaagataaagcgaatggttaagcactttgatggagtgaaagatgtgacggcagatactggtggaaataagcttttggtggtcggaaagattgatccagtgaaactccaggagaagttggaggagaaaaccaagagaaaggtggttctcgcgaatccaccgccaaaggtagagggacctgttgctgccgccgttggagagaagaaagccgatggtggagataaggaggcggctcctcctgctcctgctccggcagctccaaaagaggtatagatctaattgaataataacaagagacaactatacttttgctactgtacgccaagttcttgacggtttacgttagcaacttaaaaagaataatagtagtgtggatcacactagttaattaggcagataagctaaagtctaaacgaaaaaagattaggcagctaaaacgtaaatccagattttattgtctaacaaagtatggtttatgaatttattgatttgacttttaaattgtttgttgttcagagcgtggtgcctttaaagatcagactacattgcgaaggatgtattcagaaaatcaagaaaataatattgaaaatcaaaggtaagaagggattaataaccaacgaaaatttattaatttttgtttttaataaccaagtaagttactaaatttagaatacaaaataatttaactatgctaattaaaattttattaattgaaattaaacaggagtcgaaacagtggctattgacggagctaaagacgtggtgacggttaaaggaacgatagacgttaaagaacttgtgcctctactcactaagaagctcaaaagaaccgtcgagcctcttgttcccgccaaaaaagatgacggagccgccgagaataagaagacggaagctgccgctcctgacgcaaagaaagaggctccgtccgccggagttaacgaagcaaagaaggaaggaagtgacggtggagagaagaaaaaagaggttggagacggcggagagaagaagaaagaaggtggtgacggcggagagaaaaagaaagaagccggagacggaggagagaagaagaaagatggcggaggtgtgccggccccggtggcgatggtgaataagatggattattatgggtactcagcttatccaacggctcctatgcattggcaagaaggacacgtgtacggtcagagttattcgatgacaggtcagaattatccagtgggaggtcagagttatccaggttcaggatacaactacgcaagtgagagttacgtgccgtacgcgcagccaaacgtgaacgctcctggaatgttcagcgacgagaatcccaatggttgctctgttatgtaataatggggttaaactgtaaatataagaaactataagggtttaaaacataattgtgggaacacaaaacttatgttaaaattttgaaagtctactttgagccagcgaattctgacgtgtaacattgttccttaaatagttagtttttttcaattattgaataattaattgttttactttaattgtagtgttagcaaacaagtaacgataagaataatgtaatattatgaaaaggaatataactatcttgcaaaacggattattaatttttttatttagaaaactccattgtaaaatcattcaaatgattaacttgtacgaaatatttgaaaagattatcaacaataaatgatttttttggtggaaaagctaattaaagccattttctcgatcaactaatgatattattatctccatggtaattattcttaccctttaaatataagtaaagttttatctttatggcattcaatgaatcattagtcctaattatatctaaattaaaatacatacaaaacatgggcgtaaactttgacgtacgtaaacaaaaaatcagttgataatccagaaacaggtagatttgatgtacgtaaactcaaatgaaaaactaaaaatgagcgaaataacatctaattctttcggtaacaaaaaacaactaattttatttttcttaagacatctatttatctaaattaaagagttgaaaatatagcgtagtacgtcacattgtagtttgagaagagactatattttctttaacaaagaaaaaaatttgtaagataattgcagtgttgtaactcgaatattatattttgacttagaaatccattaatagaaatcgtgaaagcactttgtctgatcgcataggcatccattgtctaccaaaactaatgagacgaccgaattattctgttcaagaaaagctaagaaagccattttgaagataagccaacttttaattctcaatgccaacatgcataattcggtcttgatccatatatagttgtggttccttcaaatgtatttttcttctgatttgtgcaataccttttgtctgacatgcacttgaattagtttaagtcgattatgagcaacttcactgaagatcgtatatcacttctttttttggaaaaggtttatcatattataacttttgctcaagtattaaaacagttgtttgatttggtaactttaattttggttttatgacttaaggaattgtacgttctctgccgtggatttttcggagcatactttgtatgattgtcatcaatatcaccaccttctagtgtccatagataataaccattgatcgtagtgtttgcatctctttctgcaggatcttaaacatgttgttgaaccagattttcagaaaaagaagacaatattcaaaaaccatagaaatcgtttttaaagaacgaatttttgtctaaagttaaacatagaaacggatttacttatatgtacacatattaattatttttaaatagagactacgtaaccatcttcgtgtattatatatatgcggaaatgaaattgttagttgcacagttacgcaagtgtttttaacatatagcatttgtttgcattctatgtacgtgtagtgggcattatttcatatacatatagacattttataatataactacaagatttagcatgattaatggtgacttaatcttgataggagaaaaatagtgacttaatctttacgtatatttcttctagactgccgcacaaagacaaaacgattacaataaatcaggttgataataattccatcactttctatttcgtcactctaatctcttcttcttttttgtatttttctatatgtacttaacttttgaatttttgtttgagtattttatgtatacgacattattctctcttaaaatcatgcaataaatcaatcatttgatgatgtggataaatcaaacacgcatacccctattttgaggtttattattgaagtataaatattcttctattccccataatccacttattacaaacttttgtctttagaatcatgtcgagttataaaatatatgtacataatatataatgtattcataaagaataatcaaaatacgttgtggatagcgtagaactcatctacagaggcaaataaattgcatgtgtacatgtacgtgttgccaatttcttcttcttcttttttgtttgtttttgtttttgttaaagacgtgttgccaaagtgatttcccctcaaacttttttcccatatgatccaaatatgttgtctcacgtaacgatgtaagctagtgcctagtggaaatataataagaaagtgacaacacaaataaagtaaagaagttttatcatttggggctatatatcgaataaaccaacgtcttctatcttttatcgtttgttacgaagaggatatataagctttaaaatcctatttgaccccatatataataatagtatcgtgtcaaaaaattagttgagatttcaacggctagtaacattttagcttgattgagagatttgtaagtttgataatacctatttatcttgctaccacgtaaaaataatcactttctatacgtaaactaaatcctatcatagtttgatacctagttttatctgactttataaatatatcatgaacatttttttattctgaacatatatcactcatcaattttaatttcacgaatatgtcgcagattctaaaaatatcaatgacattttaattttgtctttgagaaaaagtaaacatattgatgatatctaaatagtacaaataatatcgtcaatatgtgtggggaaaaaaaaatcaaagtttttcttagttaagtctttcaaacgatagtcaagtcaccaatcctcgatgtattctcgtcaccttggattacaaaacctttctcttggtaatttagattataaaacttgattttagcctcaaatttcaaaaaggtcttctttacctagaaacgtatttggcattttctgaatctaattaatataagataaccggtactatatacatatatcaaatcatctatatttgatcaaaatgggaatccacctaagatgttatgtcattgctcactatgactatatattgacaaaaattaaaaaattaatagcgataactaatatcaattaggtgataggttgcaaaatccaatcaatgcccacctcatgtctccttcatggaaatggatctggcagcagaaaatacaagaaacttagcaattttataaatgcaaaaaatggtggatatccattttgtggttgcaaattagtggacctctttctatctctttaattgttatatttccacgtggatactgttatactcaccacaaattatcgatagtttttaaaaatggaagatatatgtgaaaagtgtaaaacatcatgaacaagtggaataaatgagtgtgattagtataacataattaaagcaaacgcaaaagaattatattggttcaaagatatggattgaacaaataaatttatttttatattttctatgaagtaacagtctcaaatagttactattcagaggctatatttttgtattttagtcaaacaaattaattatttttcacaaaaaaagattgctgttgacaaaaggtaacaatgaattatttttgtcggttatgcaaatgtcatcaaaagataaatacttataagtctgtattttgctatttattagtgttcaccaaaagctacaataatactagacataagacattattgtacggtaccactcatgatatgtataaagcatgagatcattgatgttgtatggtgttggtgttggcgccaaaattgggtttatgtcgcgaatctgaaaagggtttggatttggaatctgctggtttgacttatatatacgtgagagatgatgcatcttcatcaatcaatcataatggttggagacagtccgatcctgacctttttcattttttccataccatgtacagtatattatacaagtttgacttaggtgatgacaaaataattatattatcatttattattaactgataaacttcatattttgaacgtagtaacgattgatcttgacatcttgaaagtctaaaacagttgtaagaaaaacatagcttcagttttcaaaacctagagctagagtcaattaccccaaggttagaagatcatacacagaatttttttgaaatgttatccgaactcaatatgattatatcaagtgtaaaaactttatcatcgaggaaacatattaaaaagcatgtccttgactatagaaatgattaggttggtccacatttagaagatgtttgacctggcttcagccattccattttcaactacttgcatattcttgcaaatatacaaagcgttggtgtccgggtcagatacgagctaatatgaagatgatcaagtgcttggttacacaaaaccaccatgtcaaagattttatgcgaaaacctaaaacacgagcatgcatgtagctcgattgttcaaccagagaaatcaaactcggagctataccgaaattatgttctgattggactaatcgacttatagacgcatgttttcatatctaagtttttgatggcctttttagtccatataagtttttttaaaatgcagcatactaatatttgaattcagactctattttgatctagacctactaggaaaactcaaacaaattgagtttagtgatatattgagaggtaaaatactaaaatggtctaactaatacaacttacatgtttagtagaacttaaattatgctttatttacaagactaaaagagtagttaaacttgaaatcttaaactgtcgccgtagaaataacaattgggtcaagaaaagttttctaatccttatcaaaatagaaaagttttctaatataatagaaaaaacacccgtaagtgggaaaacatcttctacaaacttaataagaaaaggatatacatatctccaatccacatgcgaatagttttgggtcaaatctctacgcttcgcgtaacaaattgaatttgtcaaacaatttgagcatgacatgatgaaaaaaggccagagtcatgttaattcgtcgtatcgtaactccgacttctgactttctccattctttttaacgaaacgataagtcaacttttaaccgaaaaggactacaagtcaatttattcattaatgctctacgtgcataggttatacttattggttaccctatagaagttgaaccgtgagatcaaaaatcatgttagataaaccggctccgttctttgtgacgttgacatatatttttcttaggccagagactatagctagataaataactccattcttggctgctcgtaggatacgaacccaaaacttggtcatattttatctcaaaaataagatcccaaaaaatatcgactattagagctatcgataccatacgtgtttcaaagatgtaaatttgaacccctctaccttgaaagcgtgtataaggcttattttctgaaaaaaagtgttagctcatctaacatatacaaagattaaagattggatcgttgacagaagaaaagatttacaaaaatttggatcttgtgaattagttactattgggctaaataaaagcccatgtatgtatttattggaccagacctaatttttgtaccagggcctgaggactatatccaacacaaaccacaatttcaaatattattttggcgttttaacttctaaacgctttatctttatcatgcgacttgccagatgccaacccaagccacgtgcattacgattcaactaattttttgttgtctttttttcccctttttaacgaggcaaaatagtagaaatatttttctattttcatgaaattgtagaagaaaatagtaaaatttccgaattttcctaatctatagtttcactttagataaaataatacttagcgtgacgaaggcaactggcttattcaactttatgtgtttaataaaagataaaataaataataatttcgtatatatttctctcctttgttcataaaataattaaaatatttttgattgattctttcgaaaagtaaaaaaactcatttaattacaagaatataatatatgttaacccaccatgacaaacatatattttgacatcttagataacaagtaactaaattaattacattcctttttattttattttctttttaattttatgtgaatgtaaaaaacaagaaaaaaaataaaatttatttttctctctcgcttggttcaaccgtggttgttcatcggaaaaatatcttcggcttcaatttcgttcgatttaccctaaattctcgactagtgttcgtcaatcccacttccaattccacatttcaaaccttttcaggtaatatttctcatatttttcgtgttttttttcggggtcaaacttatttttttaaaaatttcaattcaaatttcgagtttgtatttagtaaccctagttcttaatttttcaatttttcgtcttcccttatgagatttagcttaattagggtattgaattaagtagaattgggtttttgtttttgttgtgatctggtgaaattaattttagggttttattgaaggtgaaatttgtttgttcttcgttatatcttcgaaattagggtttttcaaatttgtgtcgtggatgtaaaaattatgaattgcctgtaaaatttttctgtcggttgctaaatttcttgtgattttagttgatgatcgctatgtagagtttcgccttttttttgggattttgaatgttcatggtttaggattcattgctctgatttgtaggaagttgaaatcaaaagcatgaatgcttaaacagtttacgcattattgcgaaatgcaagccgagctgatacccgaaggtcctaacggtgagggccgtttatcaaaccagaacagcaaccctaatttactctcttctgcttctatcagtattactcagtttcctggtatgttgcattgatttaaaagttgtgcttgtatgcttgttttgttagcttagttgattttttttaatggaaatggcgatgttgcagctaagaagccgactaggcaatgggctgcttggacacatcaagaagaggaaagtttcttcactgctcttcgtcaagttggaaaggtatcaccttgacgttcttcttctctatgttgttaacctgttatgtgtgtgaaccttctctttgtgttgttttgtagaattttgagaagataacttctcgtgttcagagcaaaaacaaggaccaggttggttgttttagttttgtgtttgttttcttttcgcttgcacttgctggtgtttgcttttagtttctgatggttgtggaaacttcttgtgatttgcaggtcaggcattactattatcgtttagtgaggcgtatgaacaaacttttgggcccggatctgagccttgatgccaagaacccaaaggacaccaatgctgcaatgctacgatggtacttgatttatacatttcttttctgttatgctttgtgctggtatggtagattgttacgttatcgtaaacaaatgatgaatatcactctccgggtatttttctagataacaagttatagcatgttatgatactatgagtattattaagtaggcatggtcacattcatttaagggttccatttgcgtaaagtaatttctgtagtatagctatgcatttcctgctagtgacaatataatgttaaggtaaggttttttgtttttttcatgtgctttgataatatctgccaggaacctcatacatgatcagatagtagcaactgacttatatttcagacatcatagcttcttccattctcctagatgacatgatttcacatatcatgatcttaattatcactcagctcgtctgactaaagtaaacatgctttttcatgtgtcttgcaggtggtctttgcttgaaaagtatagctgcaaagcttcaaaacttcatctcaagccccggagattcaaactatttatagaggccttggttagttggcaaatgcgaatttcgtttaacccaaaaccaccttggatttgacaaggaatcgtttacaaactattgtctaacaaaaccttttgcatgaaggaacaccaattgctgaaagaccgcagaaagagcataagaaaacggacttgccagggagaaaatctctcttctgcttccctcggaaacatctcaagtcatagtagagaaagaggattggataaccgtccatttaaacttattctctccgacggccaaaatgttaaaaagctagggcctggaagagcatctaccaaacatggtgaaagcttaagtgtcaaccttggtgacgaaaaagaagacacagcctttgggagaggtggaaggcaacggcgaaaacaaggttctttctttactagtttttatgcatgtttgttagataggcagttttcttcagccccatattgtgtgtgttttcagtgttcacacaaatttggacattatctgcttttaatcttccatgttgatattagattttatgttgctatttaaaagcttgatgtagttccaggttcttacgtgactctaagcatctcttcctttttcagcaggttatagaaaatgggaaaaagctgcaatagatggggtctctctggttgctgatgctgcagagcatttggaacgaacatcaattgacaaagatatggatgatcaaacaggtttacttactagtattggatgatagttccttttcttagatatatgttttttgaggactaacatgtgcaaattctaaatcagattctctttttatcttagatttaggtcccacaagatatttaaccggaaagtctccactttctctatgctcagctggtgatgttcctctcagtgatgccaatatgcagttttctgccaagcttaaacttcagctgttcccgattgatgaatgtactcgaagatccttggaaatggtaagcttcaaataggaattatactgattggagcaataattttctgagacatgaaatggagcttgatctgttaacacttaacactttaacaggataagcacaatccgcatcttgaacttactcttagtaatcgcaagaagatatcatctgtacttgaacatctcaatcgcaaatggggaagctcaagttgtgcgactggagagctattgctatttccttacaacgcacgaaaagaaactgtaacgtgccatcagaggtggacccatgactcttttctaagcgcagcagaagtgcattcaatggtcggaagtccttcggttttccgcttaaggtttgctctcatattttcctagtctcttgcaggtttcttctcgtcaaattgtcatacaagataaaccaaaattaatttacttatatgtatttgcaggtatggttggtttgtccatgatgcgtcaggttctattatttctcaagttccaacttcagatccttgcccttcactcgaggatgacatgaatgtggataggttgaacgaggtcaacatgctccttactgaatcaggacccttgtctgtgcattcaactgctgaacaaacgacatctgtagagcccagtcagggtctagtatgtgcatctggtgtccatgatcgtcccgcaagatctagagatgattatgaacctgcttcaacgagtattactccacttgagcatttgagcggcggtaatgcacaatcaccaggagaatgggctgatagtcttactaacataagtataggtgatctactttctgaagtgcccgatgacatagatagtgatggtgttgatccacctgccaccgaaggttcacattacctccttcgagatgtcccatttacctctgactcttttgatgctgcaattgctgctcatatactaagacaccagaacaagccaagtgctcaactaccgctgacttctggctcttcctctctgtgggatgatgaagaaacacgtgatgccttctctttccaaaaaaatcgtttcgcaaattccaccgagctggctagtgttgcttctcctaaaggtgttggcagagtaaatggagagccttcacagttggtggaggtaactatatcagcctcaaattccacttccctcaattgtttacaaaactaaaccatctgattcaatactttctcttaggcttcatccggcgatgagggatcttataaccctcatgacgatggagatccaatggaagagggtccagcagaccctcatacgatggattctccagggaagaccccttgtggacttgcggatgtatactgggtaaatttagaaatctcatatatttccccaatgtaaaaaagtcatatatattcaacaacaacacatgtttcctctttgcagcccgactcgttaggaccactggatttagacattagatcgtcaaagtatacagatgatttgatccttagtgagagcctcgggggattgagccgtctgatagcaaccagccttgatgcgtttcagaactgctcgctctttgggttcgacaataagaaggacaagtctaacatggtatgaaatggaaccaaagctaaagcatggggtccaaatgttgatagttgaaaaagaaagtgacttcttgccttttgaaaaaagaaacttttatcaccaactgatagcttcactgtacaaaaatttgatgtaaccttttactcttcctttcacacattcttttgtgttgatacatgtttctctgtgtacacttttactgttaatttacatgtttatttggctaccatgccttctttcttttttttttctttttttttgttcttttgtttatagaagtttcatgacaaataagaatttcaattaatattcttaagttcttttaagagtgcgagtaaaagaacaatcgtaggacgcaaaatttaactcgctcattcaagagtagtgttgataagtccttttttttttcatttcaatattctacccgaaaaagattccaaacttctacttttctacacttgatcaccactataatcgaagatttatgaacaatagactctttaataaagtaaataaatcatttaaaactaagtttgtttgttgtcttgatcatatgtgttcaaattggttttctcttctattctctacattaaaacatcctccaacattcagttttctcactctcaatgaaccagtaatacacaccctaggtgcactagatttcattcaaaactaaatctggttcactaaaccaaaccatattgattttcaggaggaaaaccactttttttagtgtgtagtacgagtaagtttacaccctgagatgcagggttttttctttgtcttttgctaagtgcgtgagatgcagttttacccctagttagaggaaaacaatgaatttgtgtaattttaacattttcttgttatgaggaatatgctctgaataatgagaaccatacaagatacaacaatgacataagccaagttgtcataaaaggccaaatgtgctttaatgtgtgatacaccgctttacactggcctactctttcacttcacgtcaagttcgtaaacgaagagacaatctctacgtgccctccccttgaatattcagcatcatcttctttttttgaaatcaaatttgacggcttctgttgtcacaggatatactatagacaacaaaactacatatgatacaaggcatattcgagttctgatcattcacaataaaatacatgtgatagaagcaatttaaatatgtgcctgaaatatataaatcaagaaagccattaatcaaaggttaaagcaatatggattgtacgtgttgagtgtatttttttttttttgtcataccaagaataaaaacatcaggccgagacagtagtataagcgagggaagagatagattaggtcctcaattcaaaggacaccaacttttgatattttatagctagcagccgtaaatcatatttgttctatttttagcaatacaacatttcttagacaccaaaatcggtttagttaatcagatttcaagtatgattttatgagattctaagcatggatgattcttttcattggctacttttaaaataacagaaaggatctaaattttcatttgtagtaaatttgaaaacgttggcgtggccttgcatatatatttagaaaatcgtacagtggaattggtttaattggtaaagttttctaggaatgatgtagacgaaacaaataataagattatcctttaaaaattcacttataccacaatcaaatccatattgaatctcactcagaaccctgataaatatccactctcagtccatatatcactcaaaacttcaagaaaaaaagattcttcaaaagagcaaaaaaatcaatggagagagcaaagtcgaggaagcctcatatcatgatgataccatacccacttcaaggtcacgttatcccttttgtccacttagccatcaaacttgcttctcatggcttcaccatcactttcgtcaacaccgactccatccaccaccacatctccaccgctcaccaagatgacgccggtgacatcttctccgccgctcgcagctccggccagcacgacatacgttacaccaccgtgagcgacggcttccctttagactttgaccggtcactgaaccatgaccagtttttcgaaggcattctccacgtcttctctgcccacgtggatgatctcatcgccaaactctcccgccgtgatgatcctcccgtgacttgcttgatcgccgacacgttttatgtttggtcatctatgatttgcgacaagcacaaccttgtaaatgtctcgttttggaccgaacctgccttggtcctcaatctctattatcacatggatctcctcatatctaacggtcatttcaaatctcttggtaacactcttaatcatgttaatgatatgtttattacgtagtataacctaattatatttatatttttttaaaaaccaaaattgtgaggattgtcacaactcataggtatttggaaatttgtgtattatctcagaagaaaataagtggaaatttatatttacatcatttttgtttttgaactttgtggtagataatcgtaaagacgtgatcgattacgtaccaggggttaaagcaatagaaccaaaggacttgatgtcatatcttcaagtaagcgacaaagacgtagacacaaatacagtagtatacagaatattattcaaggcctttaaagacgtcaagagagccgacttcgtcgtatgcaacacggtgcaagagctcgaaccagactctctctcggctctacaagccaaacaaccggtttacgctatcggtccggttttctcaactgattcggtagttcccacaagcttatgggccgagtcagactgtaccgagtggcttaagggccggcccactgggtcagttctctacgtctcgtttggtagctatgcacatgttggtaagaaggagattgttgagatagctcatgggcttttgcttagtgggattagtttcatttgggttttacgtccggatatagttggatccaacgtaccagattttcttccagccgggtttgtggaccaagcccaagatcgaggtcttgtggtccaatggtgctgccagatggaagttatttcaaatccggccgtgggagggtttttcacacattgtggatggaattcaattctagagagcgtttggtgtggtttgcctttgttgtgttatccacttttgacagatcagttcacgaataggaagcttgtggtcgatgattggtgcattgggattaatctttgtgagaagaagacaatcacaagggaccaagtctcagcgaatgttaaaagattgatgaatggagaaacttcaagtgagctaagaaacaatgttgaaaaggttaaacgtcatctcaaagatgcggttacaaccgttggatcttcggagacgaattttaacttgtttgttagtgaggtccgaaatagaatagaaactaaattgtgtaatgtaaatggactagaaataagtccatcaaactaaacaatgaaaaaaatattttgttatttttataaataatttttactaaccgtttgttaccaatcatgacaattttttaactgttcgtttttaactcaattattttggtcggaccgtatggttagcatattaacaacaatcaatctctaaaccggtatcgaaccgattagcggttatacttttgctgcacacaattcaactctgacttatgcaactctgttttgaggaagctatgaatatttttagtgaaaagcaaaattgattgcgtttgctatattggcaatgccacggagaagtgttaattcgtctgataaaatgcagtttgggaatcaaatctatcaacttttgtcacagatcaacataagcttcactttcttctctggttctttgcttatccatggcaccggttcaacatgcagaaggtatatgatgactcgatgagtttgcccaaatgtctgttttggttcgtcttacttcaaagattgcgtctttggcaaaatcaggtcgcatagcaagtgcccgtcaggtgttcgacggaatgcctgagctagatactgtggcgtggaacaccatgttgacgagctattctcgtttgggtttacatcaggaagctatagctctgttcacccagttgagattctccgacgctaagcctgatgattattcgtttacagcaatcttgagcacttgtgcgagtctagggaatgttaaattcggaagaaagattcagtctttagttattcggtctgggttttgtgcttctttgccggttaataattcgcttattgacatgtatggtaagtgctctgatactcttagcgcaaacaaagtgtttcgagatatgtgctgtgatagtagaaatgaagtaacttggtgctcacttttgtttgcctacatgaatgctgaacagtttgaagctgcacttgatgtttttgttgaaatgccgaaaagggtggcatttgcttggaatataatgatctcagggcatgctcactgtggaaagcttgaatcttgtttaagtttattcaaagagatgctggaaagtgagttcaaaccggattgttatacgtttagttctttgatgaatgcttgttctgctgattcatcaaacgtggtttatggacggatggtacatgctgttatgttgaagaatggatggtcttctgcggttgaggcaaaaaattctgtgttaagtttctacacgaaattaggcagcagagatgatgccatgagagagcttgagtctattgaagttctgacgcaggtatcctggaattctattattgacgcgtgtatgaaaattggagaaacagagaaagctcttgaggtgtttcatctagcccctgagaaaaatatcgttacttggactactatgattacaggatatggtaggaatggagatggtgagcaagcactgagattttttgtcgaaatgatgaaatctggagtggattcagatcattttgcatatggtgcagttcttcatgcatgttcaggtttagcccttttaggacatggaaaaatgatccatggttgtctgattcattgtgggtttcaaggttatgcttatgttggtaacgcgttggttaatttgtatgcaaagtgtggagatattaaagaggcagaccgtgcgtttggtgatatagctaacaaggatttggtatcttggaacacaatgctttttgcatttggtgtccacgggttagcagatcaagctttaaagctctatgacaatatgatagcatcagggattaaaccagacaatgtgacattcattggattgctgacaacttgcagtcattcaggccttgtagaggaaggttgcatgattttcgaatccatggttaaagattatagaatcccattggaagtagatcatgtaacatgtatgatagatatgtttggaagaggtggacatttagcagaagcaaaagacttggcgacaacttacagttcacttgtcaccgactctagtaataatagttcatgggaaactcttttaggtgcttgttctacacattggcatacagaattaggtagagaagttagcaaagttctaaagatagcagaaccaagtgaagagatgagttttgttctgttatccaacttgtactgctcgactgggcggtggaaggaaggcgaagatgtgaggagagaaatggtcgagcgaggcatgaaaaaaactccgggatgtagctggatcgaagtaggaaaccaggtttctacttttgtagtcggtgactcttcacacccgcgcttggaggagctttctgaaactctaaactgccttcaacatgaaatgagaaacccagagacgtttggaccttgatcatttagtgatatagacaatgaaaaatatgaagcagatacccaacaaacaacgttcacacacattcacttttgtataatgtgtattagcttaaaatcttttagtttttacttggacactggttcatgttgtttaggtcaaaataacttgatacagaagtctcatactataaaaaagccatgtacattttttttttgttgaaaagacaataataatccctttaatatatagaatcaaaagtttcttaagttttttttgtttatatagtcatgttcaaatgctccatttacacatagtaaaagaaggttttgaatctaagtttcatataattttccatctattattttgaatgtcattatgttgattctgtttgataaactcattagtgattcctcttaatttttttgacaatgactagaaacatagtagaacgaaacatcaatatatatttctactttctagtgtgaaaggtccacaagaattgagaatcaaactcaacattattgacaaaagaaaataaatatagatttatactatatttgtgtgaaaaaaattcgtggtttcaaacaagcagtgtgagatccaattagaaacaaataattactcatctctgacctactagtcaaaatttagatcgcataaattggtacgaatttgactagatcacatggcctctttagatcgtactatactttctcataattattttccatcattattctccaactatttatcttcttgcgtcagagttactccattatctttatctctgtggttggaatttatgttctacatatattcgtaatttgtagccatgccatggaatttgtagagttgattggtgataaaataattctagaagttaaagttagcattaaaagatgatgctataatcattagaaacgttaagagatagtaatgagagatgtagttcaagaaatttgaacaacaaaaacagacaaagtatacataaactatataaattatttatgtatatgaagaagacaaagttatatgcgtatctagagatgtaaaaaaggacaagaagagatggagtttatgactccgaatctgatgatgacttcgatatgttatattctgaagcagagaaagatttctatctatagaatactagacagtgtctatttttatcctgatttaccatagacacatttatataactctcaagtttcttaagcaacaaaagggaaaattttgaaaatacataaggccataaatttaccacgttttcatatgtttccatgacttcagggttcaagctggctgattatgataacaaattccagtcaccaatgccacgatcgtcgctgcagccaccacaagcatgtggtattgatgatttggtggtggcagtacttttttttaatttttattgtgttctttggatatacaatcatttcatcagtaacatatacaaaaaattgattgtcaagttctctcttctcacattaaacattattttgtttaaaaatagaatatatacacggtgttatatcctctgagggttatattacgagggttgttttacattttcatggaaggttatttatatatttcatagttcaagggttaccttgcaaaagttggctaatgtgttaatattgttttactctaagagatagtgtcgtactcggtactcaagtttagatttggtcacgactcagaatctttttaaactaggtgcagtaattaattaccatatttatataatcctgacaaaatagtaaaaacgcactacaactaaaacgtagccaaaagctatccatttcaacaaacaaaacaaacacacaattttcaatcttctctaatatacgtatgcacattaatatgtagataaattatttttaaaatatgaagataacaatccaataagaagaaagtaatcaagagtctttgcggtcgtggttctggtcgtgccagcaaactaacatggcgatacaacggcgaagaatgtaaaacttggctctttgtttcttcacgacatggctgcacttttgcccaaaagtcttgcacggctcacacgtgccattctcctccggtgccattgatttgtttctgctcttagtgagtccgaccaaaatataaaaaagtgcaagaaatggaagagttttttttctagttaaaaggcttaagaaatggaagagttcttgtgagctttatattgtgtagtagaggtgaaagagggacaaagatagagagtttagtatatactatatagtcgtcaagtggagggggcaaaagcattatcaaaaacccaaaagtatgtttcttacaaattaaaacctatattggactatgaaacaaaaccgctacatatattttttgagtttattcttctttagttaattttagtttgtggattggttttaaaagccgttaggtttagagggaaaatacgtttgaagttttttatattattcttaatttgtaattagacaatgttcaaaatatatatgtacgttgtagataaatcttattgtgtgttgcttttgaattttcgaatacaacttaaaatttaattaaatctatttatcttttgataactaaaatcccgaattgtaatttagactaatctctagaacctatgaaatgatggtattcttattttaaggtgttcataatgagttaatgaccaaccatgatcaaagtcacaatggcactcgaaccctaatcctttaattataaagtaataaattcttcgactattggacgacaccatgaaacaaaaaggcttttaagtaattttgtttttggtttaggtttccaacaaaagtcaatttgactcgaaatttttggagagttaagtattgtatgctatccctttttgttttattctagtaaggattaaaccaaagaagcttgaaccaaatcaaaatagaattatccattataataatttttgaagttggaaatgattatataaatattactcacttgatatgttgataataattgatatatatatatataaaatgttaacattagtgcaaaagcaaaactgcatacttagtttttaccacacaaaaaaaaaaactcatcacatatatgacaaacaaaaaaaagagaaaacaactcatcaaatagtatatttactatgcaaagcaaaccatatatgtatcactctgaggaaaaaaaaatcaaacaactgacactattgaaaaaaggaagacttacagtgttatgttatgtcgcaagggaaaaaaacaaaacatggtgattggtgatccacagtcgattaaaattcaacatttattttggattttggtcgacctctaacattgtataaaattcaatattgagctatacttattaatggtaaggcattgccgcattggcatgcacctgaacgtgagtggttgtccgtgtaagccgagcccccacttctgaaatgtcttcttctttgcaatttattagattcgtacgacccctacctttttacacgttttccctagattttacctatcaaatttcaattttaactttaagacttttgaaaaacatattatagtttaatttatatgtatctcttgatttgttagtattagaacaaacgcggtggatactatggaagacagtagcttctagggtatatagacatggaccttataagattatcttctacacgtgtggttcctgattttccaaagaattattccgataacgtaatacacatacactttgagaggcacaatgacgagaaatatcatggttggtcgatatatatcaacgcgttcacacatgaaaattggtggtaattaagttttgcttataactagtactagatgataagtagtcctttggaaaggtcatatttgatggttacattgatttactaaccatgtggcatgtatggtttgctattgctttgtgacatttgaaacttaatgccgccatacataagaatctctgatccagttaaaaatatcgttccatatgctaataatctcatagtttcaattttgagagtacaagaaacaatagcaaaccaagcgagtgttatttggtggtagagctcagtactagccaatgcaggtcgtctaacctttgaaaacaatagcaaatcatacatggcttagtttttattgtgttcatagaatgatattattgtgaatcagttggcttggtcagactctgtgaagtgtaactttttgttgttgaacctgtacacaaatgcaaatgaatagctaaactacaaagacctttttctagttgccttcagagaaatttgattacaagaactaaaacagatatgcacaattgcacagaaagcagagataaacaaattatgaaaatgtggtaatccctctttttccttaactaccacaataaacaaagttttaacggcaaaactcttatccaagaaacactattcctcataatatcaacaaaagtatattttgtatacacatcattataatagaagaaaccaatatctccatgagctagacaagcaaatcagcataagcatgaagtccatggctgttcatgttctgcttaagcctgtacaatgcccggctctctagctgccttaccctctcctttgacaatccgtaaatctctcctatttccgataacgatctctgtttaccgccatcaatcccaaatctcagcttgatgatccttctctcctttggactcagtacattgaggagattccgtacatggttcctcatcagctgcttccccacgctcattgttggtgtctcaatcccactgtctggtgttatttcctgtggtattaaacggttattaccgggttttgctcagtcaacagaacatcttcaaagacagttacctgaaaggtggtgtcttgatcagaccaaatgggctgttgcattgaaagaggtgttcttgtattgtacagcagtttatccagcttctctgttgaaaccccaacgtggccagcgagttcctctttacttggtcggtaattcccttcctgcacgcaagtttttctggcttcggatactttgcctagtagcatgtatacgttctcctgtatcaacatgagtagattttagcaatccttgctttaaaagtagatcctttagtagagataatgtcaggtctgatcaattctttaacaagtttgtagttaccggtaaacggattgttctggagttttgaaatatagactttcttatggattgtcgaatccaccagtaagcgtaagtagcgaatctgcatccggattgcggtttgaatttttctacacttttcattagccccatgcttccttcctacgaaccattagataagcataagaagaagcatcaagagaaatggacatcaagttagatcactctatcccacaccaaaaaatactgaagagctcgagatatttttacaagaaaccttttgtgcctacacaaaaacaatgggttcatttgaagctaacctgcaataagtcctgaaagttgagtccacgattctgatattgtttagctatatggactaccagacgtaggtttgctgtaatcaacttttcccggctgcttctcccacggtggatatcagattttaagacaggggaacttatccccatagcttcagcccactcgcctattgttggttcgcagccgttttgagattcaagtttagtctttaccttctccaactttaataaatgctgatagatcaaagattatggaagttagcaccagggacaagaaggaagtccaaggacacatgaataaggaaagcatgaacctgtatatgtgatatcagctcagcttcttctttagcagtcagaagttgttttgtctcaggtccccacaagaagagctgaagcgcatcatcattatcagccccttgtttatactttttcttcgcactagttttctgaggaacataaccctcatcgtccacatcgtttgattttggagcccgtctgttctttgctcgtctctctagctgccgcttcgatcttactatgtttcccttttccggtaaggacatagaagagctaaaaccaaacatccagaaatacaaatcttttcacattacagcccacaagtagcagattgataagatacacaaacaaggttaaaaaaagcaacctagtggagagagaatccttgatgttgtcagatggatttgcttcagtgtcatcaactaacaatgcagcttgttttgaagctgataaagccttctgagctagtgcaaccacatcacaaagctctgcatcagctaaaggagacacaactgccggcaatttcgtttcagatgttaaaggagatattaatctgcaaacaaaagaaaggctacatcattcagaaaactcaaaaggttgtatgaaaactgaaactggtgggtttaagagaggaagagacattacaaattccataaaccagtagagtgaagaagttgctgttcaaatttctcatcttctcgagatgaaaccaattcatcaaactgcctcctctccagagtcaactaaaaatgcaaggaacccaatcgcattaaacaagaggactagaaagttgacaactttatgattgattcaatctcttaggacaatattgctgctaataaaacacacctgggatgttctatcgtctcttaacgcatgtgacagaggcctagactcttcccgtggctcctgtgagagaaccgacgcaggaaaatgtcgagatagagaattgagatgacgtgagttaacaacaggagttgttgtttgatcatgaagcatcactactacagaaataccaacaaacgaacaaaaacaaatcagaaaatgctaacacaaactcgtatacatacactaatttcaaattgaaatccatgaacttcaaattccagtaactaacagagacaaatccagcaaagacacaatatttctatatgaagagtagctgaataagaagtaccagaggaaggagaagagtagctgctcttgagatgagtctttgtctgaaacgaaggagatgaagaaaccaagttcctcgtagcttccatttcacagaatcaccaaagaataaaagactctgtttttgcttccacgaatggctaaggaagaagaagaataagaacatgaggctactctacagagccatgacgaacagataaggcgacacacacactcccaattttttttttgtaaaaattaaaacttgtttgttgccatggaagtcagattttgttctctctccctttttttttttcctacagagtggatcatgttgggccttatattgggcttaaaagcccaaattatccaaaagttaattcgaatcatcttcttctccctcctttagtaaccctaagattctctctgtgaatccttgttcatcgtcactgaaattagtttacaaaatcgacgaattcggagatgatttttcagaatgtgtgcagaaatgagtccaacttcaacgctatagcttccgaatcgcgttcccaaacgcagttcggtgtttcgaaatcctcctcgagcggcggcggatgtatctccgccaggactaaagaccgtcacacgaaggttaacggacgaagccgtcgagttacgatgccggctctcgccgccgctaggattttccagttaacgcgtgagctcggtcacaaaactgaaggagaaaccatcgaatggcttcttagtcaagctgaaccgtcgattattgccgccactggctacgggactaagctcatttcgaattgggttgatgttgcggcggacgattcctcgtcgtcgtcgtcgatgacgtcgccgcaaacgcaaacgcaaacgccacaatcgccgagttgtaggttggatctttgtcagccaatcggaattcagtatccggtgaatggttacagtcatatgccgttcacagcgatgcttttagagccgatgaccacgacggcggaatctgaggttgagatcgcggaggaggaggaacgtagacgccgtcaccattagtaaaattaggcttttgatttagagtgttaaaattaggattttaaaagtttaggaggtaacagataaggataatttagtcaaatcatgttgtttagtttggtaatgttattttgccactaaacaactaataatattgtttgataatcttattatttggttttggaaacaaattgattaaaaaataatgccatatgtttataatgtttatattgtttttctcactattgatttgtgattttttagtaatgcttgaaatcattaagcaacactatttaaataaacaaaaatttctcatgaaatccaaagaatcatcatttgtcatgctcctccaatatagttatttctatttttggaaataagttataattaagaaaccaatcatttttctcacccattttttttttcatttgctagaaatctggacctccttccatgatgacccttctcaactctcttctttcacgcaagtctctcatttttcaactttccaacttttgatctcaacgtcaacatttcaagattttctaaaagagaacaaaaaaaatctacaacaagctcgttagctttcttttaatccttcatctccatttttcaagaatatactcattggttttctcaagacatgatagaaaaacacaagacatctctacggatatttctattggtagcttccaatgtatctattctattgttaggtcagagggttcagatatttcgattcggaaggttctgattttaaggcaagacttttgatataagaacaatgagagttagggttgatgtttgttggacacaacacatcttcttgttctttgtttttggcttgagttttatgtcatttgcactatctctggatggagatgattacagcaaaacagggaacccaaaagctcttgtttcggttacaaaccttatctatactcgacttcagaatctaaagactgttttaaaggctgacgttgatcgagatttaggttattgcatcaagaatttgtaagtcttttcaaaatcagctaatgtagtcccatgtttgaattttacatttttctcatatcgtttgttgataattcaggaagggcgattggaatgaagcatttaattttgataaaaatctggacttcttaagcaattgtgtcaagaaaaatgatggtaaacaacataaaaagggttatgtttttatattcaaatacttgaacattgagatttaatggtcttgtgatatgcaggtgacctcacacttagactatgttcagctgcggagataaagttctactttagtagttttgttagaagagatgaagcaacaacggttcatgtaaagcctaacatcaactgcaatttagctaaatgggtttccggatgtgagcctggatggagttgcaatgcagatgatgaaaaaagatttgatctcaacaatggaaaaattcttccatctagaactcgtaaatgtcaaccttgttgtgagggtttcttttgtccacaaggtcttgcttgcatgatacgtaagatatccatttacatacatatatgttatatcaacattataagtactaaaactttaatctaacatattcattgttgtttattctctgatttatgtaaacgaagcgtgtccgttaggcgcatattgcccgcttgccaagcttaataaaacaacaggattttgtgagccgtaagttgttagctttctagattgagtaagttaatgaaaaatcttattagtggatgatttaaagagtttttacattgcagatataactaccaaattcctccgggaaagttgaatcatacatgtggttctgcagatagttgggttgatgctgagagtagtggtgatatgttttgttcaccaggttcatattgcccaacaacgattcgaaaagtcacttgtagtagtgggtattgattcttttatctcacaactcttgttactttttgaaaatttgtttcatatatgaaatattcatcattaaggatgtaattaatgtttttatgtattacttagacattactgcagacaaggttctacgtcacagaaacgtaagtttctaaaacactaaaacctaagaaaatgaattgttttataatatcattatcattcattaattctctttttggtgaccgttttagcatgttttaagctcgcaacatgcaatccgaataccgcaaaccaaaatattcatgcctatggagcgatcttaattgtaagttgttagttaattagaatacattttgctttaaaatttgttggaaattatattttcgttattgtatatataggcatcactaagtcttctcatgatcatggtttataactgttctgatcaagttctcgccactcgagaaaaaagacaagcaaagtcgagagaagctgcagcgagacatgcaaaagaaacaacacaagctcgagaaaggtggaaaaccgcaaaaggtgttgccaagaaccaaaagatgggattgtctgcacaactatctcaaacattttctcgcatgaaatctgctagaaaggatgccacaccagttaaagcatcgggaaagtcaaaagacaagaaaaaagaaccgagtaatttaaccaagatgatgaaatcaatggaggagaacccgagtaacaacgaaggattcaatgtaggaaccggtagtaaacctgggaagaagccacaagctccaaagggtaaacaactacatacccaaagccagatttttaagtatgcatatggtcagattgagaaggagaaagctatggaacaaaacaacaagaacttgacattctcgggagttatttcaatggctactgacactgagatgaggactagacctgttatagaagtcgcgtttaaggatctaactcttacattgaagggtaaacataagcatatattgagatctgtcaccggaaagatcatgccaggtcgtgtttctgcggtcatgggtccatcaggagctggaaaaactacatttctttctgccttggcaggaaaagcaactggatgtacgaggacgggtctaatccttataaatggtagaaatgactctataaactcgtataagaagatcactggatttgtgccacaagatgatgttgtgcatggcaatcttaccgtcgaagagaaccttcgatttagcgcaagatgcaggtaaatttattctcatatcatagaggagattgagagtccaattcttaaaaaaatacatttttattacatagtgtttatgcttcaaaaaaatgttgcatatcatttatttatatatgtttctttacatgcagattaagtgcttatatgtcaaaagcagacaaagttttgatcattgaaagagtgattgaaagcttaggattacaacatgtaagagactcgttggttggtacgatagaaaaaagaggaatctctggaggacaaagaaaacgtgtgaacgttggtgttgaaatggtcatggaaccttctctattgatattagatgaacccactacaggtttagatagtgcatcttcacaattacttcttagagcacttcgacgtgaagcacttgaaggtgttaacatttgtatggtcgtccatcaacccaggtatgttatctcctccatgaattatgttacaattttatgttaagaaatactttttgcttaataattggttttttcctcttattagttatacaatgtacaaaatgttcgatgacatgataatactagcaaaaggtggtcttaccgtgtaccatggatcagtcaaaaaaatagaagaatattttgctgatatcggaatcacggttcccgatcgtgtcaatcctcctgatcattatatagatattcttgaaggcattgtgaaaccagatggtgatataactatagaacaacttcctgtgagatggatgctgcacaatggttaccctgtgcctcacgatatgttgaaattttgtgatggacttccttcctcgtcaactggatcagctcaagaggattccactcataattcttttagtaatgatctatggcaagatgtgaaaactaatgtggagattacaaaagatcagttacaacacaattactcgaattctcatgacaattctaatcgagtaactcctaccgtaggtcgacaatatagatattttgttggaaggtatgatttttctagatttgatagatggaattttgtggttaatttcatatgtacattaaaactttagtctatctatttcagggttggaaaacaacggcttagagaagcaagactacaagcgttagatttcctaatattattagttgcgggagcttgtttaggaactcttgcgaaggtgaacgacgagacaatcgatacacttggctacacatacaccataatagctgtctgtaagtttcttacgtacacaaatattaatttacatttactagtattcgcgatttttggaacgttaactaagctcttttctgtatgtctttctttttttgtagctcttttgtgtaagatctcggcattgagatcattctctgtagataaattacaatattggagagaaagtgccgctggaattagcagtttggcacattttatggctaaagacacaatggaccatttaaacacaattatgaaacctttagtgtacttgtccatgttctacttcttcaacaacccgagatctagtttcgaagacaactacattgtactagtatgcttggtctactgtgtaacaggcatggcttacatttttgccatattgtacagtcctagcgccgcacaattggtttgtcctcactttctcataattcatatatgaaggaaccaaaattttcactaaccatatggtacctgaatttgctgttatgttcttgcagttgtcggtgttagtccccgttgttatgactcttatcgctaatcaagataaagaaagcatggtccttaagtatctcggaagcttttgctaccccaaatggactctcgaagcctttgtcctttccaatgctcaaaggtagaaagtttgaagatttaattcttctaacacataatcaaatcttaattcagaaaatttgattttggactcttttttttgggttaggtactctggagtgtgggtggtgactagatgcagttcattgtctcaaaacggatatgatcttagtgattggatattgtgtctcattgttctcgttctcatgggactaatatgccgattcatagcttatttctgcatggttacattccagaagaaataatctaataattacacatgattaaaaagcttacattttgtaaaattcttctatttttcatacgttaaatattaaatgagttatataagtagtttatagaattagagaagaagggattttagaattccaattttgtaatttttatttgtagataatggtgattattcatcatgctttttctttctttatatggtaaccggttttggtaagatagagtcatacagagaatgatatacaaagaaatcggtttattttcagttacgattctttggtttatatgatccggtttaattggttactaagatgatgtcggaaagagaatagggaagcggcgtaactaaaaaacacgacacgatgatgaattcggcgtttcgaaacgttcacatcactgcgtctcgtttgataaaccctaagcccttttcttcttcgattctccattttcttcctctctgttccggcgacgcttctcctcgccgttccaatcctctccggcatagaaactcggtgtctccttcatcttcctttcccttctgttcgacttcttccttttcttctttctacattcctatggcgggaggagatggtcaggtgtctcattcgcttgagaagcagttcgagagtttccgtgttcaattggaagaatctgcagctttgagagagcagattcgtgctgtggttatggagattgagtctgctactaggcttattcaagctaatcttcttctcgttcatcaatcgcgtcctattcctggtaaatgattagtctttaggttaaaaattgcatcttttagctaaatgtttgaaatggcttgatgggttcagaacttggtgatgaagttctctatgaagggaagtaactaaaaatgaagaacttgttgagaaaagaatgaatattgaattacacatagcctttgttcttttaagaaattcattggaagtgtttggttgttactaatatagattgctcgttttgttgatggatcagaggttatcgagaaagctaaggaaaaaatcgttgatttgaagcagtattatggtcggcttgctgaaattcttgaggagtgtcctggacaatactataggtaagtttgaaagctatgtgtagttagattttctttatttgcaatggttttttgttaaaaggtttttgtaatgtaggtaccatggagactggagaagtgaaacacaggcagtggtctcccagcttgcttttatgcactggctagaaactggaactcttctcgtgcataccgaagctgaagaaaaacttgggtgtatgtctctggatctcaatttactattttccttacttccaaatactgaaatacatatcatggcctagtggttgcactataaataaaaccttattttgttttgctagttctctcacaaacttttgtatagaaacttccttcccacaataggtaacaactgagctggcagtaggcaatcaatttgaaatccgttcatgactccaacatactatacgtgttatcctgtgaccctccttttgcctgacctgtctcagttggaaaaactaaatgaacgagttttctacttttctcaataatcagattcagtttgccactagtcttcttctcttatcagtatgttaattagtctaccttttcttgctcgttgttattgattttgtccttaggctttgtttcagtctgcattttatccactgtagtgtcaaccatttagctaagatttgattttttcacctcaatagagttattagttgccgtttcccatgaactcagttattctcccttaggatggatggatgataattggaaggttggtttttcattacgttggtgtagaatagatatttgcccaagtgtcgttttgtttcaaatctgggttttgttatcttgtcaaatcaattgtctttgagtaaaataaacagaacaaggtgttggtcaattcatctgccattatggctcttctaattccacttcattgtacttcagtgaacagtttggagtttggattggagacagaagattatctcactggtaagtttctgagaaagaacccatatttgctctggaaggccaatatctatagatcaaatatgccttacgagcattttatgaatcgcaacattgcttttatattctctgatcttcagctttttgaatactttgcaggaatttgtttcatgtcaaacgatttggtaagatcatttttatccctaaatcttactttccatcttcccccttagcatcctacttgatagcaacttatgaaaaacctttggataaatgcaaatgggtgatgcaatgtttgagcagcctaggtacgtggttaatcgagtgacagcaggagactatgactgcccaagaaaggtgatgaatttcctgacagatcttcatgcagcctttcgcatgctcaatctcaggaacgatttcctgcgcaagaaattcgacagtaagtcatacatatctctaactgctcttctttctccatttgcgatggttacataaaaaaaaaatcgattttgacatgtgacaggtatgaagtacgacctaagaagagtggaagaagtttactatgatgtcaagatccgaggtttgatttccggcggagatcctcctggcgtccaagcagtccaaggccaatcctaaatgtcctcggctctttttaagtttttatgtataactttgtttagctagcatgaaaacgtcaaggagtgttcttctctaaaccaaaaacggcaaggaaaatagagagactgtagtttttaggtgtagtttgcaattactgaaaacggcaagtattccttttgtgggccttgaaagcccacattttagtcacaactttactgttatccgaagtcagcagcttaatagtataacagtagatgttcatgaactccacctgtccatcgttgcggacttgaaacgcacgttatatttgacggtgtcttacgtcattttggatttcaaaactaaataaatcagcttttggaatccgaaacaaagacaaaaaaacaaaatccaagtctaacagtcgccatttcccctcctgcgtcagtgttcttcgtctcctctcgtcgtctctctttggtatcttttttcttagcttcgagtactattcttttcgctgacattgtgttagattctctcttgaacttgaacgatctcttttccaacacaaatgtaatgtatgatatcgttcgattttttctcggattgttagtttcttcaaattgcaggtgtttagttaaaggaaggggataagctaagcagctggattttcttttcttttcttttttttcttccctggaaagttatatttttattattattttctaatgtaacagctgtgagtcgtctctatggcccacattatacgtatatttcttttatgtttttttttttttttctatattgcatttgcattttgaatgttgtgataaacatttaaaacattgacgcttctgtagctgctgagagttttgatttttctttatttgtgtttatctattctgtcaatgagactgagatcatccgacagaaatttgtctggctactctgtttctttatactgtaattgcatagaatgtctgtcctctgttcttaagtaaatcttatattacttatttatatattttcactagatttgaggcaaattaatgttttttaatttggagagaacatgtttcatgttgtgaatttgtttattagtgcttaaaaaacatggatgaatctaatggattgggataacatgcatatatagagagaaatgagatctagtttcgtgaatgtagcatgtaagttagattggtttatgggcaacattgtccggttctgttcaattattgtgacatatacttggttctttgcagtgtaaaaacttggaccttgacttgaaatgggaccttttgggatggaaacaacacccggttttcctgatacttttgctggattcaaatctgccagtgtgagaacatcttcttcttcatcacttgtgtgtttcttggttttctacatttggatgatgaatttattacatgacttttatatattttctttataggttgatgagaatcttggccattcaatggaggataaaatgagtgacatgaagcatttcctaatggatcctcatcatgataataccgcggtggacagtttcttaggtcttggtatggagaatatgggcttaacctccaagatggaggagttttcacatggatttgacgttagctttctcccagattatggtaagtcgattcaaatgctctttatgctgaatggctttgtaacattgtaaatgggagtatggttaatgttagagttctctttcattttttctaaggtggagttaacacttttagcactcaagatgtggaagcaggtttaaagtttgaagtatgtgttctctttatgcactcctttacatggtttttttttcttggtcattcgtgaaataaagtttcttcgtcatctcgtagattcttgatggaattctggatggagttgatgaagtggaagatatctacgcatcacatgagctttcttctattgttaaccatttccctccaggtaaaatttttgtgattctatcatcctggtgcaactgagcaatctatacggttcacaatccattcaatcatttacttgcagaaactgaagtcaagaagaatgaattagagggtgacccctatggtcttatgaacttcagttcagaatcttattctcctggaattagtggaagcatcggactcgcggagtggtcaaaagaaactgttccatatgctgaatcccagattgtatccagcgaaaaagttaaagatagttgggatacaaatgagtcagaagatgacaagaaaccactatccacatttataggctcttggattaaacgaaagaatcggaaacagaaattgctcaacaccgcttgtagtaggtaatcatcggtgactaaagtcttattctgaatatataatcccactggcttcagatttcctagtgaagctctcttgtataatgttacagattagattcttctcgtgaaagaaagtcttgcgagtcctatgacttcaggccccggaaaggacctatgaagaaatacattcacacttcaatggtttgtcttactctctaagactatagagttttcccattttttataatctatgtaaaccaaataccatctgctattgcaggagaaaacattttctgatgatcagcttactttatctgagagtgaagatgacatttctgtaacaaagacatccagaaccaaaagtgacaggagaaagaatcagaggatatggactcttgatgaagtaatgaatttggttgatggtatttctcactttggtgttgggaaatggaccgatataaagaaccacttctttcattatgcagcacaccgcaaacccgttgatatcagagtatttcatcattcattcacctcaaaagcaagctcttcatttagtagtgattggtgactcagttcttctcctcaatgcaggacaaatggcgtaatctactgaaagcaagttataacgaaaagcataacgatggacaggtttgcttttttctcttcctttgtcaacaaaaattcatattctgagaaatcctctgtaacacaaagtttgagatgttcaggctgaagaaaaacgaaagtcagtggctcgctctataccgaaggatattctacatcgtgtaagagaacttgcttcactccatccatatcccttctccaaatcaccgtgtattgttcatgattcctcaagaagccgaagcacttcaaagaacaagaagaagaagagtggatgatattgatagtcttcatggagaaagtctagagaagctatatagatacttgaatcgttttaactgtgttgggaagttgttccatgtgaagtttctgttaatgaaaccgagaatgacttcaattcagaaaagcatttagcttattccctctatataagctccatcctccaatgcaattaaactaacaaactgcagcaacacaaccactagaggctttttgtctgaaaattcatggtctctgccacctgttatactgcaaatgtttcaaatctcaaaaaccagaaccaaaaccaaagaattgtagtaaattacaactgcaaaaacagaggggaaattggtttgtttctcacacgtgagcaaaaacatcgaaaatattatagatcaaatcactttatcaataaattttacaattttatcaaaaaaaaatacaattatcgacatacacataatagaacattattaaaaggtttagtttagttttaggatgcaaataatacaaaacattaaaattaaagcacaaacatgaaacaaatgtccagactctgagaagtcaatttctacataaactatggccaagataagatgatgattaattttttttcttttttttccatgaaagagaaatgtatatagagataacattgcatcataagagtgtttgcacatgcacgcaataaattctaaagtcagaagaagccagcttagttcagaatggcagtcgttgttaattaacttagacagaccaaaaccaacttcaaaacacacacacaacacaaacataacaggtagatagatctgagagagacatttttcgaagaagagaattgttgtaagaatgaggatctcttactctattgaagggaacatcttttgtgaatccttagggggatgaaccctaatcaatgatactcggttttactcttataatggaccctccaatattgacacttctccatctatgtacccttcctagagacaataaccctttcaccatccctatctcaatcttgtgaaccgcattcttccccgccttctttaactgaactatcactatacgcttttgatcggtaaaaagttaaatacaaactcacctgtaaaagttaagctacctaactatactgcaaatgctgatcattgcatggttctacattagaccatgtgtagatagttcaagaagtcacctgagctagagccttgagctgtttaaaaaccaacataactctaggaaaagtcaagagatctggatttctgcagatcaaactgaaagtacccatgcatgaatcattaaccaagtcatcactatctccaagaagatttagacccatccctggaccctgttcctttcagatcttatctcctctctatctctgttcatcttgtcttgtggggtcttaatcccccccgtgaacttgaagaactctgacaccaaatgtgagctagggaaaaaaagagatcatttttttaatcacatctaaccatagagacgtatgttcgtacagtttcagtatttcaactctatcaacaaaagtaacagaaccgcacggttgtataaagtactgtatcatttaaaagttgcccatctcaccctctttggctaactgtcatgtcccaacatttattaaggaactctgatatttctacttctgcgtatatatatagacttgtccttcactgtgtactattcattcacaaacatattcctctatcaaaaaaagttcaaaacattctatccatctatctaccttatattagatattaatcttctcctcctactaaaatgaagagcaagttcattaagtcctgtgaaaagaaactgaaaaagatgacgagcaaagtcataataccttgtgcgtcttgcgagtcatgctacgagagaatttgctgggcattcaagaaggaagctgaggtgattccaagagatgtccctaagggacatttggttgtctatgtgggtgaagagtacaagaggtttgtgataaatatcaacctgcttaaacacccactcttccaagcattgctggatcaagcacaggatgcttacggtttcagtgctgactccagactatggattccatgcaatgagagtactttcctcgatgttgtccgttgcgctggtgcaccccagcatcagaataactgcatatgtatctaggaaggttcttgtacagggaattcaagacattcattgatttatccggctccacgtttacaaaaagaatgttgtttaatgctaagctatcggggtacactaataataatataagactttttgtattaaatgtgtctttcaattcagccggaaatgtattactactagctacaaggaaagcaataaaatacgagtaaagttatgtatcacacttctccagctctaaagaaatacatgaagccactaaagccagagctagttactgactaaaagagactaaaacatgaaaataactccagaaacatgcaacatctctattgttttcaattaaacgctaacaaaattttctagtgggggcagaagggagagagcatagaacagctttaccttctcagacatctcaagacaaaggccaagacatcttgaaagcaatgtttctttaaaccagatgcctctgttctgcaacatgtttgcaaaacatagaacagacttgagctcttctctcgtcaagctgttatcagagattagtgggaacaacatctagaatctttcggttctatgcctgctgttatatcctatcactacaagaatgaagaagtaaaaaagccacggagttattgtaaccaagagttaaatgtttcacgtatgtatgttagaacaagaggctctaacatcggccatgaaatccaaaccatacgggttgagcaaccagttccacattgcgtctcaatcaaaagaatgcataaaaatgttgtatacacataaagaagattaaaatggccacaagagaagtacatttaagccgaacaatatatccaatgagcaacaagttccccattgcataaatcaaaatgatgcataaaatgttgtacgttaaaatggccacaagataagtacatttaaggtgagcagtatatccaaatggttggatctagtatcattcccaaaatgaaaaaaaaaaaaaaaaaatgatcacctcatggtattgatatcaaaaactgcagcaagatatatacaaaggaaaatcttgcaaatgattatacacagtagttgtatcattctccctctttcacagctcccaagtaatcctaggtgcgtacatacatcgaattgctagcaattcttatcaatcaactgtaattctaaaaccaaaggaacctaagtcatgacaactagtagcacagagatgtcgccactggcattaagcatcgaagccaaggtttgctcctttggaaacaaaaagctcatcctacagatccacaattcattatcatctcagcccatcgatcaagctctccatttctcttctcccaaacctcctaccatctgcgtgtgcatctttacacttagctgctaagtagaacactaaccaagccgccatgaagtaaacttccaacgcagattggatcacagaagcaaagcttttccctaccattcgaatcagaacccatctgaagaaagacccacaaagaatcgcttcaagacacttcagctgcacagcctgatgcaacaaaagagatatcaaatataaaccttccttcactatctcccttcctctccttctcgaatccacaatagcaacaaacgcatcaacagctaatatcaaaccaacaagtgtatcaagtagaaaccaagcgaacaagaaaccagatatctccttctcaaaacctctaatccatggcggcataacagtgaaaggcatcagctttaacctcacaaagagcctgaaaaacgagtactgatcttcaacctctccgaagtaccataaaccaagaagctgtgtcaaagcatctctcactgcccatctcattaaaacaaatcctgtaactctcttaaaccccaatcttgaacctctccaaacaaccccaagaaacgaaggaaacctaccaagcaaatcgttgattacagtaacaaacataatcgccaacaccaatgagtaaacagttgtaaaccctagaatcacccatccatacgcagctgataaaaagctcaccaagaagaacagagccgctgcgtcactacgtcctagctccaatcctttaaaaatcatcttcagatccacaaaactctcaaagtctttatctttcttctcactttcacgatcgagctcagattcatccaattccgtctcgtcttcatcgccgccatggtcttccttctcaagctgccgcaaaacgacaccggagcgaatgatctgaggaaggagaagtccgttatcgatgataggacgagagaagccagaaatgctctcaaatccggagaggaatacagtggtggcgttgatgggtgaacgaaaggaagagccttgaagcgatcggcgatgaggatcgtgttcgtctgtggagaagaagtcgtcgtcgagggtaccaaggcgcgtgagctgaagaaacggagcacgtcggtgatgattgaagcgcgtcggggtatgggagcgagagttaagagggagtcgagagaggagagagcgaagagaagggtcactgtcgacgaaagatgttaagaggagagagcaatgatcgacgagagaatggaaagagaagaggaggaaagtgaggaagatgaaagtgagagggtgggaagagaaagaagatgttgtttgacggaggagctgtgttgttgtacggaggcggctcagccgcgcgtggtggttatggtggtggtggtggtgatcggtcattgttttactattcgctcccgctactttgggtagatcgagaagagagagaatgaagaagagagatcaattctattttgtcttaacgtattgaagaacctgtattgtttgtatttactcttatgggctttatgggctttaatttgggcctttattgtgtactctctcattctcttttctttttcttttttttctggttggctggttgcactcactactctggtactacagaactatagttgtgtgatctttcacttttcaatttcatattagatgaaaatagagtttagattcgagttcaaatatatttcgagttgtttcagttcatttactaaccttgagtgattttaggtgatttttatgtaaactcctaaaagtgctaccaaacaataacaacaaaatgtatgatttcggttgtaacttgtatttatgtttttctatcataacaatagttttaaacttttaatttcataatttagtaaagaattctataaccctagatggctaaagtgtgtgacttactagtattttgaaaaataactccattagagtaagactaattaagtttagatgattgagttagagttgataacattttcttatccgatgtttgttatggatattgagataaaaagaagaaggtatgattcacacattaatttgtaaaagaaaaattgttcatttgagaacttacaatgagttttacacacaaatttaaattagacagacataaaaccacttcacagacaatcatttggtaaaattattcagacatgtaaaaaaaaaaagactttatggtaagaaaaaaacagaggactatactcttaacatattggaatgggagctccgttccactcgttgagacattccatcatcggatcaatgattttaccttcacaaatcgccgtgaaaaccttgtcgaactcttctccaggcgacgtcactttctctccggtcaaaagctctgttccaagctcttccctcacgaatctatacaatggatacgacctacattccttgatcctgttcgggatagccgatgttccgttatcgtaggctgctcttgctgcttccacttctttcggtagcactgccttaagctcctcctcgaaagctccaatcttatggaagattgaagtcactgcattcttctcactctcaccattgatcaaagcatggtcaacaataacttgtctcagcttctgaatcaacgggtacgttgcgctacaaggatcatccgcgtatgtgtagacttgttcacggtctacaactttgagtaaatccttttcgcagaagcgagaaggatgaagctcaccattgactccagtagtaagaactttcttcgccacttgagagacagtgttcttcacagtctgtctcaaattctcctccaaatgtctcaaatccacagcttgacaaatcgcaacgaggaacgttgttgacataagcttgagaatatcaacagcttcagaagttttgcgagacgagattagtcccaaagagttgacatcttggttatgttgctctgctgattgaacatggctagtcacaggattagctaagtattgaagctctgaacaataagaagccattgcaatctcagctcccttgaatccataatccaaacttggattcctcgaagcggttagattcgagggtaaaccattgttgtagaaatcattcacaagctctgagaattgagcaaacatgagtttaccaatcgctgctatcgccaatctcgtgttatccattgaaactccgattggtgttccttggaagttaccaccgtgaatcgccttgttcctcgaaacatcgatcaacggattatcgttgacggagttaatctcacgctcgatcgatttcgttgcgtaacggatcacttcgatttgaggacctaaccattgaggagaagtacgaagagcgtaacgatcttgtttaggtttctgtaacggatccatctcgtgaagcttctgagctaatttcatgtacgagcttccgtcgaggatatgctccattatcgccgccgcttcgatttgaccgggatgatgtttaagtctgtgagtgagatgatcggtgaactcaggcttaccactcatcacctctgcgaaaaccgccgacaaaatctcagccaaaacagagagaacattcgtttcgaataacaccattgacgccattccagatccaaccgccgtgccattgactagcgcgagaccttccttaggctggagatcaaagaatccggagctgattcctgctaatttgaaagcttcctctgctgttaaagcttcaccgttgggaccagtagctttggaattgggacgaccggtgagaagtccggcgatgtaggagagaggaacgagatctccggaggcggtgattgtaccacggagggggagagatggagtgatgttgttgttgaggaaactggtaattgcttcgagaatctcaaatcggataccggaaaatccttggaggagagtgttgattcgtacaagcatggcggctcttgtggcggagtgtggcaatgtgtggcttgtttctttcgtgcttccgaatattccggcgttaaggaatctgtaacgaacaaaaacattcaaatttcgtgttgattagttattaattttttcattaaattaaatcattaacttttaattactcaagaaaatatgacccgatccacttaaattgacccgaacccgtatatttcccatgcaacgtcataacttttatagaattgttttccgtgattttaataactttaaaattcattgttttttttaccatcgtaattttttttttgaataataattttgaaaaattcaattaattggatgataaagaaaaaatcacaattagagaaaaaaatctagaaaaggaaaaatattaaacaaactaactccgtacattttttcctatttccatatgtatactgcatccaactaataacagccacgtattctacctaagaatatactaacattttaaaagtttaattgtttctgattagagaaacaaaagaatatgattaatacctaataagttccttctgaagtgcgacaccgtttttggttctccgatgagaagtagcaccaaaaccagtagtaacaccataactatcagtgcctttgttcatactctccataacccaatcactactagcattcacaccggctctagctgtctccgatagctccaccttcacactgttaccaatagttgagatcgcagccacttgtccaatggtcagagtctcaccaccaagattcacaactggcttcctaaactcagcaaccattctcttcacttcatccaaatggctacctttcatttgctccgctgcagctccccagttgagaggatcctccgcgttgatcaccatgttctttgtcttgatgtctccgccgcataacatagcgtccactcctcctccgttgctcttgtgtgccccgttaatctccatttagacttttgatcttagttttacaatagaagattaactaagaggagattacaagatctctaaaagaaagaaagaagataggagcttatttgtaatattgttggttaaggaattgtatttgttcctgaggaaaattagatgaatgaagggtggtttaaataaggtggtagtgtttgttggtaggtaagcgtatagagatagctagtttctttttttcttccatataaagattatagaaaaaatgaaaattagtgagaaagaaggagttggttgagaattaatgatgaccgttagatggagagtgagtgatggattttagtggtggagattataattcgtggatttggtttaagtcgcaaaaagagagttatttttaatttgattttaacacggtggtgaatttctttggttttcgtcaacgtcacggtggtaaaagtggtcgtggctggtggctgacgatagttgcatttcgcggttggtgagactacgagattttttgaagagtggttttttttttttttttggagtaaagcgtttcattgtgatgggagtaggtgtgtataatgtatgaacgtaattgagtcaattaacgtccccaccataacactctttcatattttgtttttgtttttgtattttctatattgttatttttgtcatttgggatatcatttcgattttatcggatgattttttaagtgttttgttttcatgtaaattattgtgttcagtcttttgtactttcttgatgttctgtttaatttactgtaccattttgttataactatatatatgtacaaataaacttcgtaattttgactaacagttcatatgcacttagcttacatttaaataatgggaactatgcatgcatatgtatatcccaatcattaggtgaaaactgaaaagtcaaaagtaaaaaaatatattatccaaaacatataactgaaagttgatacgtaaaaaaaacgtaaatagttaaagatacaaatgtacattttcgttgattttgtaattgagtataaaatttgtgaaagataactattacgtggaaatatcgcaaactctaataatattcacgcgattataagattcccaataggaggcgagtgacgcaacacgccgtttgcatgacaaaggcaatgtggtgacatttatgtaaatataacctccattttcgtatcttatcctaagttcatgaaataaaaaaatatagctacaaataacttataatagcttttagtgactatgatctgtttacaagagtttacaaattttttattaattaaaagataactcatttattgattgtcaatatattaaaaatgagtttataaataaaattttagaaagtaataaaagagaaaagcaagctaaataatccatcctaaaattacaaaaacgagaaatataaaaagtcaagaaaccgaaaaataacacacgaaacactcaagtttttttacaactagtattatcatatttatgattttattcaaaataattatcttgtgtcattccttgtcatggaaaccaagcatgaagccatccattatctatatgctaataaaataaaatttcattatcaaatccattctttggtttaaacgcgttaatattagtcgaaagggaaaatgtaatagtcataaacagtgtatgaatcaaagaaaaaacaataaattaaagaaaatggtagaaataaataatatgggtggaatggaagaagtggtgtgttggttaattgggcaatgcgtcttcattgaaacattttgcatgtgtcatgtgtgcatgcatttttccttccatcgtagcagactagcaggcaaaagcctcctatttatgtcaagaaatatattaatttatacgtttagtttcgtttatcagtacattttttctttttgatttatagttgtatcattgggaaaaggattgattacactagaattcgatttcggtttaacagtcttttgcatttttcgtgttaattgtattctcatttttttcacctgttttgacttttaggataaggtccaaatgaaggcaagagtgggcggaatatattataaacacaaaaattatattaagtaactttatttgaaatgctggtggatttgggtcaatgtgaatggaaacttatgtcaaatatccgattttgctttggtcaatttattggtttactctttctcttcttttgaaatccagcttatcttctgtaggttttgtagttatatatatcttctgactctttgtttttaaaagctcacttctttcgttggtaattaaatagatattttatacactacaaaaacaaaatcagtttcaatgatttaagtgcattgcatcttcttttggtcgttaatgcatgtgcaatattgcatattgttgaactcaaaaccaattgacaagattgacacatgtctcctttatagtactactcaatcagaactaaacattaaatttttaataaagtacttagctaaaaaaacaattaaggtaacttttgatctaagggttcgatcaaaacccctaaaaatcagaacaattatgactaatttaatgaacaaagtacataaataaaatcactaaatacatcgtactatttgaaaacatgaaaattttatacttgagaaattaaatgcacgtagttgttatggagtctagcttgaaagaaaaacgtttacggccacgggattagagtgaagcaatttaatgatggccgacatattgaaaagtaatttttaatatcgtataaatgagaaatgagaacaaaacatagagaatttttttgcaaaaatcatgagccaataaattttatattttgtttttaataattatccaataaataagttttaaaggtttttttcaaaactagtaaaccgaccatcgaacgaaaatggatagaaagactaaaagtggacgtagagtccatggattatgtgggtgctggaggtgtctgggacgttaattctctcttccttggatctcattaaggatatataccattttctccaccagttgttctgttacttgagggactaagcaacctttttggtcgttgatttgccactcccaatctttatcttttggactgaacaactattttagtcgcatatactacatttggattggagtaaaccagtattgttcaaaatatcaaatcataaagcaaaatgacaatcgaatttgttccatgcatgaaaatcatgataatttgttctcttgtcgtttcaatgtaaagatacatgagtgagagcgcttgatgagagagctgttgccatcacgagtcacgactcaagcaacgttttaaacattctcgatatatttaaaatattttcacaaagacagtttccggaagttcaaaaatttacaagactataattcttttttgtccaggaattgttttttttgttcattgctgaccgatccgaattctaattatgattcccaaactttactcattatatattcttacttctaacaaaaaatattcttgattttatatatacttacaaactttggcttgtatttctgtcaggtagaatcagttttaaagggaagtttcctaattataatcctcaatcactttaattagtaattaagttatgtttacgtatcttacaatctttacaatcgtctaagctatatatatagaaatccaagcatgaattttatttataggcttttcacataagttatatatgctaagtttgaattgagttggagtcgtctttaaatgcatggatgcttcatttgcttgctacacaggttccattgataatattttttttgaatatttaagaatgtggtaaatggtaagtatagtataattaactgtataagcaaaacatttattgtagaacatggcgggccaatataattaaatacatttttttagcagactcaaatcagaatggctttcatcgagacaccaaccacgtacatcaaatatattacatgaattaatctggtcaatcgtatctattgatatcttaatagtttttcctactctttaccagaaaaaagacttggaaactttgattgatatcttatatctaaggatttctacgtggaactatagaaaaagtttttaaaaaagaatattttgatagattatcgtcgggaaaagacaatctctatgaaaacatatatataattaaagtagttaagcgaattagttggtcgaaaaaattgttattttagtggagtttttaggatgtcatcatttacataaaaatatatttaaaaagtggagaaatggaaagactaaaattaggccaccaaacaaacaaagagaaatggaggaaaaaggggcaacaacaaccacagtcgcgaggatccatcggacaccactcgtctcaccaaaccctcttttcttcttcagaccttatttggtcccactttcacattttcaccaaaccccttcctcttgctgtccatttcagactcatcaacttaacaaaatcccaaacctaatcaatttcggtacacgtcactgaattatatcaataacttaatcaacatatttctcattaaggaaatgtagaaagaagatggattcaatcattcgagaaaaaaaaaaaaaaaagatatacctatactaccaacaatgagtagtaactaactcttcagacgatggctcaaaattattgtcgtccacaaacttttgacacccaacaaagagtggaatgagaatccttaaacttgtttaaagtttgtaggattaggacatatatcggacctctaagtagattagaatgacgccctagacattttactttgtaattattattgtagattggtggtaaatgaaacgttggaccatatgtacaactttaatagactaatactggtgatggtatgaatatatacgtttgatttaagaaaacaaactaaatagtaactataaagttgtgcatgtatcaatacactccttatcatacatgtactactttatagtatatatgttatatatagctactctgctccacatgctgtcacaatcttgaacctataattattaaaaattcgttagagaacctaaagatagccttatgcaaatgcaaccttgtaattcgttcgtcatagtttgtactgttttagtcttttagttcttagtctattgggcttggttcagttagagctagctttcattctatgggctattttttagatgggtttgttacaaaagccacacaccattttttttaattaaaaataactaaatggactaaaacacccaagactaaaatatcattttataaaaaaaccttaagaattcaaaattttcataaaccgaaacttcacaaagaaattaaaattgtcataaaccgaaaattcacaaaacagaatatatacatatatatatatataactattgtaaacttatgcttcaaatgttgccaatgatattgatttgacgttcatgaaataccacttgtcacttcattattatttaatcacagatgaaaagatttattttctatctgaaaagacaaaaacgtttgctgtaaattagagccgaatcaaattgagaagattagcgaaggacatggaaatggccaggaaggatcactacatctccactggggtcaatcttttgagatgcattacattagattagaacgacctaaaaaaagtcgtcataaaggaaaaaagatagtaacgagaatattatctttctgagtacaaaaagttggagtctgctaaagtccatacattaggaggcgataaaggaattcgtcatttgtccatacataataagacccattattgatttgcccataatacagatcatcattcagatatatattatttaatcaatttctatatgacttgtatttcaacttttataaagtatttatccaagatgataatatcaaagttaaccttaataattatacgggaatgagatcatacctaataatcttgtcatgctgtttttgttacgtgacaaaatataaccttttttagtttgctaagtacaaaatataaagtttataaagattacagtttaagggaaaataaaataaacatttaaacatattgatactataactaggatacgaaagtaaacaaaaaaaaaacaagaaaatgccattggaaaaggcaaacgaagcattatatatccattataataaagcaatagaagaggaggagattgatttaaaagctcattagccgatgcaatgatgttttaggaagaagataaaacagttaaacactcagatctcaagtttgtctactactctcccaaaacccgataatattgttctcttctttacgtttgaccggtgtctcctatcttcggtcttcgcatgagttcaattttttaaataaagatattttggatattattagtttgatcattatttacattaagttattttaattaaagctatatatatctacaagatctttttaccactttgatcctccaccttctttcataacgtttatcagcaattttgaattatcaatttcccactatgagtatgataaatatacacttttttcttcttttttttttcacttcaacattgctaataagaaaaatgattacaagtatttattttctctaatctaaatatactaaatcagcagtcacttttccaataactaatgcattcagtgattgacacatcagcttagtactattttttattttttcatttttacgcatagtatgtgtcgtttttatttaactttgtttctttctcaaatgattttctctttcatccccacgatctccacatctccactttctctcttccaaaaactccatgactactgtgtaaaatctcaaaaatgggtttctcaacatcattaatcgattactcagaaatcaggtactttgttcatctcaatgaaccaatttaccatcttctatttctgtttgtaattttgttttatatatatagaaattttccatagatccgaaaatcatatatccttcttctagatttctatggtttttttttttttttgctttgtttctgctttatttgactgaattcgatttctctcatacatctccatttttccataggattattctttaatacaatcaatgcctatgattctcccgtctcacaaacactcaaggaacaacgacaaattttggcttctcatctgaacagttgccttaaaacaagggtgagtttaatatcttaatcgaagctcaagtgtttttttgatggtaaattaattctcatactttttactattcttctttcatctcttattttacttctttatatctgcaatttcttttttgtattaaactgcaattgtattttcacgcaagatttttgtattaatacaaatacttcaattttaaagtcatctcttattttacttctttatatctgcaatatctttgatattgtttcaaaggcagcgtctgcgtcatgtagttacttatttgtgcacattttacatttttttttagacttccaagctttgggtgtcaacgaatgtttgtaaactgaattactgatgatgagaagaagaacacattacaattggttggagctaatgatgaaataagcggacatgtatatacccagcataattttcgtacttatactctcttatatttctaaactcttgatttgttagttattgcctatcgcaattgattcattgggtagaaaagttgtaccttctttatatctttttcttaatctttgtatattcttcgatcaatgataataaatttgttgtatattaatactgtctgctttattttaaaatttttagttaaaagttgtaacagatataatctaaaacaatgttatccctaaataggggccaaatgctagttatattctaaatcagtaaataatagttactacatgcacactaaaacagacatagcgtacgtgggggacttattttgggaattgtcacatgtgtgtgagtcactcaccactaggttcgatttatatctaacgatttttcccggaaatatttatggacgaaaaagcaaacattataagattcatttgtttgttttatatagtacacaaataatagagaattaaatcactaattttaatgaaaattaaaaataaataatatatatatatatatatatatatatctgttgacgaaaataaaagcaagtatatccgaataaaattacgaatataatttagggatgaaaatagaatctcctatacagttaagatattataagaatattcatggttagactatcttagaattagataattaaggaaaattatcgtgatcatcaatttacaaatttcatacctgaattcattgtttaataaggtaacctgtttattttagttttaaaagtatatcaacaagagaactttgatcactaaaaaacaaaattcatacaaactttaatcacttccctatattgaaatgatctaatctggatgaaaaaaatattatttattaatttcccataaaacaataaacatgtggatgtagctcttaaatattcttagaggcagagaatgtcatttattcaaatccggaaatatattaaaaatgttgaacaaaaagaaaaagaaatatattaaaatgacaccgtttcgctggagactgcttggtggtggaattcactacaacacgttaaaggtggaacacaacgaatctggaccattgagtttaaaggtaaagcaattgaaccgttagatgtacgtagagtccaggctaggaagatggacccaacaattgtacctttaccacttacctccactggctttgaagctgttcctctctcacataaaaaaagcaaacacttaacgaggaagaaacacactcatatctcctcacgttccccaattttttgatttttattatctttttgggtttttgggtttggttaaaccatttatgggtctttagatctctcttgatagtaaagataagtaattttagggtctgtttggttctgtttctggaaatttcacttttttcacttttttgggatcacatttagctttttttggttcctttattttgtaacgccatttatgcgttaaacttgtgtgaagtgtttgtttggtctgagctggagatggtgagaatctcactgcttttgttgtgtttactggtttcaacttgtctcttcacttcttcatcagcacaagctccaggtaattgactgcttctgagtactttttgatgtttccttgttgaaatagttggaaagattctatttttatgtgatgtagtagtaacaaggatttttgaaagtttaggcttttgttaacaaatctcaagagctggtggtgtttgagatttgtgtgtagttatgctcatatatgtttgtttagttagattgaagtagggaaaaagggaatggtaacacaaagaatcaaacttttttttttttttgggtaaggcaggttttgtgagcttggattgtggaggtgcagagccattcactgatgaacttggactcaaatggtcacctgataatcatctcatttatggagaaaccgctaatatatcgtccgttaacgaaacaagaactcagtacacgactttaaggcatttccctgctgattcaagaaagtattgctacactctcaatgtcacgagtaggaatagatatctcattagagctactttcttgtatggtaatttcgacaacagcaacaatgtgtatcccaaattcgatatctccctcggggcgactcattgggcgaccattgttatctctgaaacctatataatcgaaactgcagaactggtgtttctggcttcttctcctactgttagtgtttgtttgtcaaatgccacaactggacagccgtttatatctactcttgagcttaggcagttgagtggttcgatgtatggttcgatgctatctgaagaccggttttacctgagtgttgcagcacggataaatttcggggctgaaagtgaagcttctgtgaggtcagtatacagttcataatctgtttgttgtttcagcattgtgatttatcaggatgagttaaggaaatgagttggtattgcaggtacccggatgatccgtatgatagaatatgggaatctgatttgcaaaagaagcctaattatcttgtggatgttgctgctgggactgtgcgagtgtcgactacattgccaatcgaaagcagggtcgatgacagaccgcctcagaaggttatgcagacggctgtggttggaacaaacgggtccttaacttacagaatgaacctagatggcttccctggttttggttgggcattcacatactttgctgaaatcgaggatttggctgaggatgagtcaaggaagtttagattagttctacctgagcagcctgagtatagcaaatcggttgttaacatcaaggaaaatacacagagaccgtatcgcgtttatgcacctggctatcctaacataacacttccatttgtgctaaactttcgatttgccaaaacggctgattcttctaggggacctattctgaatgccatggagatcagcaaatatttgcggaaaagcgatggttcagtagatggtgagtacaactagcccctcctcttagtgttgtggcctcacatttgattctaagatgattgcttgtattgcagcaactgttatggctaatgtggcatcgctatattcttccactgaatgggctcaagaaggcggtgacccttgttcaccctcaccgtggtcatgggtgcaatgcaattcggatccacaaccaagggttgttgctatgtaaggaagtctatcttagtacctttatttgcaatatgtctttttgtctgcatatttcaactatgttatgcttcattctttctgcagcaagctgtcgagtatgaacttgacgggaaatataccttctgacctggtgaaattgactggtttggttgagttgtaagttacttatttcttagacttttgaatttgggattatatagagatattctctttactgatgttgcaacttttgtcaatggcagatggcttgatgggaattcttttacgggtccaataccggatttctctcggtgtccaaacctggagataatgtaaaatcactttctttggagtttatatattttttcttgccttcatctaactataaatatataatggactgtggcagacacctcgagaacaaccgactaaccggaaagatcccttcctcgttgacgaaactcccaaacctgaaagaactgtatgctttttttaaaggatagtttgatatattaatttgtgtggtggggatgaccttttaatctacattcttatgcacccaacctgctttatgattgcaggtacctgcagaacaatgtgttaacaggaacaataccatcagacctggccaaagatgtgatctcaaagtaagtatattgtcggatttaaactgcttttgcatgaatagttcctagctagatcttctcagtaacacatgtattcttcttccttcagcttctctgggaaccttaaccttgaaaaaagtggagataaaggcaagaagctcggtgtcatcatcggtgcatcagttggtgcttttgttctgctaattgcaaccatcatttcttgcatcgtcatgtgcaaaagcaagaagaataacaagttgggaaaaacttcgggtatgttatatttcttcaagtataccggtttcatagtgtatcttgattttgaatgaatatgcttaccttttttcttgggtttatttcagcagagttaacgaatcgtcccttaccgattcagagagtttcgtctaccttgagtgaagctcatggagacgctgcacattgcttcacactttatgagatcgaggaagccacaaaaaaattcgaaaagagaattgggtcgggaggttttggaatcgtatactatggtaaaacaagggaggggaaagagattgctgtaaaggttcttgcaaataattcatatcagggaaagagagagtttgcaaacgaggtaaatctgccttagtctaaaaccatgtgcctaagtatctagttttattttattttgcttaggaagtaacacaagtgattatggttttttcaggttacattactctcaaggatacatcatcggaaccttgtgcagtttcttggttattgccaagaagagggaaaaaacatgcttgtgtatgagttcatgcacaatgggactttgaaggagcatctttatggtaacatatctttttatgataggatggtatatttcagccttttggcttaacattatgataacaagtggatttattttcaggcgtggtaccacgtgaccggagaatcagttggattaaaaggcttgagatagctgaagatgcagcccgaggtccgtgaattgtacaacaaaacagaaagccattttttcgatatttgattttgttggttttgattgtttctgtagggatcgagtatcttcacacagggtgtgttccagcaatcatacatagagatctcaagactagtaacatcctacttgacaaacacatgagggcaaaggtttcagatttcggtttgtcgaaattcgcagttgacgggacctcacatgtctccagcattgtccgtggcacagttggatatcttgaccccgagtaagctaagacttaaactaataccaagaacttcagatagattcaccaaaactagcataatatcaagaactcacatattttctttattcgatgttaaaggtactatatatcgcagcagttaacagagaagagtgatgtatatagcttcggagtcattcttcttgagctaatgt

SEQ ID NO: 340 - DNA, 80736 bp, Arabidopsis thaliana
aagcttaatcatgctaggtgtattttattggatatgcctgaaaagggtgttccttgggatgaggatatgtttgtggtgcttattgagagttatggaaaagctgggattgttcaagagtctgttaaaatctttcagaagatgaaggatttgggtgtggagaggacgattaagtcgtataatagtttgtttaaggtgattttgaggcgtggtaggtatatgatggcgaaacggtatttcaataagatggttagtgagggtgttgagccaacgaggcatacttataatctaatgctgtgggggttctttttgtctttgaggttagagactgctctgaggttctttgaagatatgaaaactagagggatctcgccggatgatgctacgtttaatactatgatcaatgggttctgccggtttaagaagatggatgaggcagagaagttgtttgtggagatgaaagggaataagattgggcctagtgttgtgagttacaccacgatgattaaaggatatcttgcggtggaccgagttgatgatgggttgagaatctttgaggagatgagatcttctggtattgagcctaatgctactacgtattcgacgttgttgcctggtctgtgtgatgcagggaaaatggtggaggctaagaatatcttgaagaatatgatggcgaaacacattgctccaaaagataactcgatctttcttaagcttttggtgtctcagagcaaagcaggggatatggcggcagccactgaggtgctcaaagccatggctacactgaatgttccagcagaggcgggacactatggggttttgattgagaaccaatgcaaggctagtgcatacaatcgtgctatcaagcttttagatacgcttattgagaaagaaatcatattgaggcatcaggatactctggaaatggagcccagcgcttacaacccaataatcgagtatttgtgcaacaatggccaaacggcaaaagcagaagtgcttttcaggcagctgatgaaaagaggtgtccaagaccaagatgccttaaacaatctaatccgtggtcatgcaaaggaaggaaacccagactctagttacgagattctgaagataatgtcgaggagaggtgtccctagagaatcaaacgcatatgagctgctcatcaagagctacatgagcaaaggtgagcctggagacgcgaaaaccgcactggacagcatggtcgaagacgggcatgtcccagactcatcgcttttcaggtcagtgattgagagtttgttcgaggatggtagggtgcagacagcaagccgtgtgatgatgatcatgatagataaaaacgttggtatcgaagacaacatggatttgattgccaagatcttggaagccctcttaatgagaggacacgtagaagaagccctggggcgtatagatcttctgaaccaaaacggacacacagctgatctggacagcctcttatctgtcttaagcgagaaagggaagacgattgcagcattgaagctgttagatttcgggttggagagagatctcagcttagagttttcgagctacgacaaagtgttggatgcgcttttaggagctgggaagactctgaatgcgtactcagttctttgtaagatcatggagaaaggaagttcaacagattggaagagctctgatgaactgatcaaaagcttgaaccaagaagggaacacaaagcaagctgatgttctttctagaatgatcaagaagggacaaggaatcaagaaacaaaacaatgtttctctatagaaacttgacaaagtgattctttcttaagttattctcctttcattgttggttcaagtcaagtcaacaacttcagttatcttctccaaataaatccttttttgaaacttgttttgaaggacgcgtttgtatgatcattctgtgttttctttttggtaggaattgtatcgttcctgatttagtttcttaacctcttgaaaacgttaaatacgtaaaagatttttttcgaagatttgtgtttggaacaagagttgcatcttccattggctgttagtaaaatatcttatcttctcatagatttttagcttcagcatgagacgtgccatctccactgtccatccaaaattcgacggtccagatctcatctcatctatcatcacacttcatattatgacaagtagttagtagactgtcccaataaaatcacaaccaaacacaactaatttaagtgagaaaagcacataactttatcacaaaaaatatttagaaaagtaaatacaataagcatactaaaatgcaaaacgaaacaatttgcgacatgtattaaattttttgtatattactactaaacaagcgaaaaataaaataattcctatcatttatgtggaaacaaatagttgcaaagaaaataaaaattcttacaaaaaaaacagaaatcagaatattgagcctaaaaaatagtttgaggtaaaattacaaaataaaataagtttgagatatttgtgcaaagaacttaatatatttattcatttgccccataaataccaaagacactgcatcttatctccactctcaaaatcatcttcttcacccaaaaacccctaaaagccttatcccttcttcttcccatggctgcttcagcttcgtctctcgctctctcttccttcaaccctaaatctcttcctttcggcgtctccagacctgcctccgtttccctcttatctccttccctctcctttaaactcaattccgactccgtttccttctccatcgccgccaaatggaactctcccgcttctcgcttcgcccgtaacgttgcgattacctcagagttcgaggtggaagaagatggtttcgctgacgtcgctccgccaaaagagcaatctttctctgctgaccttaaactcttcgttggtaaccttcctttcaacgttgacagtgctcagctcgctcagctctttgagagtgccggaaatgttgagatggttgaggtatggatttagggttttccccaatttgtgagttatagaagaaagtattgttcttttagggtttttattgataaattgataccattactcctttttttgttatttgtcttgtaggtaatctatgacaaaattacaggaagaagcagaggttttggattcgtgactatgtcttcagtttctgaagttgaggcagctgctcagcagttcaatggctatgtaagaatatacttctctaccttactctatcttcgattgttgaatatgaattcactgaggactagctttatcttatcttgttggtatgcgtttgtgttttggtgtgtgtgcttaatgtgtttatgttgttctatgtttctgtgataagctgtgtttgaatgcaatcttcaaacttgtggcttctaaagataaaacttggacctctgtgttgttgttcttattgtattagggtttggttgcttcggttaaccattttgatgtgaatttgtaggagttggatggtagacctttgagagtcaatgctggtcccccaccaccaaagagggaagatggtttctccagaggacctaggagcagctttggaagctcaggttctggatatggaggaggtggtggttctggtgctggttcaggaaaccgtgtttatgtgggtaacctctcttggggagttgatgacatggctcttgagagtttgttctcggagcaaggaaaggttgttgaggccagagtcatctacgacagggacagtggtcgatccaagggttttggatttgtgacatacgactcttctcaagaggtccaaaatgccatcaagtccttggatggtgctgtaagtatcttttgtactcatacttataccaatatacacttacattgttgtgatcaaatcaaacaactcttgatatacttttacttgtggcctataggatttggacggtagacaaattagagtctcggaagctgaggctaggcctccaaggcgccaatattgagcaccaatctatgacttcctattctcaaaaacgcatattctggagggtatgatattaaccattgtacttatagattggcttttcgcactaaactacttgattactgatgtatggagttgtgaaattgtaacaggcgcttcgaagtaaagagggtttgtgagatgatggcagtttcagacggtactaagctcttagcttcgcctatgtttgttgccttggatgcaagaaggtcgtaaaggaatggtctttttttttttgagaaacgtataattaagatagaaactggagagaccatgttcttgtctgtctgaatgctgccattgactgcttcgctttggttttgattcaatttttttttctctctatatcgtggtctcttcttcctaatgcttctctgtttatttgatcctctgctcaaatgaatatgaacacacttgaaaaccggttaaaactcaaatcatgcaatgtttaaaaccgaaccaatactatttgtggaatgaacactatcttgccagtttgttccatcaaaacgatatcattctttgcgttcagccgtgagccgtataattccattgatcaaataactagctggttccaatttgggtaatcacaaagcccaaatgttgaatgtaatgaaccatagtgtcaaaactctccggttttggatagaaagtaattgcgattgaatactacgaaaatgggcttttctacatttagtccattaagctcaattggtctgtctcctatgacatagtattctgagttatgacttagatgctgcttacatgaaacttagcaaatgtattagatgttgttcgtttgggcccaaactgtatatgaattttttttttttttttttgtcgacaactgtatatgaatttagatggtacgtctggatacaaatgattttgcattaaaagaattttaacattataagtgttaaaataagtgattttggaggtaatatcttcatccaaatcaattaaaacatcgaaatatcctcacaaaaatcattcaaaattcagcagctaaaattttcaaaacattgaaatgtcttggaaattttagaaaactattttttaattcataaacatgtcttgttcgtatataatttacaatttgacgtcaagatagagtgagatattaaacgtgcaatatatttttattttgcagaaacgtgaaagataaactttggaagcagtttatgaattatgatgatgaaggcttcacttgcttccatcgccaataggcgtacgtcgttctgttggtaatgatgctacccacaaaacgttaatgtcgtcccaagcttgttccataagtacaatctctcacaacaaaatacgaattttgttatatatatgtatgtgtatatatatatacattgtttactttaattaaatcagttaaaaggatagttcaacaaagctcctaatcatcataggctatcggggtccggtcttggacaccttagcatgaaacatttacgtaggattcctacttcatggggctccacttaaaagaaattactcattagtctcataaaaagtttaaaatgtattttgtataataataagaaggccaaaaagtgagatcctttaaattgtaatggtgaaatcattagtaaattgtgataaataaaggaaaggtgtcgtgatatatttatacaaaaaattgagccaaagaaaatgtataaagaatatatatttctcttgtcgataatttgaaggaaactatatagtaatgaaaagaaacaactatataaatacactacattttataagagtaatgggaaatttcgtaaaatgtttctgtctctaggaaaaatatgaagtagttagggttgaatatgccaagccgtgagttatgggccacaactttgtaactggtcagcgcaagtagaccctctttgacttgtgaacctcattcattggacatgaacatgttcaatgtttgctcctttgctgaatcctataaaattcattatccattacaagacatttttcaccatatacttgtagcaaactgatgtcgatcatgcttttctaaatatttgtcgatatttcttatcaatcagtttcatgtgtaaaagaacatattctacatgtatctattatctaattcaatatatcttttgtaggcactgtatctatcagaacagggacttgacatgcaatagtaggaatcaatatttacgcgctccttgactgattatataccacaattcatcaatctgtcaaaaaaaaaactttattaaagtatgtggttccaaaaaacaaaaactacgtgattcacatggtctatacaagtccgactaaatattttgaattgtaggcgctcaatatgaacatcataagtttaaaacgaaaataattaaaatgaataaagcaaatggggtatagagacggccgaaaggttgatgacattgaaatgaatgtaagataatgtcccaaaaacaaaggacaaaattaactctcttcaaaacataagaaaaaaacaaacaaacaaatgaatgtcctttttgcgcttcttctccatcatacttccaccactcttcttgcctacatactagcttctttcttcctcctttgtcttcactaattgaatctttacgtacatgtatattacatacattaatattcatggaaattgcttctttttttttatcttgtaaaagatatatttgatcgcgctaatcgcattatattaagtatatatataactttaagagatcaataatcactaaaacatcgtaattaatattgacataatcaaattcttaaacatgtttaatttaacttaaatatttctgtatatgaactgttgagtttagtggtggataatatacatggtgtgatatgttaatatggtatcaggaaaaatttcgtaagcaacaatgtttcagttgttgaccaaaaaataaaagtttcaataaaagcattggctctccccaattaatacgattggactgattctttgtaacgaaaacggtttgatttgatgaggggtaatataagttgtacaactattaattagtgtgatataagtgaaaatatgaaagagatttgacttttaagcaacggtattaactgtccgacactttatgataactactaaacaacggatttgtccctttctgacctttgactggtcccttttgaccatttaaaatccatgttcttcacttttctttcctgttttgttgtctctttttttttttttttttttactttctaattccttaatttgtggatttagcgtcggttcgtaggggaaaaaacaaatttgggggttctattttcggttcaaggcggtaaatggtttttgtgaaagccataattcgaaatttttgtcggaatcatatcaacctttttctagtttttatggttacgcattcattttaacgtcttctgcattcaagaattttacccgggtaatcatagtttcctatatagaatttttaagtagggtgtcctttcaaaagattttaaaattttgtaagaatataactacatacacaaaaataagaaatggtataaaaaaacaaaaaatatatttaaaggtatcaacttttcgaaatatatctccaaaatacgttatttggtttagagtatcaataaaatgctatttcgttttcttcattcaaaaatatcagtaaaagaagaaactaatagcaaatcaatcgttttttttctttcagatcggtaaaaaaaatcaactttttattaactaaaggtaaagatgagaaatgatatttaataatagatttcttcctcatcttacttaacactcagtcaaattaaattaagctttcctatttgtcgggaatgaatacttaaactagaaaatatcatatgtcagatagaaagtgtggaacctttccttgcttcgtatgtactaaatacatcaatacatgcataaatagatgagcttgtattttactaatacctttgcaccccctttgtcggtaaaataatttattcgctttatgaaaattaagttaccatacaaaatcatatagagcatttttgtttttttttataaaatgaatgaatttcgttatacatttaaagtttcaactgaaagtaatcataaaaacggtcaacgttacacaaacaaattaactggctttgaattaaagtttcagctttaggaacttttctaaatttaactgaccctttttctttaaagaattcaaaaatgttaaacgattgttgaccattccaagaacattcagaatactttataatgaaatttgtagccccttttaaaacaaaatgaactacttctatgacaactagtacttttttttagaacaacaacgaaaatcaaagtgtcttttaaaagtaatttagaattctgttacaacttttacatcataaaaatcggttaaagacaaaaaaatgttaaccctttttgcttaaaaagaagaatttgttcttcaaaatatccacttttcgaagttctgtttttctttgtttcctaacaagacttacaagaaaagattcgactatgaaacttcatgtacccatttccatacaacttttcagtttaattagagtgcaagtattatctaatgtaattgtgatatcactgccatcgtcatggttattataataaaataaaatttgggtcggaagttaaaaacccaagaagaatgtggagagaaactagagacgaaacaaaaaaatgcgcatgcaagcatggagataataaaacacagtaatttacaaacttactagtatgtgtttagttttataatctctataacacctacatagaaggaatgggcagcatctactcagatcttgggattgcaattatcttattttcttagttaaatattcacacgcttaaatatatactataaacaaataaacatgatgtgtattttgaaactgtctgcttacaattaagtataaaaatgtaggggttactgtcattccaagccaataaatccaatagggttatatataggctttgaataaactagtgtcttcatgagttttttcctattgctatttttttctttctaaaaacaaaaattagagttcttaagctttgtattgaagtgtcaaataagaaaagaattttgtataagattaacaaagccaaaactcttaaaagcttttttttgttatcttttgataaacaattttttaaaaaagttgaaggtgagttttctatttaattaaaagaaaagaacttgaaaaataagctctcggatgctatatgtagcttagaaggacagttggaacgatggaatctcgttctttccaataggatattctaaatttagtgatcagtcatactttttaaaccaacttaaaatatgtgactagatgttttattagtaatggttattttttaacgttagtaaatttagagttttgatgatggataacattagaggttttgattagagatttatctttcatatttcaatgcgttataagtaaattaaaaacaaagacaaaaacaatttctcttacttatatttataaagttgcttatatatatagtttatgaatgatctttttagagcacatataatcttttcaaatgatttttttatataacattgtcatctgtcgaaactctaccttgtctcataccacattataacgtacgtggagggataacaccaagtggaattagaaagacaacttagctgcacaagaagatggggcaatgctaagaagtgttttttagtaaaactatgaaaaggttaaaatgagtataggagaataaaaaatagaagtaatgtttcctatgcaaagaacaagaagaaggttgtctacatagggagggtgaattgggctacattggtaataaaagccataactcactttgtgtttcttatttcaatcatcaattggcacattgctccatatctcagacatcatcatctcattaacttattcattctatatacaatagagaaataaatgtgtatatatatctattggtgtacccataacatttctatggttccattaagttttactagtgggttcttcttgtcctggttattttttattttgtttgcatgagtatcagtaaataacgtttgtaacccatcttacactgtccagatatattgtaaatgaattatttgtcctattcttgataaagggaataaaagtgagggaactttatcactgatcaatcaattttaaaaaactaaaatggttattttgtttcattgagagctctctataagaaaaatagcaagagggctttattatataaagcataaaataaatttctgcattacattattactagcatattagagttgtaatttgtaaatatacacgagcctattacaattttcctgtcttgttcttattcatttggacatatttttagaaacaacttaaaactgattgctggtgaaattgatgagcatgtgatgtgatcgataaaaaaaacaactagatgagtgacttgcgtctattattttaccaatcctagcttcgactattaacctataaacgaaaatatcatgttctgattaattatatatgtaactacggtttacaaacgaatatacggacaacaaaaacatttttatacttatcatatatctagaatttgatggaaatataggtttttgtttcaaagtaattgtgaataatcaaatatacgatcttatatatacacaccctataatgaatcttcaccgcgcataggtcatatataaagtttacacaacatttctatatcacattaccgaaatcattcatgaattaagttcgtttatctacatgtataagattttacacgcaaattgtatcgtttcttagaacattaattaatcataacagtctgcatgcgaatgtttctctcatctgcagagccaatcaataaaacttcaacattcaaattagaagattcacaaagtcatcatgatccctcgataatgaacttcagctgatgtgcatcgataatgtactaatatcgagagcgagcatgtctcttgttaatgagtttttcaacaagcctactatgaatataacttatgtgccaaaatctaagtaaccatatgatccacacgtactataaaccgaatggatttgtcccaagtgttttttttttggttttaatgtgaagaatttgtccctagtttatgtttgcaccactcactatagacgacttcgttattatttctatctaatcctcaaatgtaaacgtcaaacaatcctcaaatgtcattttctcttaacgatcgtagcactaaataatcatccgtcaggaccgtcacaactttttaaatacggattctttttttcttcgtcaaaagtagtcgatgttcgtgagttcaaagtatctcctgtcaacagtacatgagcttgccataactaaagttttttttccaaccaaaacaaaggtttttggtagtacgtagctagtagctactgttttgaaacaaaaataatagaaggagaaaattaacacaaaggaagaatttggttacgcgtgccaagatgagctgtatttgtgtggttggggaaagacccgcgtgcttaaatctctcacgtgtgaagacctcaacgaagcaacaaaaaataaattgaaaaatgattaattaataaacaaaagaaaaaaaataaagaataccaaatatatattttttaaaatacaaaaatttcttttttcccccaaaaaaacaagtacttctttaaatatttaagaatatttcataactcagttatagaaaaaaaaatcgaaaattaagcaacttagaagtgttttagtccaaaaaaatatattttcccaagcatgccttgaccaaatatttaggaaaacattttctctttctaaactttactaatcgttattttttcttaataaatgtcgcacttttgaaaaatactaaataaaaagtaaagtaatttatttaaatagaaactaatcgatgacgagcatgacgtgaagacgcactatataacaaccatccctgagccaaagcattagtggtaacaagataaactataacaacaacgaaaaaaaaaaaaaaaagttttcagatatcgattaggtttgtttgacactcgtaaaactgtcttaagaaattagattcttgtgctcaaagaaaccttaaactgcttaccttttctctttccgcccaaaatttagaatcacatggaaatcaaaggtgaatcgatgcaaaagtcaaagttcagaagaatctgtgtcttctgtggaagcagccaaggcaagaagagcagttaccaagatgctgctgttgacctcggcaacgaactggtaacacgttcatgactttctacgtattatcttgtctttcattctgctggtggtttttgagataagatgatgttgtgcttctctgtttcattatggtctgcaaaagtgtaattttcttaaaggtttttgataaacatgttcacatgatgtgtagcttttgcaaatgcagagcattttttctttcttctttgaaacgtgccaagtgatatgggtttgaatgtgtgcttcatgtagaactcaaagcttcaactgtttttttaccaaatctaggcttcatgtgtaactctgttttatcttgattttgttatgcaggtttcaaggaatattgatctagtctatggaggtgggagcataggattgatgggtttggtttcacaagctgttcatgatggtggtcgtcatgttattgggtaactttctctctttaatatcttctcttaaaacaactttgtgaatcttttttaagattatacagaagaaaactgtattttgagtttctgatggaacacaattgtcataagaacttctaataaacctcatttttgtcatcttgttgtcactctacagaatcattcccaagaccctcatgcctagagaggtaaaacatttcaagatttccctatttttaatactaaaacactattgtttgtttattaatatgtatctgtaggttctccaaatccccattcaaaacacatttagtctccagtctttgcttcagttttactcttctctctatttattaccctttcttaagtctaatgattatgagtctgcctcctcttcttttcaattaggtaacctaaaataaaaatatcttctttgtttatgttattttaaacaaaaggtatgtgaaaaaatgatgaaaagaggtgaactagattagggttctgtaaaaaaaaaaatggaatatgtaagatattcaaaaaaagccaatattacgattacttgcaatgccatcattgcttttgcctgtagaagagtccaaacctgctttttctctctttaactacttttcattattacttccttttatataagtttttaaaaaaaattggtggatgtgctctttgtttgcagttgactggtgaaacagtaggagaagtaagagcagttgcagatatgcaccaaaggaaagctgagatggctaagcactctgatgcttttattgccttaccaggttgtgtttttaaaccccatccacccaaaattatcatcattttttcacattactttaaacctaaaacttttctttcaaaccaagtaatgatgataaggaaaaactggtcaaaactctagttacacatgagtctcaagaacaccagtttaggcatttgttagccttttaaatgaattttatgggaaatcaaaagtttaaaagaggaatatttgttcatgaaaatattaaaaaagtttgactgattttgccaaaagagagaagaaaacaatttggttaaactaaaaaacatgttgtcttggtcaagctgtagtgtgaaagctacactgaaaagttttttttggtatgaaatttttaaaaaaattatgaaaagtccctacagtctaagataaaggaccttgacccatcaacatctggcacttaaaattagacattttttttttgctcttctctttactctgtttattgctctgcttttaacttaggaggtactatccatatagcttgtgtagtcttactgtgaccaaagttttctccttacctatttcaaggtaagagacaaaacctgaaacagtcccacaaatagcatatttttgcccacactgaatctgaaatcattatggaaagtcaagttctttcaaagatcttgcttttctaatcatattcatcccattgtacaaacttgtaacagagaagagaagactctattatttggtttgtcttgtacataacaaacttgttgacttgaccatatcatagttactaatttatctcctctctttttttttcaactatcaaatctaaaagttttgtatgaaaattgtaggtggttatggaacacttgaagaattgcttgaagtcataacttgggctcagcttggtatacatgacaagccggtaaacaaataaacccttctatcacattttaatcaaaaagtttcaactttaataacaacatatcatgcatcatttttctgtaggtgggtttgctcaatgttgatggatactacaactctctgctctcattcattgacaaagcagtcgaagaaggatttattagcccgactgctcgtgagatcatcgtctccgcacctactgctaaagagctggtgaaaaagctagaggtaaattaaacttataatgaagatggatcattaatgtttcttcataatctcataaattgttgttgttgtctttgtaggaatatgcaccttgccatgaaagggttgcaacgaagctttgttgggagatggaacggattggttactcctctgaagagtgattcagatcaagattatctatataactatttaaaatattttataatatagatttgaaactttcggagatttcatgatttaatcttactaaaaaaggaagggatagattttgattagttgggtaaaatttccacttcggaggagatttttaatgtaaattattagtaatgtctttttaagtcgaagctaaatgtttttagtttatgtaattgtcgcaactctctactattgtaagttgtaaccaagacaagtttcacactttcgtatctatctctcttcacattaaaatcaatacagacgaaaaaagaaagatatatattatctgtataagattatgtattgtcaatactcaatgccagagactgtctcttaacaacaacaacaacagaaaaaacaaacgaaaacaacaaaaaaatctaaaaaagcttcataaaaaatgaaatctaaaaaagcaaccagcttttcttgaaatggaaaaatatcttttgccatttcaagaaaagctggttgcttttttagatttcattttttagccatttaatactaacctttattataaactgtctaaaaaatattcaaaaaaataaaggcgtatgtagatagattctaatttgcatgagaaattaagtaatacagtggtaaaataaaaataaaacgaaataacgtaatttagtaaaataacatgttatcaagcaaaataatttatatcatataataccataatccataactgcgtactttctaagaaaataaaacttttatttgttaccacgaaaattgtaaaataaattgtgaatatctacctaaaaaactcaatcatttacctaatttatgaaaaatgtaaaattagacgtcaacatctttcaaatagacgttcaaaacataaatcaatcaaaaccgacactaatactatgtttttgtcgatgttaaagttaacatatactgtttttataattttttaacaacgtcggttactctgttcaatggaatgttaaatgtaacattaaattattatatgcttttgttagaaatattaaagtttcaaactttaaagtttaagaacactaatagtaagttttgggtcaattttatttgttaaagaagttttgggtccatttacatgacattatttatatcatttgtcaaaaggcccaaacgtctttttcagttgctctttcttggtgggaactgtttgagctcgagttctatgatgaacgtgagccggccggcgattcacccggttgatgctcttccggtggctcctactgccggagcgatcgatagaccaccagtgaggatgaaggatgtgcaaggcatgcccggaaccaccggcggtctcatcctccgtctctctcagttcgttcccgctcttatctccgtctccgtcatggtcactacctccgacttccgctccgccaccgcattctggtaactgaactctagagttagggatttagaatttgatgaatttagattctggaaactttagggtttttggtagtctctttgataacagttctatggaaatttggtgtttttctcatcgaatttgtttgttgttggtgtgtaattaggggtttgagatgaaattaggcttcttggttttgaaattagtgttttgagttcatgtttaatctgcatagcatcagaatttggatttagtttgagcaatttggttttagactatatgaatctgacaagctcttatctgttactgtgatagttgcttggttcttgcggttagcctgcaaagcctgtggagcttgtctctttttattatcgatgcttatgctcttctggtgagaagaagccttcgaaatcactccgttgttcagtgtttcactattggagatggagtaaggactaaatcaacctcacacttggttgttcaatgtttcatttttgatgtgttaattagtaagtggagtatcgtgactgacggttttttcatcccctattgtgttgcaggtcacatcgacgctcacgtttgcagctgcatctgcttctgctggcataactgtactcatcaacgatcttggacaatgtaacgtgaatcactgcacaaggtttgagactgccacagcaatggccttcatcagctggtttgctgtgtctccttcctttattctcaacttctggtccttagccacccactaaatatatagcacacaagttgagttcagagaaatccatctttctagtataatgtaaataaagggtggagtataatgtatcgcttgattagcaaatgttttgagacagatattatattggaaaatcatagtacaagaaaacaagctcgattctgagtcatcaagtttatatcaacaaaatagtgattgatgtggaatcttgaggcaagtcaggagtccgacgatgagtaaccaacaggaaagttagatatgtgacgaaatcaatcagtgctcaaaatgaaattgatgtgatggaatggagtttgacaaattcatgaaactattatgaaaggttttagctttcatctgttatgcaactggcagaaatatgattcagaacgtatttataaacctaaggatcaaagactatatttggagataacaaatcaccatctaatactcagaaataaactaaatgaatgcagtgagagggcctgagaactgaattcaaaaaaaatacaagactctgtggttggtgctgttaaaaagttaatttccatgaaagagcctatatgatgtatatgacattccgggatttcttaccagcggaggactaaatctataactgacaacatgtcaacatatcaagaacagtattctaacggggtgcctgccgtgagtggcactttaaccgtgaagcttcaagctcttgttttaatgtctctatttgaatgagcaatgccgcattttcctacccaagagatagtgaactaatgagccatgatcatccaacataagccaacaccaaaagaaatttgaaaatcttgagtgggaatgtcaccttttttaatgactctagcttttgattggaggtaaaggtgtttccattcccagatgactctttgatctgtaccagaacaagacaatgcccataatcaactaaaacagatgaaatgaacgagtcaactaaacctttggtaccaactttttcatgtcataaaacctactaccatataatagccatgaaagccaataagatacactttaaaccatttaccaaaaccattgaatgaacaaaccacgaaaacaatctaagtagagcagacacggctgtacattttgaggataccgtcaagaccaatcaactacagagcaactagtgacagtcttgctcagtgtgaagacaagtacattgaaaataatctctaaagcaactaaagcaattaggcttagtaaataccagtgaaagttctgtgttacatttagaagctttctcagcttccttatcaaacattctccgccaatctgcagattcatccattgcctctctatttgccaaatcaaactgtctcctacaccaatgtaaaatctcaaaccataaacacttacttgattaatccaattaaccaccactacaacactaaccataaacctctaattacataaaatgcagctgaaatacaaaaagtcaattcacaaaaaagttgaaaatccaaaactactgaaattgagaagacccttcatcatgttattacagaaaaatcaatactttgagcaaatcattagaagaaaacccagaaattacaatgattaaacggaatcaaatgaagtattattcaaaccttaagcgctctgtgtcatcggaagatagagtataatcgatagtccaaagccttaagtaaacaccgataccaagaacaagagctagaaccaaacccaccagtatcgtcttcctctcagatcctcccgccattcttcctcctctgattagactcaacaacatcaaggagcttgccccaaagaagacgacgattcattttcaggaaacggttcaactaaaccggagaatattaaagtaaaccgaacagaaccgagtagtctaatttgtacagattgggttacaaagcccatagatgatagaagcccataagggtagatccgtaaatgtctctttcgtaaaccctaattttcacactccttcaaaaaccttggagctcttcttcaagcgcctcctcgtttcggaacttcgatcgtagaaaccttgaaaatccgagacatccacaatgccgccaaagttggatccgagtcagatcgttgacgtgtacgtccgagtaaccgggggagaagtcggagcagcgagttctctagctcccaaaatcggtccgctaggtctcgcaccaaagaagatcggagaagatatcgcgaaagaaaccgcaaaggaatggaaaggattacgtgtaaccgtcaagctcacagtgcagaatcgtcaggcgaaagtgacggtggttccatcagcagcagcactcgtcatcaaggcgttgaaagagccggagagagataggaagaaggtgaagaacattaagcataacgggaacatctcgtttgatgatgtgactgagattgctaggatcatgagacctagatctattgctaaggaattgagtggaacagtgagggagattctgggaacttgtgtgtctgttggttgtactgtggatgggaaagatcctaaagatattcaacaggagattcaagatggtgaagttgagattcctgagaactgaagaatttggaaatgatggtgtgtttgtttcctttgccttttgagattttagtttcttcttcttatgttttgtttagaacaacgacaagtcagttttggattgttattgctgcttttttatctaatctcaattttatgcttatgcttagtttctttcaattttatacgaaatgcttgaacttgccttaggaaattgaatctgcgtttagtatcgtatcttgctgataatctagaagaacattgattcgtgattcgtctctcttggaatgtttgtgaagctaaattgtagaaatgaagaagaacaatggcaatgcttgtagttcattcatctgtattcgctaaattgtgtttgcctctcttaaattggtttctttgttcttcatctcccattcaacacattgtgtagggtatataatcgaagaaaaagttgtctttctcgattttttttctcaatacaccaaacttacatacgttgcaaagatgaattgaaaaacatttcactcgatttaatatggaatcacacagttagaaatagaaaataggaagaagctaagatacgagtggaaaagaggatatgtttctacataattgtaggcacactttttttctttcgtggctaagtttaaacgttggctgcacttctgaatgaaccgagggacttggagcctgaggcccttagaacgaattggtgataaaatgcagctatcgtagctccaatgaatggtcccacccagaatatccactgtaattatgtaagaccaaaaacactttagtatttttcctccgtccataatttgattaattttaaataattaagaaatagaaacgtacgtggtcatcccatggcttgctcttgttaaagattacggcggctccgaaactcctagccgggttgataccggttccggtgatcggaatagtggccaaatgtaccataaacaccgcaaacccaatcggaagtggcgccaaaacctttcgtttcataattcataacccaaagtattagttaatgatatcatgtaattaactaacgatcttataactgataaaaataaatactaaccggaacgtgggagtctctagcgttgcgtttgggatcagtagcggagaagactgtgtagacaagcacgaatgttccgatgatctctgccgcgagtccggtgcctgtattgtagccgtcagctagaaagttggctcctccaccgtaattaacatagtgagagctttgaaatgccttcacaaacccaactccacaaatagcacccaaacactgagccaccatgtaaagcaccgccctaatcagcgataccttccgggctaagaacaaaccaaacgtcaccgcagggtttatgtgaccacctacaaagttcttggggttaatttcaaataaattacaaaacaaaggacaaatttgaaaggtccacaaatgttaaattttctgaaccgggtaataaaccggaccggtttcgatatatgatacctgagataccggcggtgcagtagacaaggatgaagatcatgccaccaaaagcccacgcgatgccaaggattccgacgccgccgcagtcaactccaccggcttttgtgtcggactgaatcttgtaaccaatgacagttaaaacggtgacgtacaagaagaggagagtggctacgaactcggcgatgactgctctgtataaagaccacttggtaagctcctctgcgtcgaaaaacggtgttggcggaggatcttcgtaatctctcgtctgaaatccatcaggtccttccacgtctttagccatatgtgttaatggatgtttctggactttctaagtaagtgttttgctttgtggttgttgtagggcttgtggttgtgagatgaagaataaaggttctttatatagagtgagctcttggtttgtgctactgttgattttgacacttttgatttaatgtcacaacttacaacattgatgttttgttttatggtatttttttttgtaacgaatgcataagttggtttagtggtaattttttttttttgctaaagaagttggtcagtggtaactaaaggaaatctaaaacaagtattaattttttttttatctcagtaacttgataatctaaatcagtgagaaccaatacaaaaaatctcctaaagatataatttaacatttcctgaaaagtttatacaaatagtataaatctcatactgtaattcatttccaaataactagattgttaaatgctactgatagatcaccgtcccaagagtcacgtcattaaattttgttaggcatcacccaaaaaatttgaccgttgacaaaaaaccaaaaaccgataaaacgtgagcaattatataagtgaacatatttgacaatgatgatcatatatacttgtgtgttaacatacataccttatcttttagctgtatccacattgcatatactgtaggtgctttttaagtttttgataaataatgattttatatgattagtaaagtatttgtctcgatcgtgtcacacgattcttttgtttttctgccgtttcaagcacattctggatcattcgtgcatctttttcatgatagttggtaaacatatagtatatatagtaagcgaatatttgtataggaaaatgaaatggtattttaggtcattttgtataataagttaaataacgcataaatacgtaatttatttgagacttaactttttcggtgtaagctgagtgttaaatctgtcataggacactacaatcaaattataactctatatatactccatcgactatatattgactcaacatatcatgatagaattacatatgagtcagatgtaattttatgatctgttattgtggattcattgttagcaagcatatatatacgtgtgttcagaagactaaaaaatttactatgaaatgaaagaacatttatttgtttggaacaaaaaatgtttatcataacaaattaacccatttttccacagagaacaataccattcgtaaccaatatcgagtagacaattctttaacaaaacagaaagcgacaaagatgaaagaaaacaaaaataaaaccaggggagagaccgagagagagagagcacctttctgacgtggaaatataatccaataagagcagagaaatgtcgctacaacgataaggatattgtgacgtggcaaaacattggccatgaacaccacattacaccacattccttttgtctatgtacactttttatttttccaatttatttttgtagacagactagtgattagtgaatactgaataatatacgtaagaaaattgcaattggaaatttggaattgaggagtgagagcaaatgattgttgaatatggggactaaacaacgtggcataagaggagtggttgggacggctgaactggagttggacttaatctgtatggacggtgccgatgcaattgacggagctaatcaattctatatggggcggtttctccggtccagtggacccaactttcatcatattttctactttagtggaaacataacccgtgaagcgacgccgtttcttttatcatgtccatgtgataaattatgtttttgttatatggtagggttagctgagagctatcaaaagactcttttttatccacctaatagatttgatttgtaacgttaagagcataggaagtcaatttaatcgttactaattacatgcataagaactagtataactatataaggagctccttctagaaattaaatgaaggatgatagaatctagataatcagaaattttactattgatcaatctagctatctcgtagttcaaaaagctttatcgttaacaagtaacaactttcaagtattgcccaaatagataaggttcataacttcatattttttatttattttatgtgtaaaagagtgacagtctatattattctagggggaggacaaggctcatgacataggacaagagaaagaaaaatatagaagcatatagtatattagggtcggtccaaatgaaaacaacgtttaggtatggggcggcgaggctaagttaaattaaccacaaaactccattatcaaccataattttagaattaaaaggtctctgttcctattgatagctccacaatcattcttttaaataatcagaatctcaaataagttcatctttagttacagatttgtatcaatagttgaagttgaaaccaaaataataataatttagttatagttaattttgtcaacaaaacaataccttaactatcatattatgacaaacactaattgagatgaaaaactcttagcagtagctaattcttactatcatcagttaattatactaatgtatatggaaattctgcttaaacaaaaaaaaaacagtggaacatgaatatattaagcaaaatcagtttctattgattatgtagcaatgattagattggtttagattatatatcatcatgacagctagctaggtaattaattagtgaaagaaagtttccacaaaaataatcataatcgtcatacacacaattctatattcatttcattgaaacgaataataaaaacaaccataagcctaccaaaaggaaaacattatcgtaatataatcaatcaataacacgtatacaattattaacgtatattgacaagcaaaattaatgagagcactcactatagctatagtctctctatataaacaactttcattcgtctcttcagtcttcacaaacacaacatatccacaatacaaaacacaactttcatatataacaaaaaaagttatagaaatggccaaagacgtggaaggacctgagggatttcagacaagagactacgaagatccgccaccaactccgtttttcgatgcggacgagcttaccaagtggtctttatacagagccgtcattgccgagttcgtagccactctcctcttcttgtacatcaccgttttaactgtcatcggttacaagattcagtccgacacaaaagccggtggagttgactgcggcggcgtcggaatccttggcatcgcgtgggcttttggtggcatgatcttcatccttgtctactgcaccgccggtatctcaggtatcatatatcgaaaccggtccggtttattacccggttcagaaaatttaacatttgtggacctttcaaatttgtcctttgttttgtaatttatttgaaattaaccccaagaactttgtaggtggtcacataaaccctgcggtgacgtttggtttgttcttagcccggaaggtatcgctgattagggcggtgctttacatggtggctcagtgtttgggtgctatttgtggagttggtttcgtcaaagcctttcaaagctcttactatgatcgttacggtggaggagccaactctctagcagacggctacaacacaggcaccggactagccgcagagatcattggaacattcgttctcgtctacacagtcttctccgctactgatcccaaacgtaacgctagagactcccacgttccggttagtatttatttctatcagttataagatcgttctggtaacatacgataacattaattaatacttagtgttatgaattatgaaacgaaaggttttggcgccacttccgattgggtttgcggtgtttatggtacatttggccactattccgatcaccggaaccggcatcaacccggctaggagtttcggagctgccgtaatctataacaagagcaagccatgggatgaccacgtacgtttctatttcttaattatttaaaattaatcaaattatggactattgtttgatgggaaaataatgaactgtttttttggtctatctaaatacagtggatattctgggtgggaccattcattggagctgcgatagctgcattttatcaccaatttgtcctaagggcttcaggttccaagtcacttggatccttcagaagtgcagccaacgtttgagtttttgccacacaaaaaaaaacctatcataataacaacaattacaaaatggttgtgttattatgtatgtacaaaaattggcaactttgcttgtaaaactatgcactatatttcttcttgtttttctgttttcattgtggtgtaatactttgatatgtgccaatgccaatgtttgtgtactcgggaaaacaattaatgaaaaccaaattgttttgccttctcctccctctttttattttatacagatgatattaccagctaaaagcatatctacatagactacattaatagttataatttataagttcatgtgatttaaattatcctccactgaagaggattaagacagaacaaaaacttatgtgtttggcacttttttgtcagcttgtcgccatcacctaattaaacaacaactaaagcacaagtcaattggtaagatcgtctcaaattcaattaatctacaccaaaaacgaattttgttgaacacttagttttgagttgacattccactcactagtttaagctcatagaatttgtaacgagagcttacgcaggaaagctgttggttcaacaactaatttgcgtcactttacttaaagtatacaaacgtcattttcagaaataacaatatcaagaagagcgtgaacaaaatattaaaaacctatagatggtcatacagacaaaaacttcgaaatttctttaatccaatgtagattatccaaaaaatgtgcctcaagaccaaaatcagggttttacataaatcgaaacaataataggaaaactttaaaaatttcgtaacagttttgcaactgcaagaaaatacacttttgcgtcttcttccgaagcaccaatcttgaattattagtttttggttagcttttgttggatataaaccctaaaatccaaaagatctgttttctcttaattacatctgaaaactctctttatctcctttcatctccatcaatccccagaaatgtctcagcctctctcccacacatcgatagagtcagattcagtaccgaggagagatattcacagggtttcctttcgaaaccacgacctgaaacaatatgatttaaatggtgactgaattaactggaaccaccaaccttgctggtcagcgagggtttgcttgtggttggatttgttgcttctgagctgctgctgggctgggtgtcaggtcgtgtccagatctttaaatggccttctctgcaagctgttatcaatgattcttgggtgaagatcaagcccgagaggggctcggtgtgaacacggtgagccactactggtgagagctttgggacatcgcgcatgcacggcgctggctgaagagtgcccattggaacaatgttgtcccagtgagcggactgactccctgtgctgtaagtgggtgatcctcctggaggtcgccgtaggggaacaacaatctcatccatttctaggtcccatagcagtaactgtgtgtcctgttcggcacaagaaaagggaataaagacatggaatgcaagccaaaaggcccaaaaccccaaagatgatcatagtataagttatcaaacaatgaccacagggcgtgccattttctaacaaatttctacccagcagattaacaaatctatacccgtaatctggcaaaagccacatgagggaagtaagatgaaatctttaattgggaatttcttttggtcatatggggtgatagcatcgtctacatgaaatttccaatcaaagatttcatctcacttctctcactctttatcgctcccctacactagaatcattctacaatctgtatcctgttaaactaatagaaataaaggtattaacactgttcaattctcagatataggtcaaggtatactctcaacgttaaagcaaaaaagtgtttagtataactgaatacctgaccaacagaaccaaaccgatacatgacattctcgccagacccctctgaatttggtgacgaccaatacgaatcaaacgccacaccacttacctatgaggaagctttcacataagtcaagtagtgtttgtcttacatacgtaattcactatactccaatttaagaaccttacccacgaattgtgtccctcaccccatgccacaacctttcgatcttccatactccacacttgaaccaagtcatcttcacctccagtcaaaaggtactttccatccatactgtcaggccaatcgcaatgttagcatacatttacaaattaacaacgcatgctaaaagcaacttgagggagaaaaaattaacacagaatattattttcctacaaatgcaatagggaagatcatttgtcaaaggatttagatccagttacctccaagcacaacacaatagagcaccataataactttttacaccacacactagcttttgggttgaaaaatcaaaaattcgaagataacctgtacatggtcaaaagagaaaatgaattctcaactgaaagatatatatagagagaggaagaattggagccggcaataaaacaaaaacccatcataccatctcttccaacagttgccaagtacgctccatcatttgaaaatgcaatgctattaatcgcaccttgcccaatatgccatctcgctactggattactctgcagaaatatttgtgggaataaacaaataatagaacatgtaaggattgtagcatcgcgttgtctgagaaaatattcatgtgcaggtgtgtacagaaaagaaatgagaattctcatcttgccagagctacacatacagtcctcgaaaacaacatcgaatgaaaattgaaaacactaccaaaaacctcaggtaccttgctatattttgctttgtcaactgaaaactgtgtaggatcccttatagcagaaaatgaagaatcagttgcaccttctttattctgcaagtataataattactcaggtaaatttttttgacaaaattaggtaatgaaaagtcaatttctttttcaatatctgcacttgccttttcatatacgtacagatttccatcggcatgagcagcaacaaaggatccatcacctccaggcacccaagctatactagtacagcggctgttaaaagcaacaaacttaatcttattcttgaagtggataaaaaacatataaagtaattttgttctcggaaaaggaatctcagccagatttcagttatctctttatccaagaaaaagtgttctcctctgagactacatcctatcatgtaataatagtataaaagagatcttctgatcccctagactaaatcgagagttacctagagcatatatctagtaaattgacaaacgaagataactgcacaaggttgtgtcatatggcataaatacagaagtacaaaagacaaaaacaagtgagaatactgacgattgctacaccaacatatgggaaccaacaagattgattatttcaatttcaaaaaatgttaacaaatactagaacaataaagcagagaaagaaaaaaaaagaaaagaagtttacagaaagaaaaaagcttgcctgttatttacagaaccatctttgttataatgctgagcactaacaagcttcttaccaacatcctgcaactgctgtcttagtgatacggtgtagactacaataattcaccaaacgaataaacaacaagacaaagttccatcaagaacataagtaacaaacttaatctcaaagttgaacattaccatccccagagttcagcccaataagtagatcatgtccatccttagcatctggatgaaatgcatggcacatagggtttgaattgctgatatgtatagactttactggatcctaaatcaaataatttctcataaatgtgacaaacaaccagcagatcaaatcaaatcttaagaaaacaaaacgagtagaggtaagattaccttgtcctgcgagttcaagtcactaataaaaatagcatcaccaacattgaagactaagtaagttcctttcccatcgaaatttgtattagtagctgaggtattagaactagaagcagcgaatgaggccccaatccttgaacttgcacccacatttttagcccctccattacctccaacaaaactaagcgcacggttaccattcccaccacccaataaccttgctgttgctgaccggaaaccgctactagctgtggaacttgacgaggtcccagttggtgtcgatggagcaggtttatccttaaggtgagctagagtaacctgacaccaaaatttcacaaatccattctcagaaaccactttcaaaacataaaaatgaaatgtgcatttgatattcttacacaaaacctaatagcaatttcgtaatagcaatcacaagtgcaaagaaatcagattggattaaactttcaattcaaaaataaacaccaaagaaaacgaatcaaatcttcacctgagtaacggttttgccatgagtgtagtgaagaagcccagagggatgcgtcttctcgtagtggagcttgtactttccttcaggcgtcttgaaatacgttttgattcccggagactgaggattcgccgccgaagctgacgaagaagaaggcccagagatcatcccattcgaagtgttcatcatatttgctcacttgctctttctctaattcacaagctacttagagcatccgatcatgtccctcccaagctagggtttacccttctcccactacacaaaatccaaaaatcttctcttcttcaatgcaaatttctctaaactctgttcatcatcgtcgccaaaatcaaaatggaactttaatactcctggattcgccaatggctactggatcaaaaagattaatacaatgtggattccgattcgcttcctttattgctttcttaatcatcctcttaactcatcaatcaaattgactattaatggataaaatcaaagtcatctcgatcaacggtcaagatccctttaatctctgagtttctcgaacccttttgatacgtacagctgaggcccaagtacagtccaaaaatataggcccattactgaagaaccatagttaattaataaattgtttagtcgacaataagacagtgaacgggttttaccggtagccggtgaagttggtcagagaagggattaatgtcccggcaacgtcgtaactcaaccgctttaatttgatttttcttaaatataaaccgatactcttcatcgctcaaccatcaccaaaaaagaaagcaatttgtcttcaaaacatatttctctctctaaaacctctttttcataaaaggttgcgtcatctatacgaatccatacgtctctttgcttttctccgatcggtcttcttttctcatcgccggaacgctttggtaatgtttctcatttctccgatcattattgttgtttcgccgttgagctgattatttcgtgttggtatgtataaacaagccgatcgttgtttccttttttctcttgtgattgtgtgatgatggattgtttctttttttcggtttaatccggtttattcccggttttgctgctacatcggtgacttttcccacaatcttcgggtatgatcgcgatcatgtccgttaaccggagtcggttctgataatttcagacttcgaatttgttctctttcacgtagttgttagctttttaagattccgatactgagaagagaccagctcggtgattagaggagatgttgtaagctttgtgttttggttagctgttgataatgttgttcaggctgctacttcagcgatgcgggtaagctagtttgggatatagtgtattagcataacctaggcttagctggtttgtatcctgcaggctgcaggtttagtggcaatggtggtttctagttctatcatacctttctccaccacgaacctctggtagttgagaaactggagaaaagcctaatcagtgattcaagtgtttggaagatttgagaactagtacggctatagtttcaggtcagaattcatcttcctctttgagaacttttagaaactttgaaattatggcatcattcttaaagaaattgcattgataacacatttcaaacagatgttagttcctcatgttagcccattaggattggtggctggcctatccttgatgtattctgatttgcggattgtgttgtggaccttcttggttgattgggaaagcaaagcgaacttgaactcaagtcatctagaagttattctgatccataggggtaaggaaataaccataactagtctctgccatcacatgtgtaccagagtgtgtttagtcagttgaagatgcttgaggtacggtatccatgagtggggaacttcaatcttcctaacaaactacatctatcatataatggtttctagagtgacatgctgtcacgtacaagcatttgatttggatgcacaatgatgtgaaacataatgctaattttaagaaagcatcctttcacacaagcccgaattcaggagtctattaaggtgtgctggtgggtttgaagacaataagagcgcagaaatagtaaatgaggtagtaagcctttgcaggctagtacttttgtggactaaatccgtttatctaaggaaactgtagtgtattcaatttgtggatcagaggagaaggaatagaatttggtgttctcattgtattagtgaagtcaagggcctaattgcttcctgttggtctactttaaaggtgtgcagaaatgatgaatcagtgatcaatcaagcacgacggctttatcacttgggtagtgtagtgtattcgtggttaggactttctaaacctatatccttctaggattatttgcctgcaggtgcacttttgagggtttcggttcagaaaaatattttaagcttaagtcctgctattggattttccatgtaattttcttgctcatgtcatctatggttgtaagtttagtgaaatacatgtacaaggcctttacttgaatataaacgaagaagtagtacattgatagaaactgaaaagatgatatcaagtgttacctattttgcatgaacttgctctgatgctcttttatgcggatacagtatatgataatttgccatcgtgccttattctttcatcctcttctatttcctaatcagtttcctatagacttttctgtaaattctatagactttttgaaagtgtgtaatttgatgaactccttgtattactcttcacttttgatggctctggtttggagagtcgagaaccttagtgatactttaaatgcaaaggcttcttagtttcccaaccgtgcttgttttctgcctctcttttcttttggtttaaaagaagtatgtctgttgttattgacaaactcttctatgtaagtttttcttatgaactaaaagatctgtactattaaggtttatttttcatgtataagcatcatgaactttcctgcagcacagagcctaagtccacaaaaacttgtttgcttatgatatcatgagatctgaggtatataatatggtaggtacatgttacaaaggtaatggtactagagcttgaaactatggactgatttcttatatatttacttgggaaatttggctatcagactgaaagtaaactatgttggttggaaattatagattttttttttttctgagcttgcggatgttttcctgggattttgaatggtgagagaaatttttgtgcaggtttaatggggcacagacattttcttggttcatcccagttttttgatgatgaacatgatcaaggctggaatcatacacacccagaacatccatattcgagtcaaggtaattagtccttcattctatagttccttaatctgttttttatttattgaaatttggttgatgatgcatgtttagttttagggtaatatgttccatatttctgattaattattgtccatcccacattttctcagcaacatctgggaccagtgagaacagatcacatgtttatccagcagaaaacatgttgaatgaaggaatgccagtgtcttctcattggaactcttctccaggaccaaatgcttatactgactcaggtcatagtgtggagagaccacactacaatccgggggtttcggggccgtcccatgatccttccgtgaattcaacagttccaactttctctgctccacatgagaattatgtgacatttgcatcttcttcaagctacaacagccagacatggtcaaatgctagttatgttgatcatcaatctatggaaagtgtgagaggagcacaaaagagaaaacgaccatgtccttcttccatctatgaaatgggtagttcaagccaatatcacggtgacagaactcctgcagacactcatttcccctcggaattgcacttgggaaaatcaataacgcatgatcatgaccctcattacatgccatggcttatgaacccaacttacagaagtaataatctctcgatcaggggagagagctcttcaaggaatgtccggagtcgtcctacacttgattcagagaccagcttaggtagaaataatttgccaagaagcttgagccttgattctcattctacacaccaccacagtgttgatcattatggctcaggtcaatttcctggtcagacatctcacggaaataaagactggaactgtgctagattgtccccagttcttagaggtatgcaaagttcactttgtctcgatatctgaatcgtctttgtttctaataatcacattaattcccactttgcagatataaatggctttagtccagagacaaataatttccttcctgcaagaagtgttgtcaacagcttatctgttaatacttccggctatcatcaccatgagcttaccggaaacagaaaccctacagtttcccacggggttcctggaacttcaacactatctacaagcagcagccgcttctctcataggtcaacatccacctatagatcttcttcacacggttcgcgatcgggacatgtagcatcttcttctggagacaggtctcatttggtcactgagacttatccgtctaggcatttaaggccaccaccacacatttcatggcgtagcggtgatcggccagggagacgcagaagttcctatgagaggtttcagcctcctttcgatgaagttgctctccacgaacggttttcatctgaggtatatatttcccttacagatgcattatttagagtggaagtctgtctaaattacatttagtattaagataaagatcaagccgatatgatacagtgcatatcgaatattaagatatagatttgcaatcttatcattttctgctgcatgctgaactgtaatctgttattttttggggtgtatgtaataataggaattcatggttgaagatcgccaaccacaatactacggatccagaaacatgcttgatcaccacagagacatgaggcttgacatcgataacatgagctatgaggttaatagccaaacacttatcttttgaagcctcacataggcaaaacgaaaagttttggtactgacatatatatgcaggaactccttgatcttggagaaaggattgggagtgtcaacactggtctatccgacagcgcaatctccagttgcttgttagcaacaatgtattatccatcatatcaaacagaggagcaaagaaaatgtgcaatctgcctggtaagatttagttttttttttttttttcacaacctggtaagatttagttgtctgaaacattatgtgtctataaagttagaagtaggctaacttaagggtgatgtggtaattggtaaacaaataggaggagtacaaggaaaaagaagagttaggggaagttaaggggtgtggtcatgactaccatgggaggtgcatcaagaaatggttgtctatgaagaactcttgccctatttgcaaatcccctgctttacctgatgcttctaagaactcatcataaattataggttatcttttatgtgtgcatgttatattcatttgtctttcgaaaggaagaaaaatatgtgacagaatataacattaagttttcttagtgattaatagttgtaaatagaagaaagtccaggatctttctcaagggttaatatatatgttaattattggaaaaggctctctttggaaaatctggatttgttacagatgcaaatagttacacaacacttcacactatatggtatttcatcttcaaagagaaataagattgacaaataaagagatgatatagtccttgaattttccttgtggatgggtgaattcttcaccggtcctgtaggtcacatctatcatttttccagcattagtggcccgtgataagatatcgcctgatattatcttccttgacttcaagtacacttcgttcactgacttggccgtctggatttaagccactcataactttttcttctagcagtttgtaccaacccaagaaaactgcatgaaacagttacatacattgacacctcaacaccaccaatctccaagtactcatcgaatgtaggcacgatgtctccttgtgcccactctgcatagctaaggttggcctttgagtatagtttgaactgcttaatgtttaggagcatatatacaaaaagatgttatgtctatgataatctctttatgtcgaccgttattagtgaggtactagctaagatactattactcatcaattacatcttgtagactagctaagatagttcttttttgctctattcgaaaacatcccaagcaagcttgaaaagacggttttcatcatataatctggtagtatgtatatgccatttggatcccatctacgcatacatagaatcagctttaatattatcataggtatgtattactcttgaaaacacacaaaatatcagatagcaatttacctttcaacgcaatgaacaagagttgaaacttcagaaataaaaaaaggaaaccaatgtttaaaatgtatttgcttgtgtacaaacaaacaaaaataagatatatattataaattcataaagacaaatatagccatacagattaagatttttttttttgtcggcatacagatttaaagatacttacgaatgtacgacacactccaaattaaatataataaaagtttttatgaaacggataaggcccttttagagatagttataaggtcaactcaaataagtcacattcatatttcgaagaaatataaaccaacttaaaaaaatatattatacttacaattatagagcaataatgcaattacatgttaacacagcccatattttattgacttttttagaacgaaacgataggaattttcagaattatttccgacacgcttgctttcaagtccagcatttcgcgggaagaagcaaaaggtgggtcaatatttttggatgccagaatccagatccaaattaatccacatgtatccgtagattttaagggatactataacatgtttttttctttctttctttagtaatagtatttgttttccgtttacactaaagatatttagtattgttattttttgtttaattggttagttcatttcacacacaaacatagctttacgattttcttcagaggccgtttcactattccaagtaaatcaacaattcattataacaaaattgtgttttagtcccaaagtattagagaatagggactttacatggctataaatgacgtcatcagtggataatatgtagctatgcatctaaatctgtagtcacgtcgtagctaatgactacaaaacttccgtagccatttcttctccagtgtgcctactgatattcatattagccaatcgtgtcttttaacaacgtttaagttatgataccatcaatcaccctttggctatgttattgatataatacatgtgacaaatcgaccaattaagtcgtctctctgatcaaaacaacttatacgaattcaaaatcaatctgacatattattatcacataattagttttacaaatcgaactaaccacacattaacctgaatatctatatagtaaaaattgttattggtgaaagtggatcatatactcgtatatataagcaactagataaaccacattaacttctagatgtagacttaaagaaaataagaatcattacatcaagaatattgaggataagtgaattggcaacaaagcattatgtctgcaagtgaatggattggacggtagttaatgcaattgtacatgtatttacagccgccataattaagaaagtgggattggttttattagtagtggtttgcgaatgcgcatgcgattactgaaatgtctaaaaggtcaaacttaatggctttcaattattcattatatacaccaaggaatctttttcttaattcttctttggattttcttcttaaaatattatattgttacatatctttattgctgacatataaaaatgtaacctttttgctttccaaactaactaaaactttacggtaactttaaaattcataaccaaattgctcatattcgtacgaaagaatgatagatgaacagctacttaaggatcttttcaaatttgatcagacttctatagtaacattctatcgaagatcggattcttatccccaattcccaacaatatatttgaatgattgctagatatatactgtattaataagtaaactttattaacggttgtacataatcttaaaaatttaaggtttttattcagtatttttgccaaatattttgatgagcagtctaattctttcgttctttttttgttaaaaattaacaactctaacagtactgaatatttctgaagtgagctaatgattccaaattggtaacaatatcttaaacggaaggtaaaatgcgggtaagtctggtagaatctgttaaattgaggtagcataaattttaccacaaaaaaaaaagcagaaaaggattataagattcaaaaaaaaaaaaagtaaattcacttaaccttcttttttttattgtcaactgattttgttattgataaacttgttggaaccaagataataggccaaaacttttttataatcatatatattaaataataattgtatttaagataataggccaatataagctataggttagcatagcgctgaaattaagagagttgggtatgtagacgttgacgtgtaatattcatgataatcattgcaagcaattttatttattttctatactaagaactatttcaaattgtatacatattactttttggtggaacatgaaaatgtttatagattgctgattaatatttgaaggaaaaaataacagaaaaatggatatatacttgaatcggtttgataatatattggaacaaaagtgaaaagctaaattaattaatgctactgtgctagtatattactatttttatcgaattaaattggacatcgagtctcactgaattcacaatttcacatgttcaacaactattgagttcagatagctagatagctagtggttttaaatttgagtattaatatgagtttagaacgattaagaaacccccgattattgaaaaataataattaattaatagtgacagcaaccactatgactaagaaataaagatgcttaattttatcatacacgattagagaggttctcaaactctatataaccctacattggaacacatatagagccacacaccaataattaattagacaaaagataagagagaatagagagagagagagcaatggccaatgcgaagcccttttgtctcctcggcttcttttgtctgttattacagttattctccatcttccatatcggtaaatacattcttcccttatctaattacgttatgccatgtgtctccattgccactctaatacatttatctatagataccatatactgtactataagaagtaatgatattcattctttcactaatttaatttccaccattagaatttaaatattctataaactattaaaaattgtaggaaatggggaattggagatgaactattacaaagagagttgtccaaaagcggaagagataataagacaacaagtggagacgctttactacaaacacggtaacacagccgtatcttggctccgtaatctcttccatgactgtgtcgtcaaggtatattcaccggaattcataagacatagatatctatacgagtttgtccccaaaaaaaaatgtctatatgaatgttcatgtgtgtgtttttattttattttatagtcgtgtgatgcgtcgctgctgctagagacagcgagaggtgtggaatctgagcagaaatcgaagaggagtttcggtatgagaaactttaagtacgttaagattatcaaagacgcactcgagaaagagtgtccttccacagtctcttgtgctgatattgtcgctctttctgcgagagacggtattgtcatggtgcgtttatgcaaatatttacatgcattttatttgggatttttttttttttgtatttgtggtgattaatttttggtgaaattaatagttgaaagggccaaagatagagatgataaagacaggaaggagagatagtagagggagctacttgggagatgttgagactctaatccctaaccacaatgactctctctcatctgttatctccacctttaactccattggcatcgatgtcgaagccaccgtcgctctcttaggtaaccatgttttaactacttaagtaggatgtcatttctgttttccgtttagttcaagtttttttcggatagacaagaattttactgaattaaaaccacatttatccggtcgaacttttactaatgtatttagggagtatactgtaaatttttatctgaatttttttaattttgacatacaaaatcgatcactataaacgaacttttgtttagttattgggtttggtatttgattcggagatgtaatgtctagtgaagtaaaaagatatatcacagaaattttcttagagatactaattgaatttccttaaataaggatgatatcgttattttattttatttttaattataaaatgatattgtttttttttctttttttaatataaaatgatattgttagtgatcagtcaatgtatataaccgtaggtgctcactcagtgggtagggtccactgcgttaacctagtgcaccggctatacccaacgattgaccctactctcgacccaagttacgccctttacttaaaaaaacgttgcccaagtccaacaccggacccgaacgccgtcttgtactcccgtaacgatcgtgagactccgatggttgtggacaacatgtattataagaacatcatggcccataaggggcttcttgtcattgatgatgagctagccaccgatcccaggaccgcaccgtttgtggccaagatggctgcggacaataattacttccatgagcagttctcacgtggcgtcaggctcttgtccgagaccaacccgctcacgggagaccaaggggagatcaggaaggattgtcgttatgtgaactaatattgatggtccttgcataaaggatatatattgtggaaaagtaataataataatatatatgtgtatgaatgtctgtcaatgttttggattcaataagaagaaataccaaaaccgttgtggatcagaaagatatgtttggatcgtcccaaggtttcgatgggatttttattttttgtcatttgttggtatatttggtgagtgatgtcgatacaactaccgatccggacattcgaatattagttctaagttatagtagtgccaaacatatataaagcacatcggttagattaaaaactagatcataaaactaaatgatacataaatccaaaactttttcatttttttctaaaatgtcaagtttttttagtttatatttataaaaagaaatagatatcaacttcggggaatttaattagctaatgtcatcaacttattgactccaaggcaaatcatgatcgtatttgttttagttgtgagatgccaaacgagttgggtactttcccatgtgtctccattgactcttttcacaatcatttccattattataagagcttttgataattggtttctatttaaccatcgacgaataatttggtcagtctcgtctagtgtccaattgatagacatatcttagcatttatgattacaacgagatagatcttgacctctatattaaaattcatcattcatgtatattacgactaaattgatcttaagaagttcacatacatagttatgtttggcttttgaacaacagctgagatgctattgaattcctagggatagctttcaactgctccataatcgtctatttatcttctaagttagatctaagagagattgtcttcgtcttattagttaccaaatctagattacctgcaatagtgcggatgatcacctaacaaagaaaaaaaaaaaaaaaaaaactaatttgatgggctagacttttaagtaaaaggccttaggagagttgggccaatctttgactaagccccaagagtcataagacatccaaaaaagttcctaatgcatttgttaattgggaaaaatgtcattaaaatcccgaactttgttaaaacgttgatttaaatcccgaactttatttgaaacgaaaaaaatatcaaacttttgttgacttttctaataaatcttaaacttgtgttgaccgcgccattttagtcttgccgttatctgggttaacagacttaattgacagggttaattagacgttaacagagacataatttgcaaacgacacagtttcgtttttagtaaacgacgtcgttttatcaaaacgacttgctatgttttcccccaattcgatcagaaatcgaagaaatcacaagccctaaaaaaacaaaatttctcagttctcttcttctacgacagaattgaaatcgatttcgaaaattggatcttcctacgcaatgagttcaagttcagcgtcatcgggtgttgtccaaaaccgtggttttccggtgaagtgttggtgtggagatgatgtgacaatcttcacatcgaagagtgttgataatccgggcagacctttttttcgttgtgaaacgaaaagagatccaaagacgtggacaaacaaaaaagatgtaagtttgagtttgagtttgagtttgagtttgagtttgagtttgagtttgtgtttatgttatgtaacttagcagctaatcatatcggatttggtttgattgtgtaacagagtcatttgtttaaatgggttgaggatgctgtatacgaagaggttgaagatgttttaccaaaatttgtgatcattgcaaatgagcttaacaaagccaaatccgaggcaaatgagctaattgtgatgatacatgaactaaaagaagaagcaatgttgagtaaacaagaaatctgcaagtggaaagtgtgtttgaaaatatgtttttttggctttgtttgatcagcattttcattctttacatgatgcttggtaaggcaaaaaaaaatgaatttgttgttgcttaatagtgtaggtctatctatcttgttgtcttcggcaagcttgtaatgacaatgtagtatttgtgacttttatgactttgtaatgttggctttgttgctgtcttaataaaacttgtgagtgtttggtctttatttttcttgggtgaatgtgagtgtttggtcttgatataaggtgtgagtgtttggtcggtgtgagtgtttggtcttgatatgagaatcggagtaaagagatggaataatttcactcaaacaaaaacttgtcttaaaactatgagtgattaaaagtagttaaccaacatgtcttaaaacttgccgaaccaaaaatcaaacaacaaaagagacaacaaaagagacatctcaagttatgaaacaatccaaataccaacaaccaaagaccaatcgatgttctcatgtcaagtttgaacactcaaaccatgatctccatccttctactccttttcgattttttccttctattgtcaccatctaacctgttaccattctgtttcgatttttttcttctcctattgtcaacgacagaatgagacggcctagtagaaggctcgtgaacagcaggagcctcgacagaagcacgtcatagctcagcaacagacggaggctcgatagcaacagacggaggctctatggaagcagacggaggctcgatagaagcagacggaggctcgacaacaacatgaggcggctcaacaacaggaggaggcgggtcgacatcagcaggcagcttctttctcatcattacagtttcgaatttctcttcctcgatcgacaaaagagaattgagaatttttgttttttagggctcgtgatttttcaaatcgaattggggaagttcagtctttttgataaaacgacgtcgtttactaaaaccgaaactgtgtcgtttgcaaattatgtctctgttaacgtctaattaaccctgtcaattaagtctgttaacccagataacgacaagactaaaatggcgcggtcaacacaagtttaagatttattagaaaagtcaacaaaagttcgatgtttttttcgtttcaaataaagtacgggatttaaatcaacgttttagcaaagttcaggattttaatgacatttttccctttgttaattcaatcatcatgtgatatgtgaagataatctgctgtatgtagtaaataaattttgaagtcatctgattgtaataatgtaataatatatagaagtaaatgttacttattgggcttctctattttactaagatgcaaatgaattaatattttataatttatttattttgtcctaagtatacatgtcttttttgtcttttgtctgaatctttctcgtcggaaacacagatctcagttccttacagaagaatctccgactcgtttctttgccggcattctcagatttccggatactagccatgagcagtgatggttccgccggaaaggtacgtctccgtatttgtaatttccgatgaaatcgaactgtgtttaccaatcacgctcctctctgatccataattggtttttaagttccaaatctctgtttattattgttagatctgttatgagctgaatagaagaagatcatcaatttaatctgttgcttgttgtgttgtcttgatcttgatgatcctctcgcatgcattgtttattttgaacatgatctggttatttacagggaatttcaattgtattcatggattagtttcgttaggtttacatgatgtcaaatatctcactttggtatggattgttgcatacattgtttgtgaatttacaggcggttgttgaagccaaaggattgaaccctggattgatagtgctgcttgttattggaggtctgcttgtgacatttctcatagccaattacgttatgtacatgtatgctcagaagaatctacctccaaggaagaagaagcctctttccaaaaagaagctcaagcgtgagaagctgaagcagggagtccctgtgcccggcgaatagattccagcttcttcaacagtctgtgtttttaacctgtaatcacaatgtcattgagacttttgtatgggagagtagcaaacgtcccttgttctgttttggttagactacaaaaattgaatctcatcaacttctgttttcccttcacatatttgattgcagttgtagagtctatcatgttcactttactttatttgtccatatatcgttgccttttgtcggatccaaagggtttccccaaaactcttacgtcaatgttaggctttgcgaattgtgaaacaaatgaacatttcagacaatgtcaaaagaaatgcgtaagcaataaagatatacatatgtttgtttttcgatagcaaaagaaagacacacgacaaattacatccagagaaggccttattcaaaaagtaagcaaaagacaaggatcatgattcaagttccacagaaacacttgttttcacaacgtgtgtaagcttcagtcgactcaatattacaagtgctctttagaccactcgactctatgtaagcttcacttacgacccatggtttgttctatgggtggcatcacaacaacggtggactgagcattgaaacctgggtgaagaaccttcctgcggagctcacgcccttcttggcaaagggcacatgtatggcaaaggacatgtgtcacaaagtcacaagtcgtctccaagtgttccctttgcatctcgtcctctatgcagccaccgcagcaaccacaagacctgttcatagcctcaaagcttccctgtttttacccaaaagagttaatcaatatcttcttacacggcaaccttttttctcccaaactcacttctctattgtttaaatgaaggaaacataaatcattacctcaaggttaaactttcggcgaatagcagaacggctagaataagagaaccatggagcaagacagttccagccaaacaaagaattaccaacaaagtacaatcccaaatacgtcaagcaatggtttgaaaatgttcccggagcagacccaagtctctctgcattagttccatacaacacacaaggagccacacttccaagaagacctacacagaattatccattatctcatcactaaaaaaactttcatcaaacacataacaaacatttctaaaatccgaatcatatctaatcctaaacccatttatctctgaacttcaataagatctaaagattcaatttttaacaacccaaccaaatttagaaaacaaattacaatcagaaattatacgaattcaacgaaatactcacaaacttcgagatcgctgctgcaaaattcatcattgcgaccaagacaggtaaaaagaccagaattccactggtttctcctgatcggctcgccaatcacgctaccatggctcacaggcaatccatccgccgtccagccgtattcctccgccgcgggaggaggcacaagaggcgccgccttggcatctcttttcgagcagatcttgccgtcattctcgttcaccttcaagagaggactcgattcctcatattcgtcgcctcgttgagcttcacggctatcttctcccgccatattttgcttagaaaattaacgcaagatcaaatctgcacaaaacgatttctttgatctaaaagaagaagaaaaagtaaagaagaagaaagagactttaactaaatttatcgaccgtcccgtacgcgttaagatagtcaaaggcaccttcaccgtcattaccaattacttaacttggaaatatttggatctcattaacatatgggcctaaaagcccattaatatctgggcctcaaggcattttcgtgatctccacaatattttgcaagtctcttgataaaactcatcaatttatgggtaaaccatttttatgtaatataaggaaaatatatctgtttttagagatgtagaattttaagaacacaaacatagttggcataacagaaaaataaaactatatcaaagacttttttttgtttagtgtataagtgtacgaacgaaattgtttgtttagttacattgtcatagataggacaattgaaaaatattacatggtcagggaaccacaagattctctacgataaagaaagcttttaaagctctaaatttcagcgaaacttccccaagtaaatccagcaaagaatatagtaatcgtttcaatgtaaatttctcgaaaaaatacaaaagaaagagaaaaaaaatgtaaacgcatcacgtaaatcccaaccttgggttctgtcgataacccatctcgggaacgagtctcgctggctccgagttacagcgcgtgaggatcagacactgtcgtggtgatcccaaaacgcttcgttttggttcttcactcgctgctgattctcttcttgaatcctctaatctctctgttgtttctgtaacgcttgtcttcggttcttccgaaactgatacattttccgacgaagcgtgtcgttggaaaggagctttatttgtctcttcttgatcttcaaataagctattagctgatgaaggagatctatatggtgcagatctacatcgagttagtaaaaaagcgtttctcggtggtgtagctgtgaatgatttacatgaacttgcttcttcttcttggttttcttcttttcgagtctcttctggttcctctggctccaccgtggagcggccaaagataggttcacttctagacgaacttgatctcttctctgattttttcgagaaactagcatgagaaaatgatttccatttacgccacacagggctaaagcaagtaggtttgattattccggtgaaagaatgacagggaaaagcgttcttgacccacccgcaccgacggctctggcgtcgcctttctgttgcacctccggagactcgagcagtttcgggtttgggtttctttgatcggtttatccttacttgacccatgcaagtgactttaggtgaagttggttcttgtgtctccgccgcagcagaagcatttttccgacggaaaaagataggtcttcttgaacgagaacggcttctgcttctgcttttggtccgcaagaaccgcatgagtagaggcgggttttcggttcgacccggactcgaaacgggtctagatgaagaaaacctcatctctttttgtgtctaaggattttttggtactgaaactctcactcttttttttggttcctctggtccctctctatatgattcagatcgaacactgtggttttatattttttaatgttttgttatgttcacacgttgggttcagaaaaattgacggccgagatcttttctataagaggaaatcggtggttctacttagctaatcctttttactagaaaagtttaacattttgtactttttgtctgtatgctctctagttgtttgttgagatctcttgctgctagattcactttttgggacacattgctttgtatttgaagctagaaagtttatatcaacatgatctaaaaaagtattttaagagaactacattgaggtagttatttcttttcctaaattagtcattggtaaattacatcgtgacatttatagaacattgcagagcataaaagattgaaaaaaaaatgagctgagatttgtatgtatataaagaaaacgtattagcatagctttctttcagatttaacggtggaaatcatacaaaactttcttgcagaacaatgagtatatatatgaaggactcgttaacgaaaatattagtttaaatctagatatcttccagtaaaatatgagtttcgccttcgtatatgatacggcaataactttgggaccaactaatttgcatatcacatgttgatatctctttcagttctactcattctttttttttgaaaacaacaaattattggctgcaaatgttttttggtttaactagtgcttctctaattgtcaagtatcttagtctagagttaattacttaaatactaaaaggctgtcgacaaaatcaagcttgaatctccttgtggtatcttcaactcttcgttgtctgcttacgagtggtttactcagtaattatctataatatgttattttttttccctcatcttttagttgttgtttcattacattgaaaagcttgtaatgtctttatatggtatatatggatcttatgagtgaggcaagatccatgatgtttttgatcttagaatgtatatgatgatcttagaatgtatttgaccgcccacaaattattgttcattgggattatatctctagtccaactccaagcaatcgaaatgggtcctgcttttaagaacaacagtatatgtttaagaataataactttatatattctcgattttaagatcttttgacaaaacctccttttcgttaggagcgtactaatttccaagtgtttgattagtggggtctccgtaaatttatttagagtttctatctatttattaatagctcaattaattaatctatactgtatctaaacatcaatttatatatttactcttgagaccaaaactgtcaatttataacattggatagtttcttaattcttattatatatttttcaaacacttttcaagactaatctccacattaggtactctctctagagataaaaatatttatcaaaaacatttttatttatttattaagtagtagataaactactgtggcaaaatcgtaaatgtctaaatgctgatgaattttttttgctgctccaatctggtttagtgctccatatacatccacggccaaaatgaatctatggcggcattaagattcattagtaagcaacgattatattaatataattgtttttagcaatgattttccgtaatttcccaaatatgtttcagttaatgtgttccaatcccaacaactggttgttgcaaaagaccaccaacgcaagcaatcatcaaacatcaaaataatcttaccttagcgaacaaacaataactacacaattctcataaagctcttatatatcactaacttcacacattttgttttccacaaaaataaaaacggaactcactcaagaaaccttcttccttgaagagagggttatgggatctctagagagatcaaagaagaaagctcaagtatggaagaaagctgtgatccatttctctctatgttttgtaatgggtttcttcactggcttcgctcctgctggtaaggcctcatttttctctaatttcgaaacgacttcttatacttctacaaaatctccgattcctccccaaccttttgaaaacgctacatacacacaacattccctcctcaatagaaccttgatcaattcccaaagccaagctccagctcccgcagagtcgcgagaagctgaaggagaaacaagatctctctccgagaaagaagatgagaatcaagtaaaagtgacaccaagaggactagtgattgttgtaactccaataataactaaagatcgctacaaaaacgttcttcttaggagaatggccaataccttgaggctagttccacctcccttattgtggatagtcgtggaaaaacactcggatggcgaagaaaaatcttcgtctacaatgttaagaaagaccggtatcatgtatagacgtatagtcttcaaggaagatttcacaagcttagaatcagagcttgatcatcaaaggaatctagctttgaggcacattgaacatcacaaattaagcggaatagttcattttgcgggactaaacaacatatatgatcttgattttttcgtcaagatcagagatatcgagtacgtaaataaaacaacattttctctaaccatcaagttataaagttttttcttaaaaaatgtttttcttcttgtgcagggtatttggtacttggccaatggcattgttatcggctaataggaaacgagtggtagtagaagggcctgtttgtgaatcttcacaagtattggggtggcatttgagaaaaattaataacgagacagagacaaagcctccgattcatatatcaagcttcgctttcaatagttccatactttgggaccctgagagatggggtcgtccttcttctgttgaaggcaccaaacaggtaacttcagcctcaaagtttgtattatctatacaaatttcgtttctattaaattttattgatgaatgtaaaagttatagagcttgaagataatttaagtgttgaatgggtgggttggtaagtttgcacaacctggtcatttaagtgttagttgctaaatgattctaagtttctaaccaattgattccgttaatcattatgttaaataggcttattaaacacatagcattgtcttcacctgaatccagaaacggcccatgtccatttaacagaagggtagctataaacacatagcaatagcattgcataagagggcttagtttaaatcgaatttgtcgccgtatttatattatttttcacatttgtttcataaagtaatttttttctactatattgttttttttttaatgttgcataggattcgataaaatatgtgaagcaagtagttttggaggacgatacaaagttgaagggacttccggcacaagattgttccaagattatgctttggcgtctcaaatttcccacaagaacacgtttaagcacctgatttgctttatttcattctaatctctttcaaattagacacttttccttcttttcttgacaaaaaaaaaaaaagagacacttttccttttttttttttttgaatttatacatcacagtgaaagatttaaaatcagtcatctagagtgtagatttaaaatgctaaataaatactatagttcttaacattaatcatttaatttccataacatgattataatatgcttgcaagtcgcgcatgtactagacgatattcataggtaatcaataggaataatttcaaaacattatggtaagatgcaaccagtcaaggtcaatagcgcaaattagcttgtgtacatggaataatagtaccaacggaactctttaattaaatgtagtgtaagggacatggaccgaccaaaattttgggatatcaatgtccataaatcaaattacatactatgaccatatagtatgaattaaataataaatatgcaggttgcatttaactcccggtaacctattgcggtggcaactgggaattcctaggatccccgaaaactgaaaaacaataatggccacacaaactatgagtatgcatgatttataaaaccaaagaacaaaaacgttactcgacgaaacttttaggtgtttgtttcctccaacctaatattttaggttttaggagtccacggtttgtttttcaatggtagttatattatatgtggttgttaggtaagtggtagtatattttgactaattagtagtttgacattatattaggaggtcgactcatctttttcaatcgtgagataaaatggtttttgaaaagtggacttggatttgtacaaaatgaattcgcagactccatttatataatgtcatatgtgatgcatgaaaaatagatagtcccgtctaaactcggtgtcaataactcaacttgtgatactacagtttcctattataaatagaattttcataactttttccttttcatcatttttttttttcattattaggatttcgaataccggtaaattgagaaagaactactgtcttttttcatagagaaaaaactacatgatcaaatttgtaggaataaaaacagataatggattaaggtgtatctatataatatcttggttacataaataaataaatcgtatatggtgctatatgcgattactatgtaattcaaagaaactcttaagtaaattataagaaagaactgtactgagggattaggttaggtgcatctttacgcaaaaaaaaagtggagtatgggaattaaaatatagaaagtatacagagaaatgcatgcttagttttcatttattcaaacaataaaaagaaaataaattagaaaaacgaaagaaacatatattaccgttagcaattaagtagcaagcagcaaacatgaggccgaacaatggcacgtgactctggcgcctcaacaagcaacgcttctctttgtcttttatgtcttattcttgtttctattttacaaggatcctctcgtttttttcttcaacttgatgcaattatcagtcccacgaaaaattgtattctttcgaagtaaatatttaaagaaatactgtagaaggtcaagatgttaaaaatatttccctacatattttagacatattgtttggtatagtgtctataactgtttcttaggcaaattgtaacaacgcttagacgtctattgaatatatttttttctaatgttgttactctttagtctttaacttcttaagagtgtcaatgcatactagcacgtctcaagagcaaaaccgtaagaaactctctgtgttaatgtattaagacttttgtttgtttgtgtagtcttagtgagatggaattgaagaaagaggttgacgttacatttctttgaggctttgaatggtagttatatgttaaaactttaaacaattatggttatggagttactgatagtagtaacacgtacgtttatagtaaacaaattttggttggacacgtttatagttaattatgctacatatgtgttggcattaaactctactcctccaactcgcaagtgacaaatccgcaacacctaatctttagagtatttgcactaagtaaaagagaaaatagactagtagagcgttaatttgtccattgaacaatattgctcatctgtttctgtactcttttcataacatctttaaaaaaaaattgaattctacttcgttttaatttaccaagttaactcataattttaccatcaaaaacacagtctcaacctgtttcatgaggaacggtttatattttataccagacattaacgtattaaagcataattcatggacgaacatcacctgaccttttggtcggaaagagaaaagtaaataaaatatggactaaattgacataaaacaaaaagtatcggggcaaaatcatgatttcccaattcaatccttttttttcacacacactctcttttctctttctggatattaatgtgtaaacaaatagacagttcactggaacaaagaaaaaagaaaaaaaaaagacttgggaaacgagcagagtcagtgagagaacaacactagtcacaagggacaaagagagaggaagaagatgatatccatagctcaattggtctcaacccttccgtagtttagctctttcttcaatctctcatcttttcttcattacatttcgatctctctgttcttaaaacatttcggaccaaaagaggaaagctgcagccacagttgcaggtgaagaacatagaacactgtcccttctctctctctcttctttatctgtttgaaatacctaaaaattggttctttatctgtttctttcgttgatgagttcgaaatacctaaaattttgttctgtttttgagttactatgttgcagaaagttttaacctttgagggtttggtttagtttttatgtttactcttttctgggtttttcttgaagattcagctaaaagaaaagaaaaaaatttgttttcaagaaagtttttttttccttcaaattttgatttttttttttctgaaaaaatgttctcggttaggtttaaattgaaatttctagtttggttagtttcttttaagatctgttgtctattttagggaagatccacctaataaaaccagaacccacgttaaactaaatgacagaaattgttattatctcctctcctccttcaaaagattccaaattttttgaagagaaaacaaaactaaaattgatgacttgacaactacaaaaagattatgtggaatataaatgtactttctttgcttgtaatttggtttacctctgtgagattagattgaatcacactgagaaaaaatctatttcctttgactgtgaacagtttctttttaagtttgtcttgttgccttggtttggtggtagtggtagtggtttcaaatggagtctctttgaagccaatgtctctgtatagtttagtttgttagggttttgtttttgtacacttgcttaagctttgtacttctgttgagtttgttgtatatgcttgcttatgttaatcttataacaccgatttgtgtttcttgcttctttctcacacacagagtttatcttcaaaggacccaaaagagagtgttttagaactctaatctcaagcaatgcagactccaaaacctaggttattctcctcacttttgtccaaagctttctcttttgtgtgtcttttagagtctttgatgtggtcattttgtagtttttgaagtcttgatttgtttcagtggctcttgggatgtattctagtgcttttcgtttgtttaattacgcttaagcgttattgtgataatgataggccgggatcgttggaggtgcctcagaagaaatctcctgcatcaactcctaaaactgctcggaagctcaagacttcagaatccgaccctgtctcgtctcctaacacgaaaatcaggacaccgaaaactcaaagcccaaaagtagttgctgatcgccgttctccaagaacccctgtaaatgaggtacttgtagctttgcacaatgctttgtaaatcaatgcctttatatgatttgactcacacttgtctcagttgtccacttttagcaagaactagattgtgttgttgtctttttgagtgcccaaaactcaattatagtgctgccaactgtcaatgatactccttaatgacgagaatatttgattgattcaattatagaaaccattgtaaatgtccacgtctagaatcttcctctgtaagactgtaactactatacaatgccattgagagagatatcgaattatcatattctacatggtaatcagagcataaaacggtactcattcggctgctttctcgtcttctacttctttcctattcaacactaactgctgttagggtgtttgaagttcaaaccttgaaagttgttgattcaggagtctttgcaagaaccctaaacctagagggttaggcttcttgttttgttctgattgttacttttgtggcttgttacttgatatatgtgaaagtgatatgtgatgcatctgttgcgtagttgagttgttaatattcattgttgcttttttatgcaagattcagaagaaacggacaggaaaaacacccgaattggcatctcagatatctcagcttcaagaggagctaaagaaggcaaaggaacagctaagtgcttcagaagctctgaagaaggaagctcaagatcaagcagaggaaacaaagcagcagttaatggagattaacgcctctgaggattccaggatcgatgagcttcgcaagctctctcaagaacgagacaaagcgtggcagtctgaactcgaagcaatgcagagacagcatgccatggattccgctgctctatcatctaccatgaacgaggtccagaaactgaaagcacagctgtctgaatctgaaaatgttgagaacttaaggatggaacttaacgagacgttgtcacttgtcgagaagctcagaggtgagctgtttgatgcaaaggaaggggaagctcaggcgcatgaaattgtgtcgggaactgaaaagcaattagagatagccaacttgacgcttgagatgttacgttcagatggtatgaagatgtctgaagcttgtaattcactaacaactgagctagagcagtctaaatctgaggtaaggtcactagagcaacttgtgagacagcttgaggaagaagatgaagcccgaggaaatgctaacggggactcatcatcagtggaagagctcaaggaagagataaatgttgcaaggcaagagattagccagttgaaatctgcagtggaagtaacagagagaaggtaccatgaagagtatatccagagcacgttgcagatcagaactgcttatgaacaagtcgatgaagtaaaatccggatatgcacagagagaggctgagttgggggaagaactgaagaaaaccaaagctgaaagagattctttgcatgaacggttgatggataaggaagctaagctcaggatactcgtcgatgaaaacgagatactgaactcgaaaatcaaagaaaaagaagaagtatacttaaacttggagaacagcttgaaccagaacgagcctgaggataccggtgaactcaagaagctagaatccgatgtgatggagttgagagcaaatctaatggacaaggagatggagctacagagcgtaatgtcgcaatacgagagtctcaggagcgaaatggagacaatgcagagtgagaagaacaaggctatcgacgaggccttagcaaagctcgggagtctgacagaggaagcagataagagcgggaagagagccgaaaatgcgacagaacagctaggggcggcacaagtcaccaacaccgaactagaagctgagctgaggagactcaaggttcagtgtgatcaatggaggaaagcagctgaagccgcagctactatgctctctggtggtaacaacaacaataacagtaacgggaagtacgtggagagaacaggatcgttagagagtccgttgaggaggagaaacgtcaacatgtcgccttatatgggtgaaactgatgatgaattgtcatcaccaaagaagaagaatggaagtatgctgaagaaaattggtgtgttactgaagaaaagtcagaaatgatccattgaagttcaggaaaaacaaacaaccattgtctgtaatattcgcttgtttttttccctaagtttcaatgtgtagacatgtttttgttgcctatcgtgaactacttttgtttttctttctattgactagctgaaactctgatcaacatttatgaagctgaactccattgttactcagtagtcagtactatattagttagtacatattatgaaaaatacaatagccaaaacaaggtttcaaattaatgggacgattggaaactaaaatatattatcagttggtattgtttactttagaaaatccattacaaaccagactgcaagtgaatctcaaagctatacatgacaaagcacttagtccatgtggtcttttacctaaaagcttatggtatattataacaagttgcaagttatttggcttcataactgtagctacattatccaagttgttcctctgcactgacttttgaataccttttgttggtaagctttggtgaagccgagacaatcagccttgaactccttgaaactggacgaaccgctgctttagacattgtgggttgggactttgcagttctacttggagtaaattcatcgggactacaagctccatgttttgacaagccacttaccggaccagtacaggatcccgtgggtgttcgtgcaacgctgcccctcgcctgttaacaacaaatattcatatacgtaatgagattccacatagataaggattagatatatttctttgtcaaatgttactctgattacttcctagttcatatgtaaaggatttcatgaatttgggaacttactccgtcaaagtagccaacttttggcgatggcacacggagtcccgttggtttcatcatggaagcagaaggctttgggtcatcttggacaacagatacatctttagaattgttcagaggtttcaaagtctgtgttgtataatcagttggaggaccgttatcaccatggacacttttcttgttacctttagccattttattaggagtaaaagctcgcggtgattccgatgaccagtcaacactagaactaagacgtgatacattgaacttgtatgtcctaccggctgagacgggtggaactttaagctggtctatatttctagatccagcgctggattttggtctatttgccaaagaatgggaagctattcttaaactctgatctttcttctgctttactgaatgtatagaaggcttgttagaagcggttgacgaaacactgagacagctctcaatggaagagcaagaagatgttaattcattcttggaggcgactgaagaacgtaaagcagatttaaaaggcactacaggtgttgatacaatgggtcgaggtcttcttgaaattggaactctggaagccaaaggctctttacctgtataagatcacggtaagaagcagaagtaaagaaagaggtagtttgaaagacatctttaaaaaagagttgtgactaacccccagatgatttaggattcgtttcttgtttggctttgttagtatctaccgaagctctttttgttttgctgagtccactggatggcctgttgagtccagtggatggcctggaaatggatgtattgtgttcttctgaagcgacaggctatagaataacacaaacaaacaaccaaaaagagcttaatatcagcttgctttcactttaaattcattagtttagctcaacattttctatcactcttatcatgtcagatgctttaacaagacaagcacatatagagagagtcatcaacatacatgctttgtcgccttcgctaatccttgtgatctaatacctggccttttacgaataggattgggtttcatctgagaaaaaaatcaaaacaaagacatggttaatcagggagggggtgcaagattaatccatagcttaaagttgttttggcacttaccttttcctcagagctagggtcgtctagtgtacttgtagctacaaatttcaaatgagaaaagtaaaaaagatggtcattttgagattcatagataacggaaattaaataggtttcaatcatatacagtttcaaacagtacttcctatagtaaaatataaactaccatacagatcattagctagatacaatcaacgaaaatgatgggatcacttagaatctcaggatagatcacactagatgcgagctggctgaggagccataaagagaatcatacaatgtaaaagcttcatcatcaacaagatcttactagtgaccaaaagcacaacaacttgctagaaataagatatcatgttcaataaaaaaaaaaaccattctgctaaactaaagctctttctacaccaaaacaatagacagagatgcaaataaacagaaccttataaatccgcttatggaaacaaagcttacttgggctaggtactgcctctgttgatcccaagtccttacgcttgtcaggtgttgcagcatcacacataaaaaattcctgaccagtctccacagtgcagtcacttttcaatgtagacatagactctgttgatctatgcaaatcctcttgaaccgctggtaaacttttcctccccatcatgctagacagttcatccggttccaaaacacctaaatgcgccaacttatctcagcaaaactaactactactaaataacaaatccacagaacacagccactaaaaaaatacttgcctgcattggtgaaaaaggctttgtcccaagcaagacttttgcgtaggttagtcttcatgatcttatgaggctccttctcttctaaagtagtagagcccaaagtctcttcatcacaacaattatgtgtatctccaaataaacaaagacctctgtcttccttatcagtatctgaatccatcatcatcataaaaaaatctaatcaagctttaaaaaatctataaatccccacaatgaacaatcatgaaccaaatcacacaattcacaagtttcccaggaaaatcttcagctaacaatttccagaaattggagatggaaattgaaataacctgagaaatcaaaggtggtgggatcgagaaaggaagagaggaggaggttatcatcctcggcggagaaatcaatcagactaagcccattgatatcgtcgagctcgcttctccagttctccttctcttctcccatagacaaaccacacagattcaataagaagaaaaatcaaacaagctttatcgcataaaagatgaaagaatttgaaacgaagcaaatcggcggtttcttatttattaatatttaatcaattttctttgttaatttttgagtttttttttttgtcttaagtcttttgacagaagtgagcccgaaatgaacgtgatccgttgatttgtaaatttgtgaccgttggattattcccgttttttttgtagaaacgatatgttaaaaaagaatctctaatttggtttaacagataacgccgcgattacaacaactgtaaccaaataaacaacaataagcatctaattttgctttcgttactactaaaagactaaagataatgcaggcgatataaacataaaatctagggttcttactattttaggtaagggttgtttaacagattctggatcttactacgttatcgatggtgaacattttccaaataagtattcatttgttctcattcttgtatgaaatctttgttaaaatcagaattcattctttagaccggtgttgaaataatcaacaaaccaaatatataaatagactgactgacttgatgacatattcagaacaaatccaaggaaacaaaaacaaaacaaaacaatgagatgattatagtcacaagttctgcatagcaaaactcttacaacacaaataatatacagataagataacctcttttggtggaacataaccaaagttgaatactcctctcatactagtctgttcccggcattggaaccatcatatgctgctgagcctacaattataccgagtccaatgtcaaattagttcacagattttgaggtattcatagattataacataagtgatgctttacaagttttcaattcttaacaaattagaagagaatgatgcgtattgcttgagtgtgaagagaagagaggaaaagttacttgagagttcccataaggaccttggtgagcaagctgcgagaactgccaaatggtaaacaaaccccatgaatgtcagactaacttagctaaagcggaagagagaatacgtgcagatgaatgcgaagacgaaaaaatggtcaaaggcatgagatttgagacatatacctggccattttggcttgattgcccatctttctttgcatttggatccccaccttttgctgatccctttgtgtcaccctattgatcattgaaaaggataaggaaagcataaatagtttgatacataagttgacaaaaagagatgattcacggaagccataaagatcatagatcgttgcaagttttaggaatgaacaagaaatagaataagaagaaccactgacctccatctgtgatattccagttcacgtagtagagcaagaaaaggaaaaggagaaacagagtaagttagtgaaattcaaaaactctcttcacacaacagcataactaataaacatcgtactcagaacatacctctctatatctcatcaggtaaaccttgagaggttccatgtagtcttcaaatcctaaagtagccattgcccaaagcaaatcatctccattaatagtcttccttttctctctttgacatttatcactcgctctgctcatcaacgtcatagaaaaaccattgcatcatcaaatatgcaacatcaaagccaaacaaagatgaacaacaagaaagagtaaccaatgtaaggactaaaaaggcctcaactttcactagttaagaaaaacccaaaaatcactataaagtttaagacttgaaactaaaactcaaagttcctatcaagcctctaaacattcagcaagagcaaacacaacatagcattgttaaaaggttaaaaaagacatactcgctggtgacgaaactgatgaattcagagacacattcctgcacaatctccttagcatctttagcgattttcccattagcaggaagacctcttttcatgatacggcttatgttagcaatcggaagaaacctatcttgctcacgaacatgtaacgacctgggactttgatctccaccactctcatggcttccacagcctccgggactcttggcctgcgactccgccatctcagaaagaaaaaaaaaccctaactttacaacaattaacacaaaatagacaaaacccatcaacagaaaacgaagaaaatcagagacaaaacacatcctaataagatatgaaaaggggaaaattgaaatgaagcaatgaatcagagaagttgagagagaagattgatttaccagaagaattcgaaaaagggcgggagtgaaacagagaggtgtttgttgattggaggaagagaggaggcagagagggagagagatcgagagaagaggagagattgatcggacgcttgagaaaagaagagagatgacaacgtctgcgattgagagattaggttttcacttttatcagcaccgttcgttttttttttaatctctttatttattttctctctggttcatattctaccaaatccagaaacgccacgtgtattcattatctttaaccattaaggggaactttattattattcaatccctttatataagtttacttttattcatttttattaaattttgatttttgatacattttcttattgtatagtagggaaagtaatttttttttttcgaaaacttattagggttttaaaagttatttaagaattcaattaactataaacattttaaaatttacaaattttcctaaaatacaagaaataggtaaaatctataaacaattacgaaaatatttgtgatcattttaatatttttaaaacttctactattttatgaaaataaacagaaaacaataatttagagagaggaaatgtatctgagtcatattaaaatatttagtttcttaatacacaagctaagtacatatatctttcaaatataactattttccttgtaaaaaatgcatctatatcaaacacacttaaggcaataactaaagtcttcttttctcacttctttaccagcttcatttttgttaatcatatttatcaaagttaattaattatttttatatataggtattacgttttggatattaacattatatatatattaaaaaaatttaactaccaaaattatgttttgattgataacacaataatgacactaacacaatttactagattacacattataatcaacctattttttgtagggcatatttttgttctaaattattttttaagttttgctttaattttgcttaatttattattaaactttaaacattgattttttttatatgtataatattttttaaaaatattaaagcatatttttcgcctatgacatcaaaattagcacggctctagacaccagtagcaaaataggcatatgcaccgaatcaaagtatcagctctgctcttatgttacctcatgtttcttcttccgctcaatgaaaacaactacagatcgcgaggcggattatagcggattcggccgataggcttccctccttgtaatatgtatgtcggccatcctgtggtttcaaggttctcgggagcagcctcagtagtctctacgaagagattattgtaacctgcggaagctgaagatacaagacactggatgaagtcaatatcaccttcgatgttgttagagatgaggataatattggattctgtaggatagtccacaggagtgtccatttcccacaaaagaacgtctacatgtatgacatatggaagaaagagatcttactggagaaatcttcactcatggtttcgactgagatcacgatatagaattgggagagaagaaaagaaaaacatagagcaaaacggagaacgcgtgcataaacaaagataaaataaaaaatagatcacgcagtaatattgtcgacaccttgtgagcttacgctttggtccataggcggctttcctccatctaataggcttgtacaatcagatactgagcttgaagtaggaaacaccttttctgtatcatgaggctgtaccaagagaacattggactccactttctcagtatcagtatcatgtaccaagagaccattggactccactttctcagtatcagtatcctgtaccaagagaacattggactcttctttctcagtatctgtatagtcagtatcagtttcccagctagtacaagaagaagtatagtcaacaatttcttctataggcttttctccatttaaaaaccttgtacattcagatatggactctggagtatgaaatagcttttctaatggggcctcatcatcaggctgtaccaagagaacattgatcaaacttctcgattccaaagcccaaagaaccctgatcggcctccttgttttcaaggttttttttttgagattaccaacatattttttggcttataagcactgagaaaaacatcccatatcattaaatcaatgttttaaaaaaaatatagttatagattatagtgtttaaattcatgttctataattttagcgtaaattttttagaataacatgtatttatcagaattatgttttcaaaacgtaaaataaaagtgtacaccattcaagccctttattaacctactgtatcatgagaagtaactcgtgggtttggtttgaccactactaacacaactgcgcctgaatctcgaatgtgtcaataacctatagaacttatttctacgagagcataaacatcatcctatataatcagttgaaaatgtgaaaatcagttaaaagaaaacataatatatcacaatcccacataaatcaccgagttagtctgaaaacaataaaagaaaaacaaacaaactcgaagcacttcttgtaacctcgagtccaaaagaaagaaaaaaaagtagtgttaagctcaaaactaataactaaagaccagagacaatgtgaaaggtcaaaaacacaagcaagtaatgcatctgtacaaacaaagccgaatctactaccgagctgttggctgcaatactgattcatcaatggatacataactctgtgatccagccaggtcaagcattcccatgttgagcgaagacgaatgagccgagctcctggaaaactcgtctgatataccgcctcttgcagccaacgcttccttctcgatcctaatcgcgtcttggatatctttttgcacctcggacatcgaaggtctcatgttcccgtgcggtttcacacacagcaacgctttctccgcaatcttccacattgattggagactgtaatcatcttccgctagcgctggatcgatgatccctcggatgtccccgttgtctatatgcatcttagcctacaaaaaccgttaccaagcgataatttataaaccgttatgattccatattacatatatccaaacaaagcgtaaccacacaaaaaaaaagttgaactaacccattggactatgttccggcagttgacaccaaagctttcattcgatatggcttcttggccagacattagctcaagaagaatgactccgaagctatatacatcactcttctctgttaactgctgcgatatatagtacctttaacatcgaataaagaaaatatgtgagttcttgatattatgctagttttggtgaatctatctgaagttcttggtattagtttaagtcttagcttactcggggtcaagatatccaactgtgccacggacaatgctggagacatgtgaggtcccgtcaactgcgaatttcgacaaaccgaaatctgaaacctttgccctcatgtgtttgtcaagtaggatgttactagtcttgagatctctatgtatgattgctggaacacaccctgtgtgaagatactcgatccctacagaaacaatcaaaaccaacaaaatcaaatatcgaaaaaatggctttctgttttgttgtacaattcacggacctcgggctgcatcttcagctatctcaagccttttaatccaactgattctccggtcacgtggtaccacgcctgaaaataaatccacttgttatcataatgttaagccaaaaggctgaaatataccatcctatcataaaaagatatgttaccataaagatgctccttcaaagtcccattgtgcatgaactcatacacaagcatgttttttccctcttcttggcaataaccaagaaactgcacaaggttccgatgatgtatccttgagagtaatgtaacctgaaaaaaccataatcacttgtgttacttcctaagcaaaataaaataaaactagatacttaggcacatggttttagactaaggcagatttacctcgtttgcaaactctctctttccctgatatgaattatttgcaagaacctttacagcaatctctttcccctcccttgttttaccatagtatacgattccaaaacctcccgacccaattctcttttcgaatttttttgtggcttcctcgatctcataaagtgtgaagcaatgtgcagcgtctccatgagcttcactcaaggtagacgaaactctctgaatcggtaagggacgattcgttaactctgctgaaataaacccaagaaaaaaggtaagcatattcattcaaaatcaagatacactatgaaaccggtatacttgaagaaatataacatacccgaagtttttcccaacttgttattcttcttgcttttgcacatgacgatgcaagaaatgatggttgcaattagcagaacaaaagcaccaactgatgcaccgatgatgacaccgagcttcttgcctttatctccacttttttcaaggttaaggttcccagagaagctgaaggaagaagaatacatgtgttactgagaagatctagctaggaactattcatgcaaaagcagtttaaatccgacaatatacttactttgagatcacatctttggccaggtctgatggtattgttcctgttaacacattgttctgcaggtacctgcaatcataaagcaggttgggtgcataagaatgtagattaaaaggtcatccccaccacacaaattaatatatcaaactatcctttaaaaaaagcatacagttctttcaggtttgggagtttcgtcaacgaggaagggatctttccggttagtcggttgttctcgaggtgtctgccacagtccattatatatttatagttagatgaaggcaagaaaaaatatataaactccaaagaaagtgattttacattatctccaggtttggacaccgagagaaatccggtattggacccgtaaaagaattcccatcaagccatctgccattgacaaaagttgcaacatcagtaaagagaatatctctatataatcccaaattcaaaagtctaagaaataagtaacttacaactcaaccaaaccagtcaatttcaccaggtcagaaggtatatttcccgtcaagttcatactcgacagcttgctgcagaaagaatgaagcataacatagttgaaatatgcagacaaaaagacatattgcaaataaaggtactaagatagacttccttacatagcaacaacccttggttgtggatccgaattgcattgcacccatgaccacggtgagggtgaacaagggtcaccgccttcttgagcccattcagtggaagaatatagcgatgccacattagccataacagttgctgcaatacaagcaatcatcttagaatcaaatgtgaggccacaacactaagaggaggggctagttgtactcaccatctactgaaccatcgcttttccgcaaatatttgctgatctccatggcattcagaataggtcccctagaagaatcagccgttttggcaaatcgaaagtttagcacaaatggaagtgttatgttaggatagccaggtgcataaacgcgatacggtctctgtgtattttccttgatgttaacaaccgatttgctatactcaggctgctcaggtagaactaatctaaacttccttgactcatcctcagccaaatcctcgatttcagcaaagtatgtgaatgcccaaccaaaaccagggaagccatctaggttcattctgtaagttaaggacccgtttgttccaaccacagccgtctgcataaccttctgaggcggtctgtcatcgaccctgctttcgattggcaatgtagtcgacactcgcacagtcccagcagcaacatccacaagataattaggcttcttttgcaaatcagattcccatattctatcatacggatcatccgggtacctgcaataccaactcatttccttaactcatcctgataaatcacaatgctgaaacaacaaacagattatgaactgtatactgacctcacagaagcttcactttcagccccgaaatttatccgtgctgcaacactcaggtaaaaccggtcttcagatagcatcgaaccatacatcgaaccactcaactgcctaagctcaagagtagatataaacggctgtccagttgtggcatttgacaaacaaacactaacagtaggagaagaagccagaaacaccagttctgcagtttcgattatataggtttcagagataacaatggtcgcccaatgagtcgccccgagggagatatcgaatttgggatacacattgttgctgttgtcgaaattaccatacaagaaagtagctctaatgagatatctattcctactcgtgacattgagagtgtagcaatactttcttgaatcagcagggaaatgccttaaagtcgtgtactgagttcttgtttcgttaacggacgatatattagcggtttctccataaatgagatgattatcaggtgaccatttgagtccaagttcatcagtgaatggctctgcacctccacaatccaagctcacaaaacctgccttacccaaaaaaaaaaaaaagtttgattctttgtgttaccattccctttttccctacttcaatctaactaaacaaacatatatgagcataactacacacaaatctcaaacaccaccagctcttgagatttgttaacaaaagcctaaactttcaaaaatccttgttactactacatcacataaaaatagaatctttccaactatttcaacaaggaaacatcaaaaagtactcagaagcagtcaattacctggagcttgtgctgatgaagaagtgaagagacaagttgaaaccagtaaacacaacaaaagcagtgagattctcaccatctccagctcagaccaaacaaacacttcacacaagtttaacgcataaatggcgttacaaaataaaggaaccaaaaaaagctaaatgtgatcccaaaaaagtgaaaaaagtgaaatttccagaaacagaaccaaacagaccctaaaattacttatctttactatcaagagagatctaaagacccataaatggtttaaccaaacccaaaaacccaaaaagataataaaaatcaaaaaattggggaacgtgaggagatatgagtgtgtttcttcctcgttaagtgtttgctttttttatgtgagagaggaacagcttcaaagccagtggaggtaagtggtaaaggtacaattgttgggtccatcttcctagcctggactctacgtacatctaacggttcaattgctttacctttaaactcaatggtccagattcgttgtgttccacctttaacgtgttgtagtgaattccaccaccaagcagtctccagcgaaacggtgtcattttaatatatttctttttctttttgttcaacatttttaatatatttccggatttgaataaatgacattctctgcctctaagaatatttaagagctacatccacatgtttattgttttatgggaaattaataaataatatttttttcatccagattagatcatttcaatatagggaagtgattaaagtttgtatgaattttgttttttagtgatcaaagttctcttgttgatatacttttaaaactaaaataaacaggttaccttattaaacaatgaattcaggtatgaaatttgtaaattgatgatcacgataattttccttaattatctaattctaagatagtctaaccatgaatattcttataatatcttaactgtataggagattctattttcatccctaaattatattcgtaattttattcggatatacttgcttttattttcgtcaacagatatatatatatatatatatatatattatttatttttaattttcattaaaattagtgatttaattctctattatttgtgtactatataaaacaaacaaatgaatcttataatgtttgctttttcgtccataaatatttccgggaaaaatcgttagatataaatcgaacctagtggtgagtgactcacacacatgtgacaattcccaaaataagtcccccacgtacgctatgtctgttttagtgtgcatgtagtaactattatttactgatttagaatataactagcatttggcccctatttagggataacattgttttagattatatctgttacaacttttaactaaaaattttaaaataaagcagacagtattaatatacaacaaatttattatcattgatcgaagaatatacaaagattaagaaaaagatataaagaaggtacaacttttctacccaatgaatcaattgcgataggcaataactaacaaatcaagagtttagaaatataagagagtataagtacgaaaattatgctgggtatatacatgtccgcttatttcatcattagctccaaccaattgtaatgtgttcttcttctcatcatcagtaattcagtttacaaacattcgttgacacccaaagcttggaagtctaaaaaaaaatgtaaaatgtgcacaaataagtaactacatgacgcagacgctgcctttgaaacaatatcaaagatattgcagatataaagaagtaaaataagagatgactttaaaattgaagtatttgtattaatacaaaaatcttgcgtgaaaatacaattgcagtttaatacaaaaaagaaattgcagatataaagaagtaaaataagagatgaaagaagaatagtaaaaagtatgagaattaatttaccatcaaaaaaacacttgagcttcgattaagatattaaactcacccttgttttaaggcaactgttcagatgagaagccaaaatttgtcgttgttccttgagtgtttgtgagacgggagaatcataggcattgattgtattaaagaataatcctatggaaaaatggagatgtatgagagaaatcgaattcagtcaaataaagcagaaacaaagcaaaaaaaaaaaaaaaccatagaaatctagaagaaggatatatgattttcggatctatggaaaatttctatatatataaaacaaaattacaaacagaaatagaagatggtaaattggttcattgagatgaacaaagtacctgatttctgagtaatcgattaatgatgttgagaaacccatttttgagattttacacagtagtcatggagtttttggaagagagaaagtggagatgtggagatcgtggggatgaaagagaaaatcatttgagaaagaaacaaagttaaataaaaacgacacatactatgcgtaaaaatgaaaaaataaaaaatagtactaagctgatgtgtcaatcactgaatgcattagttattggaaaagtgactgctgatttagtatatttagattagagaaaataaatacttgtaatcatttttcttattagcaatgttgaagtgaaaaaaaaaagaagaaaaaagtgtatatttatcatactcatagtgggaaattgataattcaaaattgctgataaacgttatgaaagaaggtggaggatcaaagtggtaaaaagatcttgtagatatatatagctttaattaaaataacttaatgtaaataatgatcaaactaataatatccaaaatatctttatttaaaaaattgaactcatgcgaagaccgaagataggagacaccggtcaaacgtaaagaagagaacaatattatcgggttttgggagagtagtagacaaacttgagatctgagtgtttaactgttttatcttcttcctaaaacatcattgcatcggctaatgagcttttaaatcaatctcctcctcttctattgctttattataatggatatataatgcttcgtttgccttttccaatggcattttcttgttttttttttgtttactttcgtatcctagttatagtatcaatatgtttaaatgtttattttattttcccttaaactgtaatctttataaactttatattttgtacttagcaaactaaaaaaggttatattttgtcacgtaacaaaaacagcatgacaagattattaggtatgatctcattcccgtataattattaaggttaactttgatattatcatcttggataaatactttataaaagttgaaatacaagtcatatagaaattgattaaataatatatatctgaatgatgatctgtattatgggcaaatcaataatgggtcttattatgtatggacaaatgacgaattcctttatcgcctcctaatgtatggactttagcagactccaactttttgtactcagaaagataatattctcgttactatcttttttcctttatgacgactttttttaggtcgttctaatctaatgtaatgcatctcaaaagattgaccccagtggagatgtagtgatccttcctggccatttccatgtccttcgctaatcttctcaatttgattcggctctaatttacagcaaacgtttttgtcttttcagatagaaaataaatcttttcatctgtgattaaataataatgaagtgacaagtggtatttcatgaacgtcaaatcaatatcattggcaacatttgaagcataagtttacaatagttatatatatatatatgtatatattctgttttgtgaattttcggtttatgacaattttaatttctttgtgaagtttcggtttatgaaaattttgaattcttaaggtttttttataaaatgatattttagtcttgggtgttttagtccatttagttatttttaattaaaaaaaatggtgtgtggcttttgtaacaaacccatctaaaaaatagcccatagaatgaaagctagctctaactgaaccaagcccaatagactaagaactaaaagactaaaacagtacaaactatgacgaacgaattacaaggttgcatttgcataaggctatctttaggttctctaacgaatttttaataattataggttcaagattgtgacagcatgtggagcagagtagctatatataacatatatactataaagtagtacatgtatgataaggagtgtattgatacatgcacaactttatagttactatttagtttgttttcttaaatcaaacgtatatattcataccatcaccagtattagtctattaaagttgtacatatggtccaacgtttcatttaccaccaatctacaataataattacaaagtaaaatgtctagggcgtcattctaatctacttagaggtccgatatatgtcctaatcctacaaactttaaacaagtttaaggattctcattccactctttgttgggtgtcaaaagtttgtggacgacaataattttgagccatcgtctgaagagttagttactactcattgttggtagtataggtatatcttttttttttttttttctcgaatgattgaatccatcttctttctacatttccttaatgagaaatatgttgattaagttattgatataattcagtgacgtgtaccgaaattgattaggtttgggattttgttaagttgatgagtctgaaatggacagcaagaggaaggggtttggtgaaaatgtgaaagtgggaccaaataaggtctgaagaagaaaagagggtttggtgagacgagtggtgtccgatggatcctcgcgactgtggttgttgttgcccctttttcctccatttctctttgtttgtttggtggcctaattttagtctttccatttctccactttttaaatatatttttatgtaaatgatgacatcctaaaaactccactaaaataacaattttttcgaccaactaattcgcttaactactttaattatatatatgttttcatagagattgtcttttcccgacgataatctatcaaaatattcttttttaaaaactttttctatagttccacgtagaaatccttagatataagatatcaatcaaagtttccaagtcttttttctggtaaagagtaggaaaaactattaagatatcaatagatacgattgaccagattaattcatgtaatatatttgatgtacgtggttggtgtctcgatgaaagccattctgatttgagtctgctaaaaaaatgtatttaattatattggcccgccatgttctacaataaatgttttgcttatacagttaattatactatacttaccatttaccacattcttaaatattcaaaaaaaatattatcaatggaacctgtgtagcaagcaaatgaagcatccatgcatttaaagacgactccaactcaattcaaacttagcatatataacttatgtgaaaagcctataaataaaattcatgcttggatttctatatatatagcttagacgattgtaaagattgtaagatacgtaaacataacttaattactaattaaagtgattgaggattataattaggaaacttccctttaaaactgattctacctgacagaaatacaagccaaagtttgtaagtatatataaaatcaagaatattttttgttagaagtaagaatatataatgagtaaagtttgggaatcataattagaattcggatcggtcagcaatgaacaaaaaaaacaattcctggacaaaaaagaattatagtcttgtaaatttttgaacttccggaaactgtctttgtgaaaatattttaaatatatcgagaatgtttaaaacgttgcttgagtcgtgactcgtgatggcaacagctctctcatcaagcgctctcactcatgtatctttacattgaaacgacaagagaacaaattatcatgattttcatgcatggaacaaattcgattgtcattttgctttatgatttgatattttgaacaatactggtttactccaatccaaatgtagtatatgcgactaaaatagttgttcagtccaaaagataaagattgggagtggcaaatcaacgaccaaaaaggttgcttagtccctcaagtaacagaacaactggtggagaaaatggtatatatccttaatgagatccaaggaagagagaattaacgtcccagacacctccagcacccacataatccatggactctacgtccacttttagtctttctatccattttcgttcgatggtcggtttactagttttgaaaaaaacctttaaaacttatttattggataattattaaaaacaaaatataaaatttattggctcatgatttttgcaaaaaaattctctatgttttgttctcatttctcatttatacgatattaaaaattacttttcaatatgtcggccatcattaaattgcttcactctaatcccgtggccgtaaacgtttttctttcaagctagactccataacaactacgtgcatttaatttctcaagtataaaattttcatgttttcaaatagtacgatgtatttagtgattttatttatgtactttgttcattaaattagtcataattgttctgatttttaggggttttgatcgaacccttagatcaaaagttaccttaattgtttttttagctaagtactttattaaaaatttaatgtttagttctgattgagtagtactataaaggagacatgtgtcaatcttgtcaattggttttgagttcaacaatatgcaatattgcacatgcattaacgaccaaaagaagatgcaatgcacttaaatcattgaaactgattttgtttttgtagtgtataaaatatctatttaattaccaacgaaagaagtgagcttttaaaaacaaagagtcagaagatatatataactacaaaacctacagaagataagctggatttcaaaagaagagaaagagtaaaccaataaattgaccaaagcaaaatcggatatttgacataagtttccattcacattgacccaaatccaccagcatttcaaataaagttacttaatataatttttgtgtttataatatattccgcccactcttgccttcatttggaccttatcctaaaagtcaaaacaggtgaaaaaaatgagaatacaattaacacgaaaaatgcaaaagactgttaaaccgaaatcgaattctagtgtaatcaatccttttcccaatgatacaactataaatcaaaaagaaaaaatgtactgataaacgaaactaaacgtataaattaatatatttcttgacataaataggaggcttttgcctgctagtctgctacgatggaaggaaaaatgcatgcacacatgacacatgcaaaatgtttcaatgaagacgcattgcccaattaaccaacacaccacttcttccattccacccatattatttatttctaccattttctttaatttattgttttttctttgattcatacactgtttatgactattacattttccctttcgactaatattaacgcgtttaaaccaaagaatggatttgataatgaaattttattttattagcatatagataatggatggcttcatgcttggtttccatgacaaggaatgacacaagataattattttgaataaaatcataaatatgataatactagttgtaaaaaaacttgagtgtttcgtgtgttatttttcggtttcttgactttttatatttctcgtttttgtaattttaggatggattatttagcttgcttttctcttttattactttctaaaattttatttataaactcatttttaatatattgacaatcaataaatgagttatcttttaattaataaaaaatttgtaaactcttgtaaacagatcatagtcactaaaagctattataagttatttgtagctatatttttttatttcatgaacttaggataagatacgaaaatggaggttatatttacataaatgtcaccacattgcctttgtcatgcaaacggcgtgttgcgtcactcgcctcctattgggaatcttataatcgcgtgaatattattagagtttgcgatatttccacgtaatagttatctttcacaaattttatactcaattacaaaatcaacgaaaatgtacatttgtatctttaactatttacgttttttttacgtatcaactttcagttatatgttttggataatatatttttttacttttgacttttcagttttcacctaatgattgggatatacatatgcatgcatagttcccattatttaaatgtaagctaagtgcatatgaactgttagtcaaaattacgaagtttatttgtacatatatatagttataacaaaatggtacagtaaattaaacagaacatcaagaaagtacaaaagactgaacacaataatttacatgaaaacaaaacacttaaaaaatcatccgataaaatcgaaatgatatcccaaatgacaaaaataacaatatagaaaatacaaaaacaaaaacaaaatatgaaagagtgttatggtggggacgttaattgactcaattacgttcatacattatacacacctactcccatcacaatgaaacgctttactccaaaaaaaaaaaaaaaaccactcttcaaaaaatctcgtagtctcaccaaccgcgaaatgcaactatcgtcagccaccagccacgaccacttttaccaccgtgacgttgacgaaaaccaaagaaattcaccaccgtgttaaaatcaaattaaaaataactctctttttgcgacttaaaccaaatccacgaattataatctccaccactaaaatccatcactcactctccatctaacggtcatcattaattctcaaccaactccttctttctcactaattttcattttttctataatctttatatggaagaaaaaaagaaactagctatctctatacgcttacctaccaacaaacactaccaccttatttaaaccacccttcattcatctaattttcctcaggaacaaatacaattccttaaccaacaatattacaaataagctcctatcttctttctttcttttagagatcttgtaatctcctcttagttaatcttctattgtaaaactaagatcaaaagtctaaatggagattaacggggcacacaagagcaacggaggaggagtggacgctatgttatgcggcggagacatcaagacaaagaacatggtgatcaacgcggaggatcctctcaactggggagctgcagcggagcaaatgaaaggtagccatttggatgaagtgaagagaatggttgctgagtttaggaagccagttgtgaatcttggtggtgagactctgaccattggacaagtggctgcgatctcaactattggtaacagtgtgaaggtggagctatcggagacagctagagccggtgtgaatgctagtagtgattgggttatggagagtatgaacaaaggcactgatagttatggtgttactactggttttggtgctacttctcatcggagaaccaaaaacggtgtcgcacttcagaaggaacttattaggtattaatcatattcttttgtttctctaatcagaaacaattaaacttttaaaatgttagtatattcttaggtagaatacgtggctgttattagttggatgcagtatacatatggaaataggaaaaaatgtacggagttagtttgtttaatatttttccttttctagatttttttctctaattgtgattttttctttatcatccaattaattgaatttttcaaaattattattcaaaaaaaaaattacgatggtaaaaaaaacaatgaattttaaagttattaaaatcacggaaaacaattctataaaagttatgacgttgcatgggaaatatacgggttcgggtcaatttaagtggatcgggtcatattttcttgagtaattaaaagttaatgatttaatttaatgaaaaaattaataactaatcaacacgaaatttgaatgtttttgttcgttacagattccttaacgccggaatattcggaagcacgaaagaaacaagccacacattgccacactccgccacaagagccgccatgcttgtacgaatcaacactctcctccaaggattttccggtatccgatttgagattctcgaagcaattaccagtttcctcaacaacaacatcactccatctctccccctccgtggtacaatcaccgcctccggagatctcgttcctctctcctacatcgccggacttctcaccggtcgtcccaattccaaagctactggtcccaacggtgaagctttaacagcagaggaagctttcaaattagcaggaatcagctccggattctttgatctccagcctaaggaaggtctcgcgctagtcaatggcacggcggttggatctggaatggcgtcaatggtgttattcgaaacgaatgttctctctgttttggctgagattttgtcggcggttttcgcagaggtgatgagtggtaagcctgagttcaccgatcatctcactcacagacttaaacatcatcccggtcaaatcgaagcggcggcgataatggagcatatcctcgacggaagctcgtacatgaaattagctcagaagcttcacgagatggatccgttacagaaacctaaacaagatcgttacgctcttcgtacttctcctcaatggttaggtcctcaaatcgaagtgatccgttacgcaacgaaatcgatcgagcgtgagattaactccgtcaacgataatccgttgatcgatgtttcgaggaacaaggcgattcacggtggtaacttccaaggaacaccaatcggagtttcaatggataacacgagattggcgatagcagcgattggtaaactcatgtttgctcaattctcagagcttgtgaatgatttctacaacaatggtttaccctcgaatctaaccgcttcgaggaatccaagtttggattatggattcaagggagctgagattgcaatggcttcttattgttcagagcttcaatacttagctaatcctgtgactagccatgttcaatcagcagagcaacataaccaagatgtcaactctttgggactaatctcgtctcgcaaaacttctgaagctgttgatattctcaagctt

SEQ ID NO: 341 - DNA, 119001 bp, Arabidopsis thaliana
gaattctttaaagaaaaagggtcagttaaatttagaaaagttcctaaagctgaaactttaattcaaagccagttaatttgtttgtgtaacgttgaccgtttttatgattactttcagttgaaactttaaatgtataacgaaattcattcattttataaaaaaaaacaaaaatgctctatatgattttgtatggtaacttaattttcataaagcgaataaattattttaccgacaaagggggtgcaaaggtattagtaaaatacaagctcatctatttatgcatgtattgatgtatttagtacatacgaagcaaggaaaggttccacactttctatctgacatatgatattttctagtttaagtattcattcccgacaaataggaaagcttaatttaatttgactgagtgttaagtaagatgaggaagaaatctattattaaatatcatttctcatctttacctttagttaataaaaagttgattttttttaccgatctgaaagaaaaaaaacgattgatttgctattagtttcttcttttactgatatttttgaatgaagaaaacgaaatagcattttattgatactctaaaccaaataacgtattttggagatatatttcgaaaagttgatacctttaaatatattttttgtttttttataccatttcttatttttgtgtatgtagttatattcttacaaaattttaaaatcttttgaaaggacaccctacttaaaaattctatataggaaactatgattacccgggtaaaattcttgaatgcagaagacgttaaaatgaatgcgtaaccataaaaactagaaaaaggttgatatgattccgacaaaaatttcgaattatggctttcacaaaaaccatttaccgccttgaaccgaaaatagaacccccaaatttgttttttcccctacgaaccgacgctaaatccacaaattaaggaattagaaagtaaaaaaaaaaaaaaaaaaagagacaacaaaacaggaaagaaaagtgaagaacatggattttaaatggtcaaaagggaccagtcaaaggtcagaaagggacaaatccgttgtttagtagttatcataaagtgtcggacagttaataccgttgcttaaaagtcaaatctctttcatattttcacttatatcacactaattaatagttgtacaacttatattacccctcatcaaatcaaaccgttttcgttacaaagaatcagtccaatcgtattaattggggagagccaatgcttttattgaaacttttattttttggtcaacaactgaaacattgttgcttacgaaatttttcctgataccatattaacatatcacaccatgtatattatccaccactaaactcaacagttcatatacagaaatatttaagttaaattaaacatgtttaagaatttgattatgtcaatattaattacgatgttttagtgattattgatctcttaaagttatatatatacttaatataatgcgattagcgcgatcaaatatatcttttacaagataaaaaaaaagaagcaatttccatgaatattaatgtatgtaatatacatgtacgtaaagattcaattagtgaagacaaaggaggaagaaagaagctagtatgtaggcaagaagagtggtggaagtatgatggagaagaagcgcaaaaaggacattcatttgtttgtttgtttttttcttatgttttgaagagagttaattttgtcctttgtttttgggacattatcttacattcatttcaatgtcatcaacctttcggccgtctctataccccatttgctttattcattttaattattttcgttttaaacttatgatgttcatattgagcgcctacaattcaaaatatttagtcggacttgtatagaccatgtgaatcacgtagtttttgttttttggaaccacatactttaataaagttttttttttgacagattgatgaattgtggtatataatcagtcaaggagcgcgtaaatattgattcctactattgcatgtcaagtccctgttctgatagatacagtgcctacaaaagatatattgaattagataatagatacatgtagaatatgttcttttacacatgaaactgattgataagaaatatcgacaaatatttagaaaagcatgatcgacatcagtttgctacaagtatatggtgaaaaatgtcttgtaatggataatgaattttataggattcagcaaaggagcaaacattgaacatgttcatgtccaatgaatgaggttcacaagtcaaagagggtctacttgcgctgaccagttacaaagttgtggcccataactcacggcttggcatattcaaccctaactacttcatatttttcctagagacagaaacattttacgaaatttcccattactcttataaaatgtagtgtatttatatagttgtttcttttcattactatatagtttccttcaaattatcgacaagagaaatatatattctttatacattttctttggctcaattttttgtataaatatatcacgacacctttcctttatttatcacaatttactaatgatttcaccattacaatttaaaggatctcactttttggccttcttattattatacaaaatacattttaaactttttatgagactaatgagtaatttcttttaagtggagccccatgaagtaggaatcctacgtaaatgtttcatgctaaggtgtccaagaccggaccccgatagcctatgatgattaggagctttgttgaactatccttttaactgatttaattaaagtaaacaatgtatatatatatacacatacatatatataacaaaattcgtattttgttgtgagagattgtacttatggaacaagcttgggacgacattaacgttttgtgggtagcatcattaccaacagaacgacgtacgcctattggcgatggaagcaagtgaagccttcatcatcataattcataaactgcttccaaagtttatctttcacgtttctgcaaaataaaaatatattgcacgtttaatatctcactctatcttgacgtcaaattgtaaattatatacgaacaagacatgtttatgaattaaaaaatagttttctaaaatttccaagacatttcaatgttttgaaaattttagctgctgaattttgaatgatttttgtgaggatatttcgatgttttaattgatttggatgaagatattacctccaaaatcacttattttaacacttataatgttaaaattcttttaatgcaaaatcatttgtatccagacgtaccatctaaattcatatacagttgtcgacaaaaaaaaaaaaaaaaaattcatatacagtttgggcccaaacgaacaacatctaatacatttgctaagtttcatgtaagcagcatctaagtcataactcagaatactatgtcataggagacagaccaattgagcttaatggactaaatgtagaaaagcccattttcgtagtattcaatcgcaattactttctatccaaaaccggagagttttgacactatggttcattacattcaacatttgggctttgtgattacccaaattggaaccagctagttatttgatcaatggaattatacggctcacggctgaacgcaaagaatgatatcgttttgatggaacaaactggcaagatagtgttcattccacaaatagtattggttcggttttaaacattgcatgatttgagttttaaccggttttcaagtgtgttcatattcatttgagcagaggatcaaataaacagagaagcattaggaagaagagaccacgatatagagagaaaaaaaaattgaatcaaaaccaaagcgaagcagtcaatggcagcattcagacagacaagaacatggtctctccagtttctatcttaattatacgtttctcaaaaaaaaaaagaccattcctttacgaccttcttgcatccaaggcaacaaacataggcgaagctaagagcttagtaccgtctgaaactgccatcatctcacaaaccctctttacttcgaagcgcctgttacaatttcacaactccatacatcagtaatcaagtagtttagtgcgaaaagccaatctataagtacaatggttaatatcataccctccagaatatgcgtttttgagaataggaagtcatagattggtgctcaatattggcgccttggaggcctagcctcagcttccgagactctaatttgtctaccgtccaaatcctataggccacaagtaaaagtatatcaagagttgtttgatttgatcacaacaatgtaagtgtatattggtataagtatgagtacaaaagatacttacagcaccatccaaggacttgatggcattttggacctcttgagaagagtcgtatgtcacaaatccaaaacccttggatcgaccactgtccctgtcgtagatgactctggcctcaacaacctttccttgctccgagaacaaactctcaagagccatgtcatcaactccccaagagaggttacccacataaacacggtttcctgaaccagcaccagaaccaccacctcctccatatccagaacctgagcttccaaagctgctcctaggtcctctggagaaaccatcttccctctttggtggtgggggaccagcattgactctcaaaggtctaccatccaactcctacaaattcacatcaaaatggttaaccgaagcaaccaaaccctaatacaataagaacaacaacacagaggtccaagttttatctttagaagccacaagtttgaagattgcattcaaacacagcttatcacagaaacatagaacaacataaacacattaagcacacacaccaaaacacaaacgcataccaacaagataagataaagctagtcctcagtgaattcatattcaacaatcgaagatagagtaaggtagagaagtatattcttacatagccattgaactgctgagcagctgcctcaacttcagaaactgaagacatagtcacgaatccaaaacctctgcttcttcctgtaattttgtcatagattacctacaagacaaataacaaaaaaaggagtaatggtatcaatttatcaataaaaaccctaaaagaacaatactttcttctataactcacaaattggggaaaaccctaaatccatacctcaaccatctcaacatttccggcactctcaaagagctgagcgagctgagcactgtcaacgttgaaaggaaggttaccaacgaagagtttaaggtcagcagagaaagattgctcttttggcggagcgacgtcagcgaaaccatcttcttccacctcgaactctgaggtaatcgcaacgttacgggcgaagcgagaagcgggagagttccatttggcggcgatggagaaggaaacggagtcggaattgagtttaaaggagagggaaggagataagagggaaacggaggcaggtctggagacgccgaaaggaagagatttagggttgaaggaagagagagcgagagacgaagctgaagcagccatgggaagaagaagggataaggcttttaggggtttttgggtgaagaagatgattttgagagtggagataagatgcagtgtctttggtatttatggggcaaatgaataaatatattaagttctttgcacaaatatctcaaacttattttattttgtaattttacctcaaactattttttaggctcaatattctgatttctgttttttttgtaagaatttttattttctttgcaactatttgtttccacataaatgataggaattattttatttttcgcttgtttagtagtaatatacaaaaaatttaatacatgtcgcaaattgtttcgttttgcattttagtatgcttattgtatttacttttctaaatattttttgtgataaagttatgtgcttttctcacttaaattagttgtgtttggttgtgattttattgggacagtctactaactacttgtcataatatgaagtgtgatgatagatgagatgagatctggaccgtcgaattttggatggacagtggagatggcacgtctcatgctgaagctaaaaatctatgagaagataagatattttactaacagccaatggaagatgcaactcttgttccaaacacaaatcttcgaaaaaaatcttttacgtatttaacgttttcaagaggttaagaaactaaatcaggaacgatacaattcctaccaaaaagaaaacacagaatgatcatacaaacgcgtccttcaaaacaagtttcaaaaaaggatttatttggagaagataactgaagttgttgacttgacttgaaccaacaatgaaaggagaataacttaagaaagaatcactttgtcaagtttctatagagaaacattgttttgtttcttgattccttgtcccttcttgatcattctagaaagaacatcagcttgctttgtgttcccttcttggttcaagcttttgatcagttcatcagagctcttccaatctgttgaacttcctttctccatgatcttacaaagaactgagtacgcattcagagtcttcccagctcctaaaagcgcatccaacactttgtcgtagctcgaaaactctaagctgagatctctctccaacccgaaatctaacagcttcaatgctgcaatcgtcttccctttctcgcttaagacagataagaggctgtccagatcagctgtgtgtccgttttggttcagaagatctatacgccccagggcttcttctacgtgtcctctcattaagagggcttccaagatcttggcaatcaaatccatgttgtcttcgataccaacgtttttatctatcatgatcatcatcacacggcttgctgtctgcaccctaccatcctcgaacaaactctcaatcactgacctgaaaagcgatgagtctgggacatgcccgtcttcgaccatgctgtccagtgcggttttcgcgtctccaggctcacctttgctcatgtagctcttgatgagcagctcatatgcgtttgattctctagggacacctctcctcgacattatcttcagaatctcgtaactagagtctgggtttccttcctttgcatgaccacggattagattgtttaaggcatcttggtcttggacacctcttttcatcagctgcctgaaaagcacttctgcttttgccgtttggccattgttgcacaaatactcgattattgggttgtaagcgctgggctccatttccagagtatcctgatgcctcaatatgatttctttctcaataagcgtatctaaaagcttgatagcacgattgtatgcactagccttgcattggttctcaatcaaaaccccatagtgtcccgcctctgctggaacattcagtgtagccatggctttgagcacctcagtggctgccgccatatcccctgctttgctctgagacaccaaaagcttaagaaagatcgagttatcttttggagcaatgtgtttcgccatcatattcttcaagatattcttagcctccaccattttccctgcatcacacagaccaggcaacaacgtcgaatacgtagtagcattaggctcaataccagaagatctcatctcctcaaagattctcaacccatcatcaactcggtccaccgcaagatatcctttaatcatcgtggtgtaactcacaacactaggcccaatcttattccctttcatctccacaaacaacttctctgcctcatccatcttcttaaaccggcagaacccattgatcatagtattaaacgtagcatcatccggcgagatccctctagttttcatatcttcaaagaacctcagagcagtctctaacctcaaagacaaaaagaacccccacagcattagattataagtatgcctcgttggctcaacaccctcactaaccatcttattgaaataccgtttcgccatcatatacctaccacgcctcaaaatcaccttaaacaaactattatacgacttaatcgtcctctccacacccaaatccttcatcttctgaaagattttaacagactcttgaacaatcccagcttttccataactctcaataagcaccacaaacatatcctcatcccaaggaacacccttttcaggcatatccaataaaatacacctagcatgattaagcttcgaaacctctccaagcatcttaatcattttcatatgtgtatctctatcatgacgaatcaatccagatctctccgtccaccggaaaaattgaagagcatgctcaagtttcttagcaccgtgcaatacattatagactaaagaatgatcccattcaggtacaagatctcggattgagttctgtaaacgagtcgtccaagcacgattatccatcattctacatattgtatcctctagcttttcatggttttgacgcttacctcgttggaacctctctctgagtggtctcgtctctgtagaagtcagattcttcttcgtctcggattttgcatctggagattgggtttctgggtttgcgtttgctggagtttgggtttcttcgatggtgctgaatagacgagggagtgagaagagagatgagtttgatgatctgggaagcgagagataaaccctagcttttgattggtagcgtttagatctggaaatgaaagccattacaggaaatggaacctttgtctctgagtttttctgaaaattttcaattcgacatggaaggacaaaggaagcaagagtttttagtgatgagtagggttttagtttagggaagaaatggagtcctggatccaaatcttgttccgggtcgggtattttctgaacttgaacccggcctgttaagtgttactatccagcccggtttcgtgcataacagatgggcctagaatcgtatctagtgttgaccaacatgtaatttccacactgttatctataatttatttgtttttattaatgtttaaagttcttatgaggaataacaaacatgtataaagtaatttgaaatgtaaccttaaacaaatgttggatggtgataggagatgcctaagctgacatattttgtgggacttcaagatagtaatctatagtcttacctttgatcaactatgttatcatatcaatagagacaaaattgtttcgataactggattatgtgaatttgatgtacatctttatttggaaataaaaatatatatcttctagcaagggccacacttatccttcgctgatctcgactcataagtcataatgatcatcaaaaatcaagaaacaatgatcattactttcggtctacgacttgtctttttttctttccctacctatatatcaaatgtggtcgttgtgattgtggtaatggtgttttatggatttagttgagtatccgggcatagcagtgtcgttactgttttttaaatatctatttttcgattgcgattctttcaactcttcaagcacaacacgctttaaggatctcttcaacaggcgggtcatcaccggcttctttgtcctgaaatccgcaaacaaattgttgaaaacaacaatgtgtttgaaaagatatatcggtatactaggttcccaaatatgaggctagtttcacaatcaagattagacgaaagagattaccttgcgtatataagagatgttatctttcccagggccagcaactaagattccgccttgttgcctgcacaaggtccgtgacaatagttgttaagaaaaacggaaagtaatctcatcgatctctaaccagaaggaatgaatgattcatatactcttaaacttaccagccgcctctttcaactgtatctttcataaacgagagtttccagtcttggcggtatccttccatgtaagactctagtatcttcatagcagcctataataatgccacagaagctactgagagtctgagaccacaaaagcagaacattttggttacctaattataatatgctaagtagaagtcactctactttgggtgtaaatgtaacagaaacccctgaaacgaactcaagcgcctcgtatgatgcgtggtttggatccgcatagacctctgtattgagagaaagttgattacagataattagatcatctcataaaaggaactactcaccaggcttttttagtaatcaagagaaaacatacctcctttaaacttagtctgttccacaaaagtattagcctgcatacatagatggtcataacgtgagaagcagcagcttaaaactgcttacgcttacaaaaattgcgtattcaaaatgttgtttacctgatcgatgcttcccggtccgatcagaacaagagcaacaccagatgcatccatcacatcctaaacaaaaatctcaaaggtatcactcaatgacttcaattgtgtataaatggccaatctttttaaaccaaagatcattctgttaccttcttttctgcaagataagctgctcgtttccgacagagcacacatctgaaaacataacaagcaatcttagatagttacacatagtcataaaccagaatcatcaaatataatgagaaaattacccaaaatgacgagcaaatgcaacaacggccttcctatctttccataaatcagaaatcggaatctcatttcctctcaaatccaagactttcactgtatctagcgaatcagctgtacctttccctattccagctcctgtggagaatcaatataatctagtaagtaatctagaatctccgtattcaatataatatagaaagagaagacacttaagctcaccggaagaagctccggtaatggccgacacgaccacggcgctacgccggagagagacactacgaaagtgagatttgaccgaataaccaggaagtactgtccctaatccatgaatcgtcttcagcttcggctgcagagtaatggacgtgatcgtcgacgacgacgagagagcaatcgccattgttgcttccagagaaagctgaaaataataataatcccaatttaaaatcgaaatcgattttctcataccgttggttaatctcgtggagttgggttattacacgtgtcagatgatgtaaccatgatctcagagaaaaagtcacatgccacgtcagttaactttagggcaaaatgggaaaagaatctaaagagcatatgttcgtgcacgttcttgtttagggtaagctcaaagctcaagccgcttctatctctctacatttctctttctgcaatggcgagattagtgcgtgtggctagatcctcctccctctttggctttggtaaccgtttctactctacttcagccgaagctagccacgcgtcgtcgccttcgccgtttcttcacggcggcggagctagcagggttgctccgaaagatagaaatgttcagtgggtgtttttgggatgtcctggtgttggaaaaggaacttacgctagtagactatcaacccttctcggcgttcctcacatcgccaccggcgatctcgtccgtgaagagcttgcatcttctggacctctctctcaaaaggtgcgacctttttttttctttcccattttctgttactgtgattctgatggagattctcttctttgttcgattttggatccatatagtctgaaattgaatgtttagctaatcggactttcattattggatctgaaaatttccgtctatctctcgatagatctagtgagctaagtccatttgaaagtgtttctaactacatttgatcagtatcataacagatctattcatatatattaaagtcaatggctttgttttgtttgttatctgtatgcataattgttaaacaatctcttgttacttgatgcagctatcggagattgtaaatcagggaaaattggtttctgatgagatcattgtagacttattgtccaaaagacttgaggctggtgaagctagaggtgaatcagggtttatccttgatggctttcctcgtaccatgagacaagctgtaagtattattcgttttaagcaatttttgataatcaatctccattatcatttctaacagtggattgtcttttggttcaggaaatactgggagatgtaactgacatcgatttggtggtgaatttgaagcttcctgaggaagttttggttgacaaatgccttggaaggagaacatgtagtcaatgtggcaagggttttaatgtagctcacatcaacttaaagggtgagaatggaagacctggaattagtatggatccacttctccctccacatcaatgtatgtcaaagcttgtcactcgagctgatgatactgaagaggtggtgaaagcaaggcttcgtatatacaatgaaacggtaagcccctctattgtccttttccattgctagtttatgaacgatcaggtgttaattagtgcctttttgtatttttctatatgcagagccagcctcttgaagaatactaccgtaccaagggaaagcttatggagtttgacttacctggaggcatcccagagtcatggccaaggctattggaagctttaaggcttgacgattacgaggagaaacagtctgtcgcagcataagttcactatcaaatcccggtatttaaaattctttgcatgtggaatacatatgcgtaatcaattttgtgttggaaataaaagtaaaaagaaaaccttagattgtttttcacctcaatagaaataatcatacacacttgcgcaaactattatttttccaccagccggggattttggctccatgagagaaatatgatgtatcatgattgtttgagattgctagtgacattacaggaatgtatcaatacttctacaccacttgttatgcattgagtttaatcgttatgctcttgtgatatgttttttttggaaaatgtgatgaatgatgatattgcggctggccgagctggctggttaaagaactcaaccagacagtaaagtaaaacagccgcatagattaaacgggaacttataaccagctcttgactgtcctagcattggcggtgcgggatagaatcgttccttacatcatggaattgatgctctcattatcggtcattgtgtattacttgctctgttatttgttgtgatcaaaacctagcttctgttttacgtttgccgtctctgaatttttttttggtttttaactctccctacgtgagtatggatggtaaatacagattcaatttgaaatgctgaacgggacttggctcatagcaatctaaatcacagtgacaaacgtgtacttcgattgcctttgtgatggtcaatcaaagctgtaatgttgttggtttttgacgctaaccggaactaaactcctttcactgagaggtctcgatgagagaaatcattgtcatgaacgaaataatttaaaacatgatttaagattacagaaaatgcctaacgcaaaattattgacgaatcacaaggcaaggaagaagtagagaggagagttgataagaaaagagaaatcttcatagaaactaaaactgtgtacaagtgtttatatacattgattaagcttcaacaatcttcttaattaaccacattgattagcttcaacaatcttcttaactaacctaacatattagttagacaattaataatgtcaactccaatatttgttgaaactccaatattgttataaattgcaagctaacaaagtaacaattgataggtttaataaatattttcgtcaaatgatcattgggtagtggtatttaataatattttattaactcatgtagtgaaaagtattggacaagatgactgaattttcttcgtctcttatctaacagaggtgtaaccgaaataaaccgaattcaatttggttgggttgagttaaaataaaataagttggtacagttcagttcacgtgtttacttcgaacagaacaggctcgtgcgcgtgtcaacaaccaataagttcttttggtcgctgtagtcttcaactaaaaccaaacgacaccgttccttgtggccgcgttttccaactaactttcaacttcaactaacgttcaacgagtgtccatctcctctatctctctttttccttttcattggcttcttcatcactatagagactaaaactgaccttgatccatccaacgttccctatactgacacgtgtatccatcacagtgtcggctaaagctcaaggaactcataccaagaaatacatcatcatctctcaataatcacaaaccggatccggatcaatttggatccatcagattttcttcgttccctaactcctaaaaaggagagattcttcaaatccttatcacaacttcagtttttgcattcaccgtcgtgagtgttctacttttggtaatgattcactagtcaagtttctttctttatgctataacttgcaactagatcttgtactaatggaattgatgtttctccaatcatcttctttgattttgctccatctttcttttcctaatttggaaaaatgagtctttacctatagaatctgataaatatgtctcttacataattgattaaggtcaagtaatggaggtgaatgatggtgaaagagtggtaatagcaaaaccagttgcctcaagaccttcttcaagttctggcttcaggacattcactgagcttcttactgattcagttaccgtatctccgcaaacgacttgccacgagattgtagacgctgctataagaccaaagactttgagattcaatcagccagtagcagcttcggtctcatgtccacgggtatcgagttgtctatttaattcttcgcattgttatcttctttccgcatcctctagtcttgactcaactatttctgataatgataggctgaagtaaaaggtattggaaatggaatgtcttgtgatgatgattcagatagcagaaactacgtcgtttataaaccgaaagcaaagcttgtctccaaagcaaccgtctctgcattggctaatatggtaagttgattttaaagctaacaaggtcactgactttcgaatgttgtttaattctgttttctttagcttcaggggaatcgtcaacaaacttggagacaaagcgaagcagtatcctatgggaagagtgtgagccaaggtacacatcgagcaggtcctaatctagtccagaaagttccatcttttacggaatcagagacatctactggggatagatcttctgtggatggatacaactggaggaaatacggacagaagcaagttaaaggaagtgagtgtccaaggagttattacaaatgcacacacccgaaatgtccggtgaagaagaaagtagagagatcagtggaaggtcaagtttcagagattgtgtatcaaggtgaacataatcactcaaagccatcttgtcctcttccacggcgtgcttcatcatcaatctcttcagggtttcaaaaaccaccaaaatcgattgcttctgaaggatcaatgggacaagaccctaacaataatctctattctcctctatggaacaatcaaagcaatgactctactcaaaacagaacagagaagatgagtgaaggttgtgttattacaccatttgagtttgctgttccaagatcgacaaattcaaatcccggaacttcagattccggttgcaagagtagccaatgtgatgaaggagagcttgatgatccaagcagaagcaaaagaaggtaagattgtttcaaactcttaacttctgcaattttgtttacattgcttgtattgactttgtgtttgataacaggaagaacgagaagcaatctagtgaagcaggagtatcgcaaggctcagtggaatcagacagtcttgaagatggattcaggtggagaaagtatggacaaaaagtggtaggaggcaatgcgtatccaagaagttattacagatgcacaagtgctaattgcagagcaaggaaacatgttgaacgagcgagtgatgatccaagagctttcattacaacctacgagggtaaacataatcatcatttgctcttgagccctccatcttcctctactcttccctttaactccccacaactttctaagcaaacaatttgatttgatgatccattcatgctttttcttttttctttttctttttttgttaagaatgagaaaaaagaagaagcaaatggtaaatacaatcaccatttgctcttcactcacaacttcctaagcaaaagccatttgatcaattcatgcctgtttcttcaatctttataccacattagttaattaatcgtgtgaatttatttgtttttacattaagattgtaaggacaagaagattgatgttattttaacaaatccaaataaaaacgtgtgttatattttttaggggtaactttcttcaatatgtttagtttatcgaacttgagaaatttgacttcatgggaccatttcttttctgttcacgttgctaaacataatgcaatttccatcggtgtaactcaattacattggtggtctatcgaaatcctctagatctcagtaaccacgttggtattgtactacctttccaaggaacataagataaactcataagcttaatgagttatctatccgatacttgtttacattttcgcggcgtgagtcgaagggagaaagaatcacatgtcaagatcacgccttgtatatcttgtccgtaggattgaaaggcgggtcatgtctcggaattgagaagcccttaaccacccgacttgagccatgtgggcatatacacatgatttgccatccagaaatgctacttacggtatggacaccattgagcccaaatgcctttaaatgcaatgtacatggtgcttggaagactgacagggaaattagaggcattggttgtgtccttagagactcaaaatagattgtttgagttatctgaaatttttcatggctccatctacatcttttatcttggagtagcagcaaattggaaaccatataactaccatgatttatagcactttaaactgaaaaatatatagatgaaataattttaaatatgaaaccgtttgatgatcaagatcccaagtcgattataagcgtcaaaatttcattaaagatagagagatcatctgaaacatatccaaagctaatggaaacaacacaaaaactctttgatataatgcaaacttagaggaaagggagatcccttaacgattggccttagcaactctctcaatctcatctttcttcttgatggcatagctgcaagacaagagaagatgctattattagcttaactaactaacaataaagtgaagccatcaagagacagactatgtagatagagtgttcttacctgttggaagatccctttgcagcattgatgagttcatcagcaaggcactcagcgattgtcttgatgtttctaaaggcagcttcacgtgcaccagttgtaagcaagaagatcgcttggttcacacgtcttagaggagagatatcaacagcctgcctcctaaccacaccagcagatccaatcctggtagcatcttcacgtggaccactaattcacataaagaacaaaccttcttaattagattcagttcatagtaacaagcacgcaagaattttacaggtttcagtatagcaatcttaatatacctgttaacaatggcatcaatgataacttgaatcgggttcaagtcagacaagaggtggataatctccatggcatgcttgacgatcctgacagccatcaacttcttaccattgtttcttccgtgcatcatgagagagttagtgagcctctcaacaattgggcactgcgcctttctgaacctcttcacagagtatcgtccagcagtatggggaacaaaagttgcgtgcttcgatggctgaacaccaatgtagtccacaagactaatatccgtaacctacataacaccaatatgcagatcaaaaacaaatattagcacaccaatcatataaaacacaaaaaatacatgacctttagtgtcaaattagtgttataatcaaaacaaacacaacatgggtttcagtgaagacggacaaagattataatagctaagatctagtaagtgactaagtgaggactataatttgatataattcacacaataaagctaatgtaactactcatatcaatataaaccaatcatttcaatgtctatcatacagctaaataagaattagatcctagacaattctcaagtgtctaaagagatattctaagagaagggattggtgaggaatataccgaaacgtcatcaaagctccaacggttgaagagcttaacctcattggtaagctgctgttgaatctcagcgtcgatttctgcggaggcggccatgactggaggatcaatagaagattagtaaaaacccgtaaataggaaattagaaaatgaaaaaacaggaatcagagaatggacctgaaactctataagtgtcgagagaagtagggatctttagccgcggcttgaagaagaagaagagaaggaagctcaagcaatgaagaataaaccctaaaaatgagtgttagtaatgttctgtttataaaatgggttttattgggcttatgttgggcttttgtgttttgttttagtttagtttctctccgaattggacacagtttggctattgggttgtatttatgttgagagactgactagattaggttttatcttttcttggcaatagttgaagatacggttttatcttttgtctacataaatcatcatacgttgcatcgaacaaagttctcaaaatgcttaccaacttgatttacaagtgacattttattattcttaagaacatgaagaatacattcttctttgtaatgatgaccatacagtcatcttttttcttttctgtctcaaccatccatcatactttattagtactaatttatattactattatatgaaaagaaaaacacgcatcaattaagccctaaatatcggctttgacgtgcgtcgtagtgactttaattattacaaggagcatattagcgactagcgactatccaaagtatgagcttcagaactaactttttattacaaaatacataattatcgtttatgatttcaatgtgtaaactgtgatatgaatctttttaatatttgataaaataaaagaaaagtcgcagagtgggaaggatataataatttttttcatttttatttcttactgcacgtgggaattaagaaactacacaagttttccaacttattaagctattagtcaacttcttaaaaatataagtcttactttattggttgaattgaacgacatgtgtattgctactttaacttattcgagttgttaattttttttttttatcatcatcattcgagttgtttaattgtttaatcacaaaaaattaaaatggaaaattacctaaaaaaacattatattatgttgttgagaatattgatagttagtatgcaacaattcttttagtaagatcatgatgttattacctttaccttctaccacctaactgtttgaaaacacattttactcaattcatatattatattttacacatatacataagaaggagacaaatgcatatttcttaattgatttctgagcatttcaacagagagacaaagaacatagggacccgttgaggcatggctcctttgggtgtagaagaagagcaatagttactgtgagtggagcttgcagagattggaaaaaaacatgggatccagttttaggagcagttcttcaagaaacgagcatgaggatggtggtgatgaagcagaacatgctctgcaatgggctgagatccagagattgccaacttttaaacggctgagatcgtctctggtcgacaaatatggtgaaggtacggagaaagggaaaaaggttgttgatgtcaccaagcttggagccatggaacgtcatttgatgattgagaagctgatcaaacacattgagaatgataatctcaaacttctcaagaaaatcagaagaagaatggagaggtgaggttgatagtgaatactgaatatgcttcttgaaagtatgagacttgaacttgaaaaaatctgcagggttggtgtggagtttccaagcatagaggtgaggtatgagcacttaggtgttgaagcagcgtgtgaggtcgttgaagggaaggcacttccaactttatggaactctttgaagcacgttttcttagtgagtatactcaagaatgtaatgcagatgaaagcttgattgtagctggtgttgaattctactttttttttttcttcaggacttgttaaagctgagtggtgtaagaacaaacgaagcgaatataaaaatacttaccgatgttagcggtatcattagcccgggaaggttagttgcaagaggtactttcttttgatccaagcttttgagctaatgtatgttattgtttttacaaggttaacactgttgcttggtcctcctggatgtggcaaaactactctgcttaaggctttgtctggaaatttggaaaacaatcttaaggttttagatattttctcttttggatgctttttgctgcagatgtgtgaatcatgtctcctttttttctctctcttttattttccacagtgttatggtgaaatctcctacaatggacatggactgaacgaggttgttcctcagaaaacatcggcatatataagtcaacatgatctgcacattgcagagatgactacaagggagacaattgacttctcagctcgttgtcaaggtgtcggtagccgaacaggtaggtgtcttcataaaccaatggtctatctgaagcatttttttaaactatttttgtgacaaaaatatctctctgctgaaacagatattatgatggaggtcagtaaaagagaaaaggatggtggaatcattcctgacccagaaatagatgcttacatgaaggtatgcactcctgaagcttacgttgaaaactgatctttgaactatgtcaattagttataaccttttgtaatctcattgtgcaggcaatatcagtcaaaggacttaaaaggagtctgcaaacagactacattttgaaggtatagtttctttctctggtacatttcagatttctagtctttgattagcttcttacttgcgtcttgtactacatttccagattctggggcttgacatttgtgcagaaacattggttggcaatgcgatgaaaagaggcatatctgggggacaaaagaagcgtcttactacaggttggttcatagctaagaatcctgtaaaactggtcattttttgttggtatggcatgttttctaaaaaactatgtttgcagctgaaatgatagttggtccaaccaaagctctgttcatggatgaaataacaaacggcttagacagttccacagcgtttcagattatcaagtctcttcagcaagtagctcacattaccaacgcaactgtgtttgtttcccttctacaacctgctccagaatcatatgacctctttgatgatattgtgctgatggctgaaggaaaaattgtgtaccacggtccacgcgacgatgtcttgaaattcttcgaagaatgtggttttcaatgcccagaaaggaaaggtgttgcagacttcctccaggaggtaattaaaaagctaaaaactctgtttcttgacattgaacgttatttgatcccatggtcctgatcttgttttgctttgtaggttatttctaagaaggaccaaggacagtactggctgcaccagaacttacctcacagctttgtctcagtagacactttgtcgaagagattcaaagacttagagattgggagaaagattgaggaagctctctctaagccatatgatatatcaaaaactcacaaggatgctctttccttcaatgtttattctcttccaaagtgggaactattcagagcatgcatctcaagagagtttcttctcatgaagagaaactatttcgtctaccttttcaagacgtttcaggtacattgttcttcctatttgcagatatctatttcttttggtctagtgttaatactaaagaatcttatattgctcagcttgttttagccgcaatcatcacaatgacagtgtttattcgaacaaggatggacatagatatcattcatggaaattcttacatgagttgtctcttttttgcaactgttgtacttctggttgatggtattccagagctgtctatgactgttcaacgcctttccgtgttctacaagcagaagcaactctgtttctatccagcttgggcttatgcaatccctgcaactgtgttaaagatccccctctccttctttgaatctctcgtttggacctgccttacttactatgtcatcggatatactcctgaaccttaccggtgagagcttgaaaccctctcttgcttgctccaagcctgagaatgacagaaaaatgtaatgtaatgatctatgatgtttcaggttcttccggcaattcatgattctctttgctgttcacttcacatcgatatccatgtttcggtgtatagctgcaatctttcaaacaggagttgctgcaatgacagctggtagctttgtcatgttaatcacctttgtatttgccggttttgccatcccatatagtaagatttctttttgctcttctcttttgagttctgttccaaaagctccactaaaatatgacagcggtttggtgcagccgatatgccggggtggttgaagtgggggttttgggtaaaccctataagttatgctgagattggactctctgtaaacgagtttcttgctccacggtggcagaaagtgactctctcttcccttgcttgtttctcttaatcatccaatatctcttcattctccaaaactgacttaataggtttttgggttatgtttgtagatgcaacccacaaatgtcaccttgggacgcaccatacttgaaagcagaggactaaactatgatgattacatgtactgggtctcactatctgccttgttgggtcttactattatcttcaacaccattttcactctagctctgagtttcttgaaatgtaagttaaaatatcaacaaatgtaagaactaaaacaaaagcacattactgaagagcttctttaatacttgacagctcccacgtcatctcgtccaatgatttctcaagataagctctctgagctgcaaggaacaaaagattcatcagtcaagaagaacaagccactagattcctcaataaagacaaacgaggatccaggtgaaatatattgtctttctttctactcacacaaattctttcttctccatttccctcaacctaataatgtctttgcggatcaacagggaaaatgatcttaccttttaagccactgaccataacatttcaagacttgaactattacgtcgatgttcctgtggtaaaagcttctgttcgttcttggttaacaaaaaaccattttaactgcattaaccatcaaagtgtgtaatctcattctcaggagatgaaaggtcaagggtacaatgagaagaagttgcagcttctctcagagatcaccggagcttttaggcctggtgttctaacagcgttgatgggaatcagtggagccggaaaaaccactttactcgacgttctagccggaagaaaaacaagcggatacatagaaggcgagatcagaattagtggtttccttaaagtccaagaaacattcgcaagagtctcaggctactgtgaacaaacggatatacactcaccaagcatcacagtcgaagaatccctaatttactccgcttggctccgtctagttccagaaatcaatcctcaaaccaaaatcgtaagccctaattctacagagcatcaaaactgtgacctagaaatcgaaataaagaaatcacttgtgaaaattcgtgcagagatttgtgaagcaagttctggagaccatcgagcttgaggagatcaaagatgcgttggtgggagtggcgggagtgagcggattatcgacggagcagaggaagcggttaacagtagcggtggagttggtggcgaatccgtcgattatattcatggacgagccaacgactgggttggacgcaagagcagccgccattgtaatgagagctgtgaagaatgttgctgagactggacgaaccattgtctgcactattcatcagcctagcatccacatctttgaggccttcgacgaggttcgaatttcgaaattttacaatttctataacgaaacatttataaatatatactagtcatatcataatgttttctgtttcagttggttcttctgaagagaggtggtcgcatgatttatagcggaccacttggacaacattcatcttgtgtcattgagtattttcaggttagctttctgcacaagtaataaaaagtaattagggtttgattgttttataagtaacctatttattttgttggtggtgaataacagaatattcctggagttgctaagatcagagacaagtacaatccagcaacatggatgctagaggtgacttcagagtctgtagagactgaactcgacatggatttcgcaaaaatctacaacgaatcggatctttacaagtgagtagagtataactcatttatggctaggtttgtgttagctttatgaacgtgactaatgagctcatgtgttgttgtttcttcaggaacaactccgagcttgttaaagagctgagcaaaccggatcacgggtcaagcgatttgcatttcaaaagaacttttgcgcagaattggtgggaacagtttaaatcttgtctatggaagatgagtttgtcttactggagaagcccttcttacaacttgatgcgtatcggtcacactttcatctcttctttcatctttggtctactcttctggaatcaagggaaaaagatgtaagttaccttaaagtccatccaaatcatttcgagtttcattgtactttcttagtaatccacttcttttcgcagagatacgcaacagaatttgttcacagttctcggggcgatttatggtcttgttctcttcgtggggataaacaactgcacttcagctttacagtattttgagacagagcgtaatgttatgtaccgcgaaagatttgcaggaatgtactctgcgtttgcctatgcattggctcaagttgtgactgagataccttacatattcatccaaagtgcagagtttgtgatcgtaatatatcctatgattggtttctacgcgtctttctctaaagtgttttggagtctctatgcaatgttctgcaacttactctgcttcaactacctcgcaatgttcctcatctccatcactccaaacttcatggtcgcagctattctccagtctcttttcttcacgacattcaacattttcgccggattcttgatcccaaaacccgtaagatcttttgaacaagtcatcatcatcatctttaacttattacatactttataatgttttcttgatgtccaaaaatgcagcaaatcccaaagtggtgggtctggttttactatataaccccaacctcatggacgctcaacctttttttctcgtctcaatatggcgatattcatcaaaagatcaatgcatttggagaaaccaagacggttgccagtttcttagaggactatttcggattccatcatgatcgtttgatgattacagccattattctcattgcatttccaattgcattggctactatgtatgctttctttgttgccaaactcaactttcaaaaacgatgatcaatcaaattcacacaccaacacaatcttttccttatacattgtcaaaaacttgtataaccaaaagctactatcaaaatgtttccaatatgaattctattgagttaattgtaaaatgtgcacagtttttaactactctaataataattggtcaagagaattgagtaaacctttgcttcgtttttagagatttcaggtatcaagctactgaagatggaagccttgaggaaaacagcttagaatgacttcatcataaaaatagttctgacaaagcattagcctcttaacctgtatttaagtctcccagctcttcattaatgacagagagacaatgcaagaagatcttaagcagcttcaagatcctaagaacattttcaagaatctgaaaaagatttttaagactctataaacacctctaggtagttgcagagaactcatggaaagtgtatgttttgcatttgactctatcaaggtttgaaaattacctaaatgttttgcagttatgactctttatcagctagcgtcttgtctccggatctaaaagatcttcggatttgttttcttttgatagattaacgctttcttttgatggagatttggcttcagatgctgcattactagtattatcaacatttgattcctctgtttgttttgcctgttactttaaaacattacattagtaatgaagcttagttcataacattataagctcgatggcggtaagtacttcaccttgttcctgtcgcgccagccaagcccaaatgataggaagcctgtcttctttttaggactctccgttgtagtacgagtaaacctatacaacgttgaaaaggaaacaagataagaatgttatatagaaatataagagagttatgtagggtaatgtaagattctgtttttgatatattgccaagttttggagaaactatacagatcaaagcagcagccaaagaaacaaaaaaagataggagatgagttttgatgtatgtaccttggagatgatgatagtgctttattttgaccggattcatattgcaaagtagcttcgagtgttgtttctgctgtaactagtttcttctccatttgagcgagttgagtcacaagcttctcattcttttcctgtttaattaagtgtttccacaaaggatcatcaagctaaaatcaaagatgctgatctctgcttggatgttttatctttacttaagaagtaaatatcttagaagatacaaagtaagaagatgaccaaatcagtacctgaagcacatgtactgcatatctttgtgcagctgcatcctgctctgcatttatccgggcatcttctgttagcttttggtcttgctcaactttcatcaacacctgaagcattgctgtttcttgttctttcttgtcagaaaggacttgctttagttctcttacatccctttccagttgttcaatctgtaaaatttaaggttcactttttagtttaatcaaaactatacattcttagtcaatatgcacccaaaaaaacaatctatgagccttcctcgatgagctaataacactgtttgaaggaagtttaaatatacccgtgcacttaattccagtctgttatcttctttgaccatctccatcaaagctatctccagctcctcagctctgtagagagtaataacacatattaggatcagttatttaagtttctcaggacttgagaaatggaaggtgaagtagagtaacaataacctcatcaccgctgatcttttctcctccaacagtctgcatagttcaaccttcatccataccacctgcacaataactgttatcgatgaaacttaaagagagttgcatattcctcatacttaataaactactcaagaaatttgttgatagaagcatatggttctctgttattttcatccctcaaaacataatcaaaagagtaagtcacctgttcttgaagatctggtaaagaatctacttcggaatcaacatttgcaccatcaagattcagaaaaggcgaacaagattcatcatcatcatcttgattctcaccatcattcctttgagtagacttttgttcatgatctaagatagaaccttcatgtttaaagctatataacttagaagccaatccctttttgtccttccatactcgacccttttgtattcgttcctcgacaatctctagtaccgcgggtctatgtattttcctcagctcctctagtctagcttcatttgtcgatatataacccatgcatgcagtcaaaacaagttgactactatcaaatgttgaactagcaagactttgtagtgaagtaatagcatctcctgcatcttttgttgcaacaattgcaggacctaaggaaatacaaagagtgactgaaaattttgtttcctttgaaccacaaagctaattcaatcatcacacacttgatacatacaaaagttctatcagcaaaataccatatagttccattatagcaaatgctgttctgaacaacactacacggtttccttcaaagagaagcacatcccacatccgcagaactggactcaaaaacaacaagattgaaaatacaacttcagctaagaaaaggaaaataaagacttcctatgtccttcctttgacataacataagaactcaccgcattcccaaggaataatgttgacaaaaatagataggaaccatgggccagagatccatgcaacctgcactcccaagtaatccagatgattaactgcatcaggaggattattggaatagaagaaacgatcacattgctctgtataagggagaaaaatatgaagagaaacttgaatatcagatgaaaataacgaaccgagctttggaaatctttcgcgcatcaactcttcaaagactagttgatcaacctaagagaagtagattcacaatggtcactttctagaaatgttgtaagaaaaagaaataatcagaagccttttggatgaactgttacctgagattctatcatttcttcagtatagtagccatcaaaataatcatcaattatcccaaccaaagtcctgagacatttcagttacacaaaaaaatcagctcataccaatgcatgttagggttcaaagacagagaaaacagctttatcactctaccaaaatgcattttcctctggcatcaacagaagcaacagtccagcaaaaaagttcatagcctgcaaattttacaggatcattgttagcttagccttgaaacaattgtaacaactattaatgctattgggtactcaaatatgcttttcctagcccaagtcacctgacagtagccaacagatgggttgtgacaagcataagctagaagtatccgccttaacgaatctcgaccattttcattcaaagcaggatggcctgggaatgtccgaggtatatcctgttatagatcatgatggcaataagaaaacgttccagattcaaaagactgagtcatgaccaaagtataaacatgcatttatctaatcaaaaccttttcaatttgttttttccactttctttggacatcagatgagttttcatcagagttagttatttgagccaacaaatcctgatagtatctctcaactcttcttgcttttacacctacgaaggcttgccaaacctgtaaatgcaaaagttaggcaagaaaagtgaaaatttattccaatgagataagttagtatgaactttacctctcctctaagatcctttggcactcccaaacgaacaagtacctcaagttcttcataccaagggaaaaatggctctggagaaacactaccctgagcttcgttttcttcctttatcgaatgggatctacttgtggaagtctcactgtcacggtcattttccccagattcttcaatggaagacagcgattcttttatcgatgaagcatggtcatctactatattcttctgaccatttttagtagactttacgttcttaacacgagaacacatcatatcctctatggacgcaagacaaggtctaatatgagcccattctataactgaacgaggagccttggtttctttttgtgctttttcttcatgtcccgattcacatttatcttcttctgccacaagcttttcttcttgttgaatgtgtacatgatccacaggttcttttactgcttgagattgttgttcttcatccgattcactttcacttccgacagatgattctttatccttatcagattcaaatttctcctcctcctcatcttttacagattctgtgtcgcttctaagactcttgtcaagaaccagtgcctcctcggctggttctgtctcttttgaaacatcaccaactgtttcagtcctatcttgttcaagttgctgctcacttgtaccactaagttcacaatcttcatgtttcccatttcttgaaccctcctctgattctgaatcactatcctctccagattccaaaccatcagcctgaaatgtatcctgaaactcctcatctgaggaacaaggttcagcggttctgtcttcttgtcggtcaagaaagtttttccatttctctgccctctctgtctcttcctcctattccagtagtattcaatttagtaacacaaaaaatacatttgatttgataaacagaagcaattttggacatgacatacatgaattctaataatgcaatcatagctaatatatgaaaaaaaattcaactactaaattatctgagaaaaagcaaatgaagcatgatcaagaagaactcactgtatagatgctaaggtattcttgatatctctgaacgtgttgaggtctcaaggcaaatccataggcgtccctgcaaatcaaaattcatcaaataaatgttatgatcttaatcacgagattagtaaatgattagagaaatataattttacctggaatctacctctagtgagcgcttgctcaccaaagataacaacatatttcacaaagaaacctatttctactaattcccattgctttactttacattactacactcgcaaaactcaaatccgtacacaagcttaatgattttaacatgtaaaactataacaacaaaaattaaaccgaaacgacgataagatcaaaaagaaagtctaggatcatcgatcggttagtttcgtgctgttgcgatcgagaaatcgtcaacgagagatttccgattaatcaggacgagattgttaaaatatactattgtggattaaaaaaaatcacctgtctcttagatagttgtggacgacaaacaagtgttgctccgtcatgatcggtcatgcacgatcaaactctttgtttattttgttttccagcaaaaaaaattatatagaaaattaaaaagatgaatttcgaaacgattatagcaaagaaccttcatagtttcgtaacgttaattctatcatttaatttgaacatccgaaccaaaaaaaaaatcacttaatttgaacaaaaatttctgtctgcttgttacaaaaaaatactggcaattagacccgatgtctatcgagagagtgaatctactttaatccacgtggtgtattttgttggattactagtgaagtttgtaagtccacctatacatgacgtggacaatgtaatgcaactagaacaaatgaatggaaagtaaagaaaaagagataaaatgatgaaaaataaactatttgaacataatgtaaaatccatttaaaaaaaaaaattacttgaagtcatcaaaaataggttcctaacgaaatatgatagccgaaataattttactgtttgtcatttattttaggaacaacgttcattatgtgaatttgatacggatgattaaggatgatgatagatgtaattagaagaaatgaattgaaacaataaagaaaaagaaaaaaaagagattaagtgatcaaatccgtagggaaaatagtgtcactttaagagctttgaactcattctctttgaccattgcgaaagttttgaatactaggccgagtgagtttcgacccgaaatgaagtaaaggaaaataagggtcagggtccatcgctgcaagtgcaatgaaaaacatactgcttcttcctttgtttggtctatatcactaatttccaagaaaggtcactttcgttctttgataacaaaaaacacaagaagaaagagacatacattatgtcatgtgtgtcgtgtcgtcctccccatctctactaacactttgaatttattactaccaaactcaaatgtgtcctaaagcctaatcaatccctttattcacatgccacctctctctctctccattgtccactgtatccaaacccacatttgatcttggcttctttcttcttgttcttaaactggtgattaacaaaagtagtatatactaataaagtaatagtattagtaactttatgatcgaccatgagaaaaggttctgatcaaagttgtttagggaataaaagattgatattcttgattcttgaactcttaagttgcatctgagtaccaagaaaactcattaccaaactgggattcttctttatgacttgaggttgaagcaacaacacttgcttcaccagaagaaacatctttgagctttgaacttgaatcagcttcttccgtggaggcaacattttcagttgcatggtcagtttttccttcatccacggctccactatcatgagtttcttcttcttcttccttggaggctgaagtgcaaaccgatgatatgcaagaaacttcagatgaacttgatccctccgaactgcgtgaccctttaatgaattcaagtttcttcatcagaagctttagtctcttctctgctttttccctcaatctgatctcttctttcagattacgctccaactcttccatctgtttccaagagattaaaggttgtctttgagtaaaacaaaaaccaaatccagatcaacactacaactactttgaaacaacacctttttggtccaagaaacgagaacagagtaagtgattctttcttggttcttgatcaaaccctgatatttttaaacaagattaatgaaagataggatttaatcaaagttacctttctagtaataagctctgcttcttcttttgcagatcttgaaacttgcctctctgcaagtaatcttcctcttaaacactccacagttctctgaccttcttccttttcttcttcttcttccatcttcttacttgcaaaatttgttcttaaccaaaaaaaaagaaaagaagacaaatataattcctcaatctctatattaaagttcttaaatcacacatatatatctatatgaagagagaatgagagagagagagagaagcccacctgcattttgtgttgtaattagagggatcaatggtcatactcatactgttttttctttcattcaaccaaccaaaactaaattggtaaaatcttaaagttcaacttcacaactaactgcaaaagaagaaactaaaaaataacaatagtaagaccaatgtgttgttagatcatgtcatttaatgttcattcaataaggaacatatcaccatcatactttaaaatcaacttaccactaagaaaattcaaaatatttccaacttcaaataaagaaaaacagatccagattcaaatcccctgagacttgagagaggagggaaatgaacctaaaacccccaaaaaaaatttgaagttgtgaaaatgaaaaacagaatctgtcgtgtagggacaataaataagttgatttgtaagcaaaacgacagtgtgggctttggacttttgttgcctgctgcagctcccgtgagttggtaagtctcccacttcaaaacctttttaaagataaaaactataatcaattcactactatcttcaatttttactgcatattatctttacatgacaaatatgcatgtgcaccaaaagaatcatcctgattgttaatctccattacgttctttgacgttaattccaaagaaaaaataattattaaagtcgttactgttttgtttctagttttacaagtgtcacaaaactctttgtcaaacatatttacctcaaaaatagatttatttgccttttaatgaaactttttgtcggttgcatttatatgtgtacttatttatctgttctgcttcttgtgttgtgcggcattgcactattggtgaatgtgaaataatcaaaagaatgtgtttgtaaatgaacaaaattaaggagatgaggaaaatcttgtgaccctccatagatctaataaccattaagtgatcacgcagaaaacttaatgctcccaacctcccactataattttactttataatcttcggttttcttttcactaaattagattagcaacacgcaaagaaaaattgagtgattactgattagtgatattgagcttgcgtgtactttactctcagaccaaacttaactagagaaaccacattaatcaaaataatgcttactttgtgaacaaaactaatgaatcatataaaactaatattcttattcttattagcaaccccaccccttcaatcattatcacttcattaccctcaagttaaagcgtttgctagctgcttctatcaactactattcaacgtcatgttcaatcacattcacaacagcaaaaaaaaaggaaaacaaaatcatataattgatactctttggaaagctccacaaaaaaaaaacaaatcatcccatagtagtaactccttgagaagtccatggcaagacaatgcttaggagatgtttaagaaacaatcagtaagcttcatcaagctcttgtttcctgatatactctttgtcgctcattgactcaaccaaaccctctattatctcatacatctctttgcttctctcacacgaactgtctttcgctatgaaactacgtaatcctttctcagtttcgatccagctggtgccggggattttcttcaatccgattcttttcatcttattccttaccatttcagcttcttcccatctccctgcttgagtgtacaaattcgccatgatagtgtagttccctgtgttttcaggttccatctcaaacaaccgatcacaagcgaacctagcaatctctaaatcgccaagaacagaggctccgttcaacaatgcaccccaaactttagcaattggatcaattggcatcttagaaatgaattccattgcatccgaaagttttccagcccggctaagaacacttaccatacaagcatagtgctcaactccaggctcaatgtcatacttagttaacatagaatcaaatatatgctgcgccatgtctgaatcccctgagtgcgcaaaagctgaaagaacagctgttagtgtgacatcgtctggcttagttccaagacactgcatttggtcaaaaagactacaagcagaatcagagtccccatgaacagcatatgctgttataattgccgtccaagcaatcaagctcctatctttacagttatcaaaaactctttgagctcctagcagaaatcctaatttagcatagttatctataatggaagtggtgacatatatattgttgtcagcgccgttacggatggcaaaagcgtggatttccttaccccctttcagatttgaactatatgtcaacgaaggaagaaggctcgaaagggtcaccgtgtttggcctcgagccacatcttatcatctccctaaatgagtttataacctcctcatgatggttattctgcataagacccgaaatcatagcattccacgtactcagaccaatgctttccatttcactaaacaaagccattgcttccttgacaagaccatgagccatatatccagaaattatagctccgtatgtaaccgaatctttctcactcatctcatcaaacaatgctcttgcataatccaagctaccacatttagcataaaaaccaatcacagcattacacaaggataaatccatctgaatatgattttcaatcatcttcttgtgaacttccaacccgaaaataagatcgcttgactgtccgcacgcctggaagacgcttatcacagtgactccattaggcttaaaatcagagcaagctaacatcgctttatacatcttcttacagtcctcaaaagacccactttgagaataccctgaaatcatagaattccacgaaacaacatctctctcagacatttcatcaaacactttcctcgcagactcgatgttatcacactttgtatagtacgttatcatcccattgcccacgaagacatctgaatcaaatccacctcgtataacaaacccatgaacttgtcgagccaatgaacccaaccagaaatcatcacagcctgacagtgccttcaacacacaagagatgctaatagaatccggtctggcagcatcggaagagtaacaagaggatccaatccaggacaagaacaacgagaaagcatcgaaatacatctcacgcgaagtataagcgatgagaagtgcgttgtaagagaaggcatttctaacggtaatttcgtcgaacacatggagtgcttggcggaaacgatcctgcctagtgtaaaaactgatgagctttgacgcgaggaagttgtccggcttgatggagaagacgacaatacgcgcgtgaagctgaagcacgtggagaggaagtcggtgacgggtgaagtgctggatgaggtgaccgtacgcaccgccgtcgaccgccgccttgtttagcaagccttgcaaggctcgttgaatttcgaatcccaacttcattcatatctaaccaaaagctaaaccggagaaataaaacaatatgaatatatagaggcaatttaacgggcttattaatgggccttaaagcccatagtgtcgctgtattacagaacggagttttgaaatcgatttgacttttttagtttcatgtcttgtctgagaaattattattgtcgagctttcggttataaacagtctcgatcttgctacagtcgatcactgaatcgtgaaatagctaacgagtcatctgaagttgagagacgagctcgttctctgagagttttggatatcatatcttcgaaatctggtggagtttcgaatcgtcaggaccattttggtttcgttcaggaatttcgacaaacagattcgtggcgattcagaggtcaggcaatttccgaggattttgatctctcaagaaccaaaaatggagtttcaagcgtgctcgaagaagttatgctggaggattcttcaagctctgtcaagcgagatggatggagtttcgatgcttatggtttatcatccgccgtgagatcttgtgggttgaatcgagactttagaaccggttctgggtttcattgtttagcgttgaaaggtgggtttatctcagatgtctacttaggaagttctctggtcgttttgtacagagattctggtgaagtagagaatgcatataaagtgtttgaagaaatgcctgagaggaatgtggtttcatggacggctatgatttcagggtttgcgcaagaatggcgagttgatatctgcttgaagctttattcaaagatgagaaagtcaacctctgatccgaatgattacacattcacggctctcttgagcgcttgcacgggaagcggagccctagggcaaggaagaagtgttcattgtcagacactccacatgggattgaagtcgtatctacatatctcaaactctctcatctcgatgtactgcaaatgcggtgatttgaaggatgcttttcgtatctttgaccagttttcaaacaaagacgttgtttcttggaactctatgattgctggttacgcgcagcacggccttgcaatgcaagcaatcgagctctttgaattaatgatgcctaaaagcggaacaaagccagatgcaatcacatatctaggagttttgtcatcgtgtagacacgcaggtcttgtaaaagaaggaagaaagttcttcaatttgatggcggaacacggcctgaaaccagaactcaaccattactcttgtctagtcgatcttctcgggagatttggtctgttgcaagaagccctggaactgatcgagaacatgccaatgaaaccaaactcagtcatatggggatctctgctattctcttgccgtgttcacggcgatgtctggaccggaatcagagctgcagaggaacgactaatgcttgaacctgattgcgcagccacgcatgtccagctggcaaatctttacgccagtgtagggtactggaaagaagcggcgacagtgaggaagctgatgaaagataaaggactgaagacgaatccgggttgcagttggatcgagatcaataactatgttttcatgtttaaagctgaagatggtagcaactgtagaatgctagagattgttcatgttcttcattgtctcattgatcacatggagttcctctaatattcagggttctctctcattagttttatagtgcataccagatccagatcttttctataatggatcaagttttgctttgaacgttttcaacataacctctattactaatgaaaagactttaatttgtatagttgagtaatataaacacactaatttaataattaaccaggtaatgaaatgaatgtagctgtataatgcggtaaaatgcaccaagagtttctctatgacgtaatgtgaagttgagaaacacacgccatcaaaattttctttggttaataattaaaattttaaggtacaagtttgcacgattaattcaaaatttactacacaagattcataattaaggaatcgaatataggaaagtgtccaactggtcctctcttatatacccttctccactaataccgcactcagaagacgacgacaaaacaaaaaagttgcgagagacagagagaaacagagacatggatctgaaatgggatgattttttcaacgattacgaatggctgatcgtgtttctgaaaggtatggtgaagccagcggcggcgctcgtggtggtgcttttggcggtgattctttcatactcgcagaacctatctttggaaggagaaatgatatactctgtttcccgatcgtttcttcaactctctgttatcggatttgttcttcagttcatctttaaccaagagaactcaggctggatcatccttgcgtatctcttcatggttagtttcaatcaaactcaggatctgctgctctgttttttttaattattctttttatttgaaatgatttggtttccgaacaggtctctgtcgccggttacactgccggacaacgtgcgaggcacgtgccacgtggaaagtacgtggccggattatcgatccttgccgggacttcaattacaatgttcttgctcgtcctcctcaacgtctttcctttcactccgaggtatatgatcccaatcgccggaatgttggtcggaaatgccatgaccgtcaccggagttaccatgaaacagcttcgagatgacatcaaaatgcaactcaacctggtaaaaaaaactataaccaaaccaaattcccggtttaattagattttccggtttatttgattttgtcgtgaaccgtaggtggagacggcattggcactaggagcaacgccaagacaagcgacgttgcaacaggtgaagagagcactagtgatctctctgtctccggttttagatagctgcaaaaccgttggattgatctctctaccaggcgcaatgactggtatgataatgggcggggcgtcgcctctagaagctattcagcttcagatagtagtcatgaacatgatggtaggagcagctacggttagtagcatcacgtctacttatctttgttggccatctttcttcactaaagcttaccagttacaaactcatgtcttctcctcagattgaaacttttataaatccttataacaatcttcgaaaacttgtccaaaagaaacgcaacaacattatgtctcaaatgaaaaaactcttggtaacatgaaacttaaaaggttctaaagcaaacacacttaaaagagaaaggaacagtcgatccaatagtatacatgctacaatgcctgcaagccgtggccatgagccatcaaagttaaggagactcacttcctctaggggaagtgcggtttggctcgtaatcatcatcaacagggctccggtcctctttcgaactgtcaccaccggctcctacaacaggactgacaacagagtttctgccattgtcttgggggctaccaccgtcacggtcagatccgacttccttttgaagctttggtgatggtggtgggctcccgtctatgatctttgggctgccttcatcatcaagaaccggactacgatctctggctcttggcgatagagagtcatccatccgctttggactgcgtgatctctcctccacactcctctctcttcttctcaccggggatcgtgatcggctgaccataaggaaaataagaagtcaatcagagaaagcagttactcggattcatgctttcaggttcatacataaatctaatgcatgtaaacacctaaacataaaccaaaattttgaagtttacacgggcaaatactaacctgtagcttcggctacggctaagactccggcttgggcttcttctacgacgaggagaacgggatcttacaggtgacctggagtagcttccactgcgcctgccatacaatccaagaaagggagatgagaaagtggaaagaataacaaaaaatgcacttctgaaagaaatgttagtacctaagcttcttggggctgtttttgcagtttctctcaatgtgtcctctctctccacaacggtaacacttgttcttccagtcccctgctgtgcagtcacgagcccaatgaccatctacaccacagttaaaacagcgaccagctccaggtggtgggcctctgctatcaaaatcccgagaaccacgaggtgcctatcatacaaacataatattgatttctaatgagtttggcaaacacattcaaccatacctataaacaaatgatagagcctgaaaatagagagccaaacaactcacccctcgtgaaaactccacagtgatgcgacttccatcaaagtctcgtccgtccaggtaatgtcttgcatcatcagcatcacggggatcaccaaattcctgatttcgaaaatgtgaggacaaaagagaccacatgcatggtgtgttttcccacattatacattggttccgactaaaaaacgtactacatgactttttcaagaaatcgaaagctcaggttaaaaggagattttacttacaacgaaagcataatctcgcttcatatccacatctcgcactctgcggaagaaattgttggcagaaaagtaaggccatcattactttaaggtacttctaaacaccatttttgagactgagtctccatttccatcaaaacacattaaaaaattctacaaacagaatcgccaaggcgccctgtcccctaaacacttggcgagaatttccaccaagtccacccactcatcaaacacctccaggttaggcaaaatcccagagaccttcaataagatcattcaagttaaaaacatacactaatgactaaacctagttccacaactttccctcaagaacacaaatatcaaaatacagaaccaaaactatgcccctcgatgcttaatgacgactttctgcatctctccctcgcactaacaattttcataaccaagatatatagaaaggcgcatgaagactctcatttaactaaccccaacacatagaaatcaatatgtcaagataaagaagcattatgctcctcgatacttttaactttctgcaattgtttcctcgcacaatagcaatttacgtactatataactagaaaaatcacattgagaccatcatttattccaattaccgagaaatcaaaatacttcgtccataatcatagatagaagagtcaattaccttccgtatctgctaaaaagacgttcaaggtctcgggtcctagttctcgatgataatcggccaacgtaaagacgagtgttcccatagcgatcatcatagcgaggcattgtcaagctacaaaatcaaaaaaaagggacaaagaaaccacagatttttgagcataacctgttagaaactataaaacaagaacgtaacaaaaattcactaactcaagacctataaaaaagccccaaagaagacgccatttagttaattcagagacaaggaagcgataaatcggaaagacagaagctaaggaaaccatcaccgcagatgcatcgaaccaatataaaatcgtaattccgagcagtgaaagcactaaatttcaatatgaatcatcgaattgagcagagtttcgatacctggggattgaaggagagcactgcgaaacacggaagccctaatttcggaaggaaaggggaagaacagcgtaaggtagctaaagtatggttttcaagtgtttataaatgggcttcagacgctgacagaaaaaaacaaaaatgggcttcagacagaaccgactaaatccaacggtaataatttggtgttgtgtcctaaaccaacggtaaatatctttaaaaagagataagaatcgatgttgccatattcaccattttgcaatctgttgggccttatattaataaggcccatttaatttgtgtaaattgtaaaataagaatggtggtttacaaattgcaagttttgtatgtctcggtattcttctatgttgcacactctgatcacatttgcttaaagactaatagtaatgagttatccagactaaactatatatctagttatgcaaattcattataacaaattggatcctctaatctttaaaaacttacaacatctaaaagtgatcagatttgttatgacatctatctatttatgcatagtttatgacatctatcttctaccttctaggataaattttaccgtttaccaattcatgttataaactattctttgatgaacaaatcaaagtccgcctataatcctattttgttattaaagaaatactaatagcaattagcttagatttttattttctgttttttttttaacatttagcatttttttttcctaaagcactttcattttttacagaataaaaagaatgaagatatataaatatcaccggtatttttcatttcataaattatgactttattattctttaattaatcgattaaatatagcaaggacatacaattatataattgaaagaaaaaggaaacaaaattacaacaaaccttttttcaaaaaaaaaaaaagaacaactgtttaatcacttccgtttgttcttgctaccaatcaagagagtgaaataaaacaaaaccctaaagaaaaaaccccaagcaacagtaatccacaaacaattccatttactaatatccgtaatcccttgctgtttcaaaatatcaatccccgtcgtcacacaagtctccgccgtcacattcgtccccaatacaccgctcatactcttcaacagattcactttcacatcgttcggaaactcccccaacggcgaattgtcgaataactgaactcctctggcgaaacatctcgtcggattttgaaattcgttctgcaacactccttcgtaagggtatttcaccaaggagatgtaatggaaccagagccagtaaacaggaattcgatctcgagagatgaagaatccggagaagaggaggaagtaagcgaggatcgctactacgactgtgaatccgagcattacgtttggtataacgccggagaggaacgttacgaaggagcttcctgcccaaaatgaggctaggattgtgaagtagaagaagaagaaaccattggcgcctccgtcgagaccaacggcccagaatgttgtggcggcgaagcttgcggagaggacgattaaggccgggattgagattatggattgagagaggacgtaggaggatctccggtaagcgttgtaagctgtttctctcatgaatatgtaacgttcttgtagaaagactgggattgcttctgcacatgtgtagaatgttgttgacattgcgaatgcgaagaatcctaaacgttcttgtgctccttttggggaattgtctaggttagtgaacattgtagctaggatgattccggtgaccattacagctcctagtctcattccgaggagttctggttgtcttcttgagtttaatatagcacgtttgcctattactatcatttcaatccagaaaggattggcgaatgtttggaatgatggtgttaggtttgatgagttgttgttcgttgctccagagacgagtttccctcttgagatactcgcggttatcgcttctttgagagaagatacgttggtgtttctcttgttattgttgttgtagcttggtgcttgctttgctcgccattgcttgtggaactcgacaagtggcttggttccttctgtagaatattccagctctcggatgagatcgagagcgaactctgttttgttctcgttttcaggaattgggtgcttgaattctgagaagaactgagggagatgtgttggtgagccgctgtagactgtgtttcccttagaaaggaagattaactgatctagaagacccatgattctgtaactaggctgatggattgacatgataactatgctgccactttgtgcgattctctgaaggactttgataaccatgtaggcgcttgtagagtcgagccctgaggttggctcatctagaaagaggatgattgggtcatggattatgtcgtttccaattgatacccgtctcctttctcctccagacactcctctgtggccttcatcaccaatcacggtttttgcagcgctccttaggcctaattggtcaatcagagcttgaacccttgctttcttcttcttcttggagagtgaacgagggagcctgaactctgcagagaacattagagtttcctccacggtaagcatcgggaagagaaggtcgtcttgcatcacgtaagccgatatgactttctgcatgcttgattcaagaacttctccgtttaaggtaatggatcccctgaggctatcttttgcgatccggttggctaatgcatcgatcagtgttgatttaccggacccacttgctccaagaaccgccatcatctccccttcgcgggcttcacctgaaataccattcaatagtatcttagtgttcaccgaggaatcatttcctgaccttctgcagcaagcgaggggattaaacttcttctggatcttcacgctgtaggtcaagtcagtgaatgaaagaacaaacggggaagaagatatagaagaagcaggagcagaggcccatgaattgaaagaggatgcagcagaattgataggtgaggcaattcccagagcccggctacttgcactttcatcattccttgcatcctccacgttcataagatgctcggcgaatgtgacagagactctagtcgtgtcgcttggacgtccttgaggctccacggacatcgggtttacataatacataggaagatcattgttgccatcaacccgtttggccggagatgattttccgagcaagccagacattttctatgtatttttgtcttaatcttctcaggttatgtgggttatatagctcatacccacaaagaagacacgaataggatataggaggaatgagagaagagactactataaagtaaagagatatttttttattataagaatgaaagagatacgaaatggtcaatatagtaggtaatctctaagtatctaacgatagcttctgggttttgtatgttttgatgtaatgtacaaacctaaaagtaaatgggtaggtgagaggaagttgtacaaaaacccttctcgatttttcttcctcattatgtttatatctatttcttggggcttaaggtagtttgaaaattcgctattttctagagttttaagtaactatttgggtttagttacacgggtcttaagggattgaaatcattataggcgtaattagtgttgcgaataacgtacgtgcaaaattagatttgactgttactgagcagctagctgtccaaatcgtgccaaagcggcaaactcgtacctatcttattaaaactaacgttacaatattgtcttattttattttattagtgtaaaactgtcgttatctttttttgttgacaaatgaaaacatttcttttcggaggaatgaggatggttgatattttttattgagagataccacaaaataacatgttttggatacttaagtatctagcaagattgtttgaccaaaaaaaaaaaagtatctagcaagatttttacaaaaaaaaagtatatctagcaagagaaaaagtcacattattcggatgtaattcagtacttgtcctccataatcaatcgaacaaaaacaaattgttcagaatcagtcacatacttgaggtggcaaaatatttaattagcaaacgagtaagaagtggcaaagtattataaaaggaaaatatttgaattaagcaacaaaaatacaagttaaattttgattaaaccaaatatatatctctcaagtatattactcactcattactaactgactatatctgaaaagttcataaaattttacgtatgccatttcgatttcgattgaaaacatgagagcacaacttaaattacgagagattatcaagaaataagtaagcttatatgtggaacattatcacataggtatcctgagcaacatgggcatatagtaatctaaatagtaattagaaagtcactggaacataaatgtggacacgacttcaatagtatgagtgggttacacgaaaacccaaaattctcattaacgtgaaaaaataggcatataatacccaaaagaaatgcattatataagactaacgtggagaagtaggcatataaaacgtttggtatggctgttatatctgttttccagaactttatactatacgcttcaatatataagacctagatgattctatttacccattcttacaagagatcacatgatccacataaatctgtatacgtaatactatttgtttgttttatgacgcctgtccctttcaattttgtttaatagttaaaataaatgttgaacaaattcttatatctatataaacaaatgttatcaaagagaaccagttctggcagctaatttggtcgaacatgattgagggcctgttcctgtttgctagaaaatataatataaactttcgaatataactaacgaaaaatatccaagaatatctgtttttcgatgatctcttcattgtcccttattatcgaaattagtcgtagttaatctttgtttgtagtcatcagtgatatagatttgatcaaatcatgatcgttttgaaatcgttagcaatagtgacaagttatagtgataacaatatattgcatcgattgaattatgctatagcaactgcaaaccagttaacaaagtattttgatggtcgttgttgctagcgaccgcaaacaaacaaacaaaaactatcatataattttgcatattaccttttgagcatgcgaatattacctttcaaaatctaaaaacctttatgtattgctagattaggatgtatataagtcaatgcccagaagctgaaatcacaattaccggaaaaagcaaaacatgtagcaaacactttataacttattcacatagagcgcttgcaagagaccattctaagctaagtgtttgtgcttgagtcttagaaaactgaatttcatatcgtcattgtcacgtacaaggaacttacaagctataagcaaacatttttaatttctttctatgttattatatcttcaatcttttaaatgtcttctctcgaaattttagttttcaagtggtacaacaatactctatcatctaactttccagttgctaccagttgacgaactatgaattgagcaaacatatagcaagttaactagcatcagagacgtccaaactatgaattgcttaaggctgctacggctagaattgaccaacactattctatatatatatatatatattttgttgcctccaacatcaatctatgcatacaaaaatatgttctggtaagacttataattgtttgctataattttgaccagactttgtaagtgtgtttattatgattaaagaagacttggtaaaaatataagtctgatatggcttacgtaattgtgctatgatcacgacatacttacttaaaaatctctatgactacgacagactaacatcaaaccatgcatgggagagttataagttataacattgttttactattagttacacaaaaatagtcaaatagcaacatatttttcagcacgggatatgtgactattcgtgaataacatacaaatattggccgcaaactacatctgtgactgtaaccatgacaacaaaaaccggctggtaaatttggcccattcaatcacgaactacaaactcgtggccatggtcactatatcatcaatatgtgaattttgctgcaaaaataattgaattcttttttttctaactaaatgttatttgaggagaaaaaaaagattgatgggctattaattttatctattttcaaaattttattatatgagataacgttttatattgacatcaaattatgtaaggaaattctatcctatcttaaaaagatattactttttgaaagaataaaatctagttttgataagacacaactggcgtaaataaatgcaaaataactaactggattataataatttggtaatccaattattaaacaagtccaaattgcaaaacctaaaaaaacaaaaaaaaaagacacgtaggaaaatgttgaaaagaacacgctgcgtctgacttggtctccaatctctcgcattgttgcactctgtttttgtttggtctctctccatgcgatcttattcttctccaaccagtaatatcgtttgaaacctgaacaagaccctaattttagcctaattcaaaactcaaaatccgatcatcgagagaccttgtgaaattttggagaagaagaaagaatctcggcgatgtcgtggttgagatcggcggtgaacaaagcagttgaagtcggcgggaagaacaatatcacccgcaccgttcgcaattacgctgattccgtcgtccttaccgccggcaatgccgtttccgaaggcgccaaactcatccaggatcgcatcgtacgttataatctctcctcttcttatctaagattgcgattctaatcgccgatgtgtgtgtttaaaatgtagggatcgaggaatgtgaagagctttagtctcgcggtgaagagattagaagaggtttcggtttcttcaagaggaagcgagagagtgcagttgttgaggagatggcttgttgctttgagagagattgagaggatgtcttattcttgtttcgacaataacaatcacaaaaccgatgatcatactcaatccgaagattctcctaaaaacttcagtaccgtgagtaaatccaatccacatgtctttggtcatgatggttcaatcatgttggctaataatttgagaaattgtataggtttattacgttgatcctggtcttcccggtgagccaatgacttttcgtgatgtgtttcttcatagtgaggcacttgaagggatggtcttgtctatggtaagttagtgtaaagacagattctttgtatagcttctgctgttgtgtcagtattgcaatggtgataatggttaactgtttttttttttgtgaatcagattttggaagcacccaatgaggaagaagtccagctgcttttggaactatttgggtgatgttttcaattccattgaaaaaaaactctgtttcagttactttacaagaacatttcaactcaactggttatggttaatacatacaggctctgtttgtcaggagagaaggaagttcatgaagcagtgattcaaaatgtgcaggacttagcaactgtgtttttgaaatacaaagatgaagttctggtaaggatgttgcaaaacaagtgttctgtttccttaactctgttcttggcttgcactatgtaatgccttattatgtcattatctaggcaaagcgcgaggaactgcttcaatatgtccaaggtgctattggagggttaaaattgagtgctgatattgcaaggtatacttggatgagaacccttttacaagatacataaatgttcctgtgttgaagctttgtttagcgttttaagaatgttttaagtcttaagattttacttcttttgttttggttctcgtttgtaactggatcagaatagatattgaagcacatactctgatggagaaactagataagactaaggtcaaggttctcgagcatgcttcaagtgaagatgcttcaaaaactgctgcatcaacagaggttattttttctctcctactttaccactgccacattgttcactcctgtgaggtttctaggaaaatctttattgcattgttttatttcccaagtattttcatgatttgtcaacacatccctggatcaatccctatgagatgtactgaaaagcttgggtcgttgcaggctctccgggaaattcttgagcaagttcgcactttttcaaagctagaagcactcttgcttaggaaaaaatcattacacaatggtgatacccttcaacgccacattgagaaggtgagaaactagagacaatccagaacattcaccatttttgttggtttgttcttattagcttcttttttctcactatgtgtcttgcaggtcgataaactgaaagttctatcagaatccttactcaattccacctcgaaagccgaaaagcgaatcatggatcataggtgagaaaatgtaacatagcaatctcaagttttatctacaatctttactaccatagttcagggctatctttttccatatgacaaagcagaagccaaaaagaagaagctctaagctaccgagtttctaaaactactgaagttggtcagctggagaaggttggttcagtactttggacttgtctcttcatgtttttagtacatcttcttattatgggctgagtaaaaatgtaatatccaggatgtagctgcagaattaaaaaaacttgagattttgaaggaagatcttgaagctgagctgaaaagggtaactttgatcacaagaactttattcaatagtgatatagatttgtaggtcatattacagatttcaaatgtattctttgaaggtcaacacctcaataacatctgcccgggctcgccttcgcaatgctcaagaagaaagagagcagtttgataatgcgagtaacgaaattcttatgcacctgaagtcaaaggtacttaaactacttgtccttcctcattgtattagcccataacaatatatagtttgtgatgtttgggtggcatatgttgcaggaagaagagctgactcgttcgataacttcatgccgagtagaggcagatgttgtaaataagtggatcaaatttttggaagatacatggattctccagtctaaattttctcaacaaaaggataaccaagttaggtatgtcttgcactttgcaaagatctcagcaattatattgtttccctaattactttgcactaaatctgtctgttgccattccttccaccatgaatcgatgatgctcaagtggtgagatggagagatatagtgaccatttcatcgacctgattgttcaactcctatctttctacaaggtacttcaaaatgtttatcccaaaactagtgccaaatatattatggtatatctcatattcatattgtcaatatcaaatcaggaacaattggatccatatataccgaaaatccgaggagtcgtggcaagtttggaaccaagtaaagggtaattatatatatgatcttgtaaattttatttgacactaagttaggctggtagctcaagttgatctgcttatggggaaatattaggttagaagccgagaaaatcatagacaacaaggatacaaagccatttgaatctagaaaacagcttgagaaggagtatttggacctcgaagctaaggtaaatggctttacgaaatagacatctagatcacttttctcaatgtgcatagtaaaacagaacattccgaagcttgtggcacaagttactactctgcatgtccttttccatagcagctcttctgattatttattagctttaacagtttgtaacaacattaagtgtggtggatgcaatgaaaaagccattctattcacaaacagaaggaatctccaggtaaagttacaaaagctttgtaaaaactatagtcaagatctaactttagttttgttttaaccgtacttggtgttctttggatccaggaaagacgataaaagagtgaaagaactatttgaggtattggacaaaacaaaacaagagtttgaggctatcgaacgcccgcttctagatattgagtctccttctagaacctcatcgtcttcacgctcaccgtccttgaaaatgactcatgagactccactttccgatacagtcctgaaactttccggtggtgatgattcaccagacagtaaaaaagggtcttcagggaaggaagaagacccggcaaagaaacaactcgagttggaactggacgtcgacggagaagagttcttggcagatgaaatcaatgactgggaattcgacgctcttgatgaaactctgacctcaaagacaagtagttgacccaaattttgaaaaggtaagctatatttagctcatacttagctacatgaagctttcaaattaacatttttttaggtgatagacattgtagatgttaatgtgacattttattatgttcgtcttgttgtaggagatgatggaagaagaggagagtatatctaattactatctaactaaaccataaaaggacattgtaagtttatttcttcttttttgaacctaaaatatgaaatatatggtccaagtgtagataatattatagccaaccaataagttttgtatattactctcacctctcccggcatattttttgacctttttccgccggagagacgatttatatatttatgttttcatttttgttccttatttttttaagtagatgatatcaatgcatgatgacggtaatacatgttttgccatgaaataattttcctagaaaaaaactgagtggaatattgtttattgtcatattaaattcgttcaaaatttgaatgggaaatgcattcactgtgttcagtacattgaaatgatataaatgcatttgttacctcacacaaaacaatgcttttattgcttattgaacgcactaacaaaatagcttgcacatttcttttgtcgtgccaatgccaacggccaccacttagaattataaatgtatataatatacacatccgaatatttctaaagtactaaacaaaactttttgatttatgcatgcgtttaagttataaacaaatgtcaaaagatttgccattttcatcaaatatacttctatagttctgtacttgataaaaaaaaaaaaaaaaattataactatatatcttgtttgcactgacacacaccttgtttgcttcagctggatcacagatccttcaaaatgtattttttttttaaaagtcagacaactcatgagatccgatttaagttgattgacattttttgggtttgaaactacaaaagctgtcgaatggtttttgttgttatcatttggtgtcttggcttactcctacctgaatagttcaatttcccaacatttttaacaatatttcaagaggttcaaattcgaattacgtggtagctgaagatatgatgaatgcacaaaacaatttcatgtccacttgttcttaggagaagtaaataaaactataggaaaagaaaaaacaggtaggtccatattttatgaagtgtggtggtcttgtggtgtgcatatgtttttgactcagagaggctttccacactcattccattaactcaaattagtgggttctaaattaattaaggagttgtttacaactttttcatctaaatcttattcccactttggttatttgttttgtcttttcattcctattttcaattctttacttattcaaaccatatatataagttagagaaatttggattttggattgcgttgtcattgtcgttattttttatttattcatagtgtgggatatttaagaaaaagttgtgtagttgttatcatcattcaacatctttaccacactataaatctagaatgctaaaattataaaaaaaatcttgctggaaaagaagttggaaattattttaccaaacaaataaatgttattggcatttactttgtgaggtgtttcaatgattgagaagaactaactcactctgcctttttaggtacttcgctgtgtacgagtacgacgacagagttcccactccaattctttccaataccaactaagacatgatttgtacggagttacctactaaattgtacaattaactaaaccttcctttctattacgatgattttatgtatatataatatacgttattaagtagctatttaagatttatggttttagattccaaatatatataaatttcaattattgatgcgtgtcaacttcgtgttcggagtatggactatgctaatcttcatgtattttaataattttaccggacattttaaaaggaactactactgtagtacacaataagtttattctttaaaaagagtatttggtaagtagtctttataaatataaagttgcatgcatgtaaccgatttgactaaattttcaacctctaataatctaatgtgtacaaactgcaaaatatcaaattttctttagctcatttgtacgatcttatttctaagttcgttactcggtaaaaagaaatggcaagtatatatgtgattatattttaaataaagaaagtggaaagcgaaaagacttgaaaaaatagtataggagtgtgtggatgaaagtcacaatccacttacccacaacctgcaacaattattatcctttttggattaaaaagataaacttttgacaagaaatttttcatttaaattttagaaatgtttttgtgagattgtgacttttgtcacctatcgtttgtgctcttttaccattcacgtgaccgttgttattgtagccaatgagacacgagggaaaggataaaatcacgattttatgtgttctaagcatggcgctatgatttaaaacactttcatgatcttcttgagtagattttttcgtctttgtgctcaaacttattgctgatcaaaccagaaacaaacaaaaccaaaataaaaccgttaagaaacagacttagctcagaatatcaatgatatcgtgtatgttgtggttctgagtgatgctggttttaggaattaatacaattttattatgttcaccggacaattgtcattcacatcttatgttgtcaagatcttgtagtaatttaaatctacatccacgtacgttggacgtaattcaaatattttaggtttagtaatcttggatcacggtggacaattcaggttgaaatctagactttggaattagtgaagtttactagcaaaatgtgtaactattgaaaaacagttcaagcttgcgaagggcaaacataagtacgaggaatgggaacataatctactgggcacttcaaaaaagatccacaaacgtaactcattagtcgatgtaattaattattttaattcatcattttattgcgatattaaatccaatctatataaaccggagcttgttgtactaatacaaacaacttcgaatacaaaatagaaatcaaaatacaaatagtgtgtatgtgagttagacgacaacacacacaaagaaaaatgtcatacccatatggttttaaaatagctaaagcagcatttcatgaattgccctttaataaattttgcaccgcgagattattcgacaatataattcatcaaacctaacacattttcagtagaaatatctctgacagaaatattatttcttgtccatcaaactattaggcttttgttcaagtttttttttctttttgggggctgaaattgttcagttataatgaatgacaaaaaataccattcattttctagtacacactacttactgcttccactatattataagccatcaatcatatgtagtatcaaaagaataaccaatgcaaattcacacgctgcatgcgaaacaaaattttagagtttaggtattttctttaattactaaaaaaaagtatctaacggtaaactttggaaatcgtagaaaaaaattggtggccgtagacagaaatcattttttaaaaataaagaaatttatataatttggatgtattacaaatcttttcttgtctacaaaattaaaataaaataaaagtaaactgcaaataaattgaaaaaggtgtagcagtagccacctaggcaatttaattgaaaattaacggaaaaaaagaaagaaaaacaacaataaataaaaagaaagttcactttaaaagatgctctttccctcttctcacttctctcagtccctccctagaagtaagtaaaccacagagagaaaatatatacacagacagatacatacacacaattacatacatagagaaagacatggatttgcatgaatcagaatcaagaacacatgttctgtccaccgatggtgatgatggttacatagacatggaagtcaatctctcttcttcttcttcttcttctacttcgtcctcaagcttcttcagcttccccgtcacttcctccccgccgcaaagcagagagttcgagtttcaaatgtgttcctccgccgtagcttccggtgaatcaaccacatctccggctgatgagcttttctacaaaggtcaacttcttcctcttcatctccctcctcgtctcaaaatggtacaaaagcttcttctcgcttcctcctcctccaccgccgcaacggaaactcctatctccccacgcgccgccgcagatgtattgtctccacggagattcagtagctgtgagatcggacaagacgagaattgtttctttgagatttcgacagagctcaagagattcatcgagagcaacgagaatcatcttggaaacagttggagcaaaaagatcaaacattcatccataacacaaaaactcaaagcctcacgcgcttacataaaagctctgttctcaaaacaagcctgttcagattcatcagagatcaatccaagattcaaaattgaaccttctaaagtctcaagaaagaagaacccatttgtgaacagtgagaatcctctgttaattcataggagatctttctctggtgtgatacagagacattctcaagcaaagtgttcaacatcttcttcttcttcttcctctgcgtcttcgttgtcttcttcgttcagttttggatcaaacgggtcgttggatctgcagacactgatgagaagcagcaatgcgagtgataactccattgaaggagcgatcgagcattgtaagcagtcgtttactactaggaagagtaatgtgactgaatctgagctctgttcttcaagaacctctgtttctacttgtggtgaccttgataaagattgagattctcagatctgtgacgctctctctctctgattccattccaaaaggatacaaaaaaaaaatacataaaaagttcaaaaagataactttttcttctactctgatttttttatttttgtaatttagattcttttgtgtgcttttgttgtagaagtttgctgaattcgaggtttctttatgtgttataaatgttaatgctacaaaattactaatttcaaggttcttgggtttaaacttgtgttttgaccagagcattactttctctttcgtttcggatttggttttgttttaataagtaaacgactaatattcaagattttgttaaatacagtaattactgatttttatttatactaattagttaatggtaaacattgaatttatctttaaagctttaatcgtgttttgactttcaacaattatttttgcgtttttattaattagtagtagtagattttgttccgtcaatatgcatttatgacacatgacacttcaaaattttggactgattgaaccaatttcagttgactggatccaatttcatttcatcatacattagtcattaccagttagttttacatattactgtaattgcaatctcgtgttgttctatgggtattcaacagtaaactcatatgacctgctgcatttacgtaactcatcagctagagcctagaggagatcacatgtcactagttattggcatttactacgatattatttttgtttttctttcataagctgaagaaaaacaaaaacaaaaacaatatttgactacatatcactattaggagtcaaatatactacaaaaataatatttgtataataaatgtggttactacatatcactattaggagtcaaatatactagaatgcatgttattgacaaatatacaaaataaaataaaatcaacttaaataattagtgagtttatcagtaaatacataggatcaaaaataataaatttatatcaaaagaaatggaagtagtaaagtaagaggatacaacttggatataatatttttctcatagtataagtggaatgactttggtctttgggttttaatattaaacccataactttaacttaagttcgatcttttggatataatatggaaagcagatttcacttgtggaaacaaatgaacaagcaatagattaataataatgtctccaatattcgagtgaaattgtgtacaaactcgatttcaacaaaaaaaaatagtttactatctttttaatatatatattttaggtgacataaaaattttatgttatcatcaacttttactatttttttatatataaaaaaaaaatttgagttggagattttttcttttgagccataatttttttttttgagtagacccaaaagaaaagggacgaagcaaactgaataaaagggactttacaggcaatagtgaggatcctctctttccctatctctatctacggtcccttttaatatgttttaaaaaaactatagtaggatgtgtattacgtcaaacctaaaaagaattatatattttccagcaaatttgtaatcatagggataccatgcaaaataactataggtcaatatgttaccatatattaaattgtctagtaaataaagattggagaaaaaagcgaaattaggcccattttttggggtccaacattacattcatacataagtaaccccacaaacaaaaaaggaataactcaaagtgtctttttataaaaaaatatttccaatataaagatttcaatgattataagcttcttgaagtttatcactacaagagatatggtcccattctgattcttttgatttattcaaagccatacattagatagtaagatttaggatgagaaatataacttgtttgaaatgtttgagcagtgaaagaatgtacataaatttatatatttgcataagataacaacggttttttcttttggcattttgtttgcaatttacagtgacaattatatctatcttttttttgttttaacattaatctttacatattaataacacagcaatctatatacttttagcaaagaaaaacacctttttgaaaatcatattgtaatattacgattagttaaatagattaatatgaatccgcgtggagaaaaaatctctgttgaaaatcttaagagtccatgggaagcatgatgagtgtcagctgcatgaaagtgtgtagctttcgttttccatgcatcaaagttaagcttattatatgtcattgttttgattaaattacataaaagtaacgattaaagtagactgtaattattaaaaacatcaacttaatttgcttttaaaactccaactaattatccaacaacaaattcaaaacaataaaaattagatacatataaatgtcaataaaataaattcctcacctttacctataactactttttctatccactaaatattttgtaatgctttgtgttaccaatcaatcaaatccttagtagtaaaccgcttaccaaatacgaccaatatatcattgagtttgagacattgactagtgcagaggattgctagatttcctatgggaacgagggagctacaaattcggaaagttgcaagttcaatcactctattccaagaatgaccaaggtagctttctttctacttatgtacatttgcttaacatttattttcgatgagctgaagtgttagaaaacttccaatccttgtacgttgcctctgacggggatattggctcttgaaatgtattttccattatccttttttgtctgatagtctagtggttttttaaacaacctatatatgatccaatccacttgagacttcgaacttagtcatgctagttagctgacattgacatatatgagcatgccaatcaacttaagtcgatgagaatagtagattactggcgccttttctaagttacatgcatgtatatttaacaattgttcaaatacaagaacaaaagttgataaaaatggaagtggtgttttataacatttttagataaattagtgtaacgttaatagaaaaagttgataatgacagaaaatttcaaaagtattagtatttagattaaaaacagtatttatattctgtaagtaatttaatcgaaaactctttttctgatttagaaaattatcttattattgggtcaagttgaaaaaatatatcgtattactgttacactagtttatgattatgaagttgaataaactgttccggtcgtagtaaagtccaaaatccacatgatctataacaggaaccagaagatgaagtgagcctttccacagttccgttgacctaatcgacgactaaaatcttgtcagtctattcgtacgattaaattttcttttaacatgtgagacacagactcaaatatagaaactgcaattattaattaatatattttggggacatttcagaaaagctaaagactcaaaaaagagttatcttgtgtctccaactaaaatggaaataaaagaagaacatcaattatgtctgtaacgtggaacccacataactggttttaactgtttatacgcttctcaactctctaaacaataaactctaactacaaaaatccatctctcacttatagaaactcttatgtttccttgcttgcttctcaattattcattgacataattcagctctagatcaaatatgagccacattctcgaacaaatgattatgtgggatattatgtgatgtgtgcaatgagaccacaagttaattggacctctttgtcaaaaatatttgaagcaaataaacagagagacaatgataaaaagcgagagaggcttttcgtaatcagaagcaaggtatgagttttcggaccaccaacttgtctgttgataagcttgtcttcttccctaatccggaaaactttttccactctaatggattgctccgtctattactgtagcttttgtctagagtcccgacccgacacacctaaccaaaataaagaacattgaatatggattacaatcataagactttgttatcctccaagctggaatggacatgccctatttgatagaatcacttaatgtctaatgttgacatctcccaagttagtcaaatcctttaggaaaagagttggacaagaacaaagtttattgttgtagtgaacatatgtagtagggactagtttgtttaacttaacttagaatgcgtaattcagcgtaagaaagtacatactctttctaattatatcatttggtctttattaatgcaagttgaaacattcctcaagaagggatgtgatattgggacaaaagcagaaaccaatgtctacaaaaattggtgccatttccgagaaaaatccagtagcatcttccaaaggagtttacttttgtatgttttgagaagggcaaagagagacataggttcaaagtaccacgatgtctaatgtcacatcagtttaccaaaaatatcttcttgcattaataagagaacaaactacgtgaatataggagtgattgatatgtttaccaaacaactctgttgcaatcacaactcacaagtaagcaagcaattgctgctttgtgagctgtttcggattttcttggattaaagagaagatcaaaggcaacataattgttgatattctcaccacctagctacattatcaaaacccacaaatcgttatgcaaaaccaataatatttggcgacatcaccatgaaacacatttaaagttcaaattctgatccgttgaaacatgtatcaatttgagcactcaaaagcataaacataacactgtgatgaaacgctttaacaagtttaaaactacacaaacgatcaagctgcgtaatccaaaacgcaagattcttctcataaaatgcaaagaaataaaaccatagaatccgcttcagctaaggtccttaagttagctctgtcttcgccttgtctcgcatctcgtggacattttatcgtagccggaaacatctctgctacactgaaactttagcccaatgggctttaattaatacataaccagaatagtgaatgaccccctcatttctgtcatataaagcccatatttgcaaagcctaaaggatttctagaaaaactttataaatagggaacacaacagttcagaaattattattggacaaatttgacgatattttagtaaccaaaatttttatatgatccaatttaagataaaactacaaatatttaaaaatgaacccatattgtttagtttagagttaagcattttatgttttaggggttagctagggttaaggatttaaagtttatgatttagttttaattaggcgtaaagtttatttagagtttaagctctagcaatttttagactattttaaagacataaagtttatattgttttcctcccaaaataatactatgcacaacaaaaattgtatttcaatgtttgtttgtttatttaattcaatcaactatcttattatgactcccccccccccccaaaaaaaaaaaaaaacccaactatcttgtttagtataggtttgaactgaattttcaattttggctaaagtctaggttttaaaggttaaattcggatatatcctcatttgctttatacagccaaagattcaaaacacagaatattcctggtgtttccaagtgttgcagatctcaataaacaatccacattagttaattagtggaaaagttgagaacaagatagataaattataagtaggtaattctacaaattgatctgtctgtgtggctctaacatttatgcatcacgttgtccatttataaggaaagaggctccattaatactatttttcaacatttttatcagattttttgaccgttattatctgtctcgtctctctctgacacagttagattgtttcatttatcatataaaattaataaaaacagacaaaagatattgaagtaagatttggaatataaagccaaaagcctcgtgaaggatgatgtcccacggtccacgcccagcatcttcatctaatgacagtgagcatgcaatacattaacaatttataatactaatacttatacttaactaaatgctttaaaacatttgtatttttatcagtattaatataaagcatttaggtttccctcatgacttgattatgttaccttagtttgtaatataatgtgatccgtgattagaatccatccaaatctacaacaaagttaaatagtttcttattgcttattttcatatatatttgtaaccgtgtcttgtcccttagactttaccataaaactccaaagaaaaatcgggaacccgagtaaattataaaggccatctcaacaacttattacatatatggacaaataactcttatcatatgagcgttacactctttaactttctttgtctctattccaatccaattctctctctatatacaagtaaagacatcctcgtatacacatattaacattctcatcaacatttctttcaagttctaacaaaagtttggttttttttttttctttcttattatcacttcttcactctctttctccatataatgaagggacgaatgttttgcgcttcgcaagcatcgacagccatatgttcaagcatggaccacgttcacaaatcaaccaccaccgacgaagatgaacgaaacagcggccgagctatagaccgccacaacccgatcattaaagatggccgaagatcattcgctgacgacttcattaaactaccaacttccgcagaagacggagagatgagtaacaaaaagctagagatctataaaggcaggagaagcatcactggcaggagaagcacgggcggtggcggtggaggcggagcagcggcgttgttgaagctgatcactaatgacattggcttagcaaggaagagtttcagctgtgttgcgagacccgcatgtgacttaatcaaaacccctgtgggttctacaaggtatcttttgggatcggacccggattctattacgggttctgtggatcaggatccggctaagacggtagaagctgaagctcctgctggtgaagacaaaacgttgacagagaagaagacaacttgtggtgatacagaccaggtaagttgttttgtagttagcatcatgagtggcataaatgtaaataaatggtgataagagtgatgattagggttgcattttctgaagcagcaggtcgttgttcttaaagtgtctctccactgcagaggctgtgaaggcaaagttaggaaacacttggccagaatgcaaggtgattagtttatttacgagaatgccatctgctcccttttttggtttagtttctaaaaatgttccggtttagaaaatatattatatgaatgataaatatatataaataaattcttggctccagtttgtgataagaaaattatcaaatacgagaactgagttcgattccaatttactgtaggctctgaatgatttcgttattttgtccatacctgagccggtctattctattaatttagtgaaccggttttggtctaatgctggtttataactaatgaaattgatacttgtaggtgtaacatctttcaacatagattttgctgcaaagaaagtgactgtgactggagatatcactcccttggaaatattggatagcatttcaaaggttaaaaatgcccaattttggacaaatccaacaatcccaaagccgaacgtggaaacacaaaatccctaatatatcgggagtattcaagagtatgtatttcaagaataaaatagtgatttcaagaagtgtctctatatttatatttggtttaataacgtcaaaatctatacttgctaagatttgatattatttttgtttcttgttttaatagttgggcctcaaaatcttaaaattatcaaagatgattagattaaaacaataggatgaaagcgtcatctgggatcataatgggccttttatatccttttgttaagttggattttaacgatgctaaaggtgaaaatctttctactacttaatggtgtgtttgtctgctactcttgtaatttgttggtctgaattacatcagatgatagccttggtcttactgttcaagttctttgtgtccgacagagtcatcttctttgcttgcgagtccattgacatatactaaaactctttcttaattccagttatttgtttactcttttctagagctcttagctccagctgcaagacaacaagaacaagcgttgtaaaatcatatactggtgtcttgttagtttaattatatgcctccaaaattcaactctgttttcaatgtatccaaggcttggtcagaagcactccaacacgacttcaaccattttcagcaaaccaagcaagagaaaacaagacagcttggtgcttttgaaatgatgttttaaggtgagttgggacaatgactcgtgagtcgtgatgtatacatacacatctcaaaaaacagtgcaagcaattcaagattcccatattgagtattcgatccgtactacaacacacgatcacgacataaattcaagctcaacctacatactacaaccatctaaaaccattagcaacagaaaagagacaaaaaaaaccacattcaagcacgactagcatttcgtaagacaatcattcagccatctctcgctgtaccttctcggcaaagagcttcgaagcaaccatattatccataaaatactctctataaggatgattcttcgggacaagtctcctaaacttctcaaactgtttctccgcctcattctccttcttcaacactgtgtatataatcccttgacatagatacggcctgaaatctctcggctcttccttcacaagctcctcatacaacttcaatgcttcattatgcttcccttcaataacccgaatttgcgccactagtagcttaaaatctctcaagtccttacgattcttctccttcttgcacctaaccattgcctcctcaattctcttctccacagcattcaaatcatcaccagaatcagaataagccataactaaaccgtgataagcctcgacacgaagcggatctttgactagaatctcttcaaaaccagttttagcagactctaaatctccactgtaactaaagatattagctttcaacattggccattccttctcctctggttccaattcaatcaacctatcaatcaattctatagcttctagaagctttcgagatttgatccttacctccattaaagatcgtagagcttcaacatcatcagggtgagaagcaagatactcttcgagtgatctctcttcttcttcaaatgaaacgtttccgttactttgtttgagagattccattaacggcgtcgccgccacaggagccgcaatcgccggtgaaggtttgagctggagattcacaaggaacagtgctgctgccgcagtgaagctgacgcatgtggatttgaggattgagagcttcgagtcttgagacttggatgaggaagctttgattgaaatgcatttgaaggatgatgttgatctgggtaaggatctgagagagaaagacgaaggctttttggggaaagatgaagagaaatgagtgaaagagaggtgatttggttgctgatgaagctgtagcttccctagagactccatgattgcaaagagagagaaaacccctaaaaaccctacagtgagatttgaggaagaagaagcatcaaaaggagccttcgagttcgaatatgattcaagttacggcgtcgtttttggtccctgaatttgggcctttataagcccaagactagaagaggaaatgtaaatatcacaaatcaaaacgctgatctctttccttaatccgaatattgttggtgtgaccaagcttttgtgatcctacttactaagaagtaacaagcacaacaattatcatgaatcagtactgctaaggatatatgattgttgttagaactgttcatcttctgatcagtctgaagatttcacaaaccactctgattgatctttttctgaagttttgaagtacttgctgtgactacaatataattgctgtgtttgagttgtgtggatgggctaagatattggaccaagggattcatttccaatgctcaaacattttccactggcgaatattgttaaaatctataactacattatttaagaaccaacaatatctgtggaatggtttcacaaagagaatattcctagattgagtgcataagctcattgaaacataaccataagtgaaaagagagagaacatagcatgctgattcttccatgaacaagaagaattcagctgagaacttaggatagacaaaaagacgacgaaatggaattgatagttgaggcagtaggtaaaccattggatgacagagaaatagatgtccacaaagcttacttgaactcaaatgatggcaccggaggagcatcaaaactctccaacacctctgttttactttcactgcctggttgcacctcctcctttttcttatcaaaaagccctccaaaccatgatgatgatgatgatgatgaagctgtattctggttttgactctctgaccttatctgtgcttgactctgcatctgccccatctgcattccttgcatcccaggcattccttgcattccgggcatcccaggcattccctgcattccctgcatcccaggcattccttgcattccagggtcctccatcatcatattctgaggctgagccagtaccttgttcaacatgatcccagctccttcaatcaaagcaagcaaaacccctccaaaaatagctgatctcgaagcagcaccagccccttgccgcatagacagaaaccctccagttgcagcaccagcaatgatagagttccaaggatcctccttttgccttaggtacaccatggtacagtcaaatgtcgagaataaacctccccaaacagcaaaactgcctccagtacgaggtgcgttcatgctcaccgattgtgttcctccaacaaagcgactacctttaggagaattgtaagtccctttaatgaaatgaaaggcagatcctccaacagctcccataccaaaagcaccaccgatatcatcgagtatacgatcagggcaaggctcccgagatgtctctggtgttcccattattagatgcctcaggcaatgattctatcaaacctgtaatcaaatgaatattgattcattaacaaatagtaagaaatttagggttttgtaagtcactgcgaaatcaacaaatagatctctgactaattccaattaaatactgaacatatacaatcgaacgaagaagattagggtttatcaaagatccgtactttacgatcgaaagcaaaccatagaaaaaggtggaaactttgtgtatagaaatgaatctaagagaattgagaaagcactgttgttgatgatagatgagaatcgaagaagcatacctgagactaacgaggaattaatcgacggacgagttttagagacgagtttgagagagagagaaaaaatgaaggaggtgcgacggtgagcgagagaaggaaggtaaaagaagaaacggcgtcagggtttattagggttggctagaaaaaaataaacaaaaaagttacagcgaccaaactattttgcgtttaattttttgtcagctttatttttccgacactgttgcgttttttttttttttttttaatttccctctcttttttgccggcatcgctcatttttcttttcttttcgaatatggttgctttattttttattgttttaggataatttcgttcagtaaaatttaaaaaaggagccaaaagttttttcaattgcccaaactagttaaaagaaagacctgagagagaaagtaattaaacctattaataaaagcccaaatagttagtagaagatttaaagtagagaagcccaatttggagtagcccaagtttggagtagcccaagtttggagtagcccatagactaagaaaagattaaaggatgttgttgtctgtttacccgtcttgaactcacgcttaaaagctcctttataatgcaagaatgtcattaactctcttacaacggtacgttagtgtataatgtatacagattgttaatatatattggtcttcacaagttacaacatttggattaatcacacatagaacagttggagactgaattaaatactctcatattcaattacaaattcttttgtgttttcttttctttctctctaattttgtcaaatcaatgataataatgagctaatgatcatttttttaatttatccatctccaatagtgctgattccaaattctttccccaaaaaaaaagaagtagtaaatccatctcacatatatatgattgtattggcaaaagtgtttatttaagaataaaatcagaaagtagtagatttacaattccttttttttttttcccttttttccatgtttacaaatcataaagttgttggattattggaacaattttttgactgaaatatttaatatcataatacctgtaaataaataatctagcaatatatgaatactgagacaaaaaagaagaagatatttgcgacttttaaaaaaacttttgaaattaaaggtagtgttgagctctctagtaattcgaatttggatctgcttccactcccaacggttacttaccctaatctttttttgttcttcaaattctctctcaaacttgaaaagaagtctctctttcgatctccaggattcggctctgtttcctgtaagtgaatcttatttagaattcgaatctctgggattctgatccaacctttctcaattgattagggaatttgaatttgatttcacagaaatcgaagatgtcgtttacgccagaggtggtatcaaggaaaagtggagtaggagtgattccatcacctgcaccgtttctaactcctcgtctcgagagaagacgacctgattctttctctaaccgtctcgatagagataataaagaagtcaatgttcaagtgattctacgatgcaaaccattaagtgaagaagagcagaaatctagtgttcctagagtcatctcttgtaatgaaatgagaagagaagtcaatgttcttcatactattgctaataagcaagtagaccgtcttttcaatttcgacaaggttggttggtctctttctctacttgatggttttgtattcaagggtctctgatggtgtttattctataggtttttggtcctaagtcacaacaacggtctatatatgatcaagctattgcacctattgttcatgaagtcttggaaggttttagctgtactgtgtttgcttatggacaaacaggaactgggaagacttacactatggaaggtggaatgaggaaaaagggaggggatttacctgcggaggctggggtgattcccagagctgttagacatattttcgatactcttgaggcgcaaaatgctgattacagtatgaaagtaacattcttggagctttacaatgaggaagttacggatttgttagctcaagatgattcctcaagatcttctgaggataagcagaggaagcccatttctttgatggaggatgggaagggttctgtggttttaagaggtcttgaagaagaagttgtgtacagtgctaatgatatatatgctcttcttgaacgaggttcatctaaaaggcgtacagctgatactttgttgaataagagaagtagtcgatctcattcagtgtttactatcactgtccatataaaggaagagtctatgggagatgaagagttaatcaaatgtgggaagcttaaccttgtggatctagcaggatctgagaatatcttacggtcaggagctcgagatggccgtgcacgagaagcaggagagattaacaagagtttgcttacactaggccgtgtgattaatgcccttgtggaacattcttctcatgtaccttacaggtacttgccttgtcctacaactatatatgtctactgtggtaatatttgtgttttttgaaagcatacttgtggttgcagggatagtaagctgacaaggcttttacgggactctctaggaggaaagacaaaaacttgtatcattgctacaatctctccatctgctcattccctagaggaaactttaagtactttggattatgcctatcgtgccaagaacatcaagaacaaacctgaggttttgtttatgctaccatatctcatctttatttatcaatgtacccttaatttctatccttctaactagacgtgtctctgcaggcaaaccagaagttatccaaggctgtgttgcttaaagatctttacttggagcttgagagaatgaaagaaggtatgaacacaacattctgttctatattctccagattttcttatgtatattatcaaatgagctattggattagttaaaattgttaaacaatcaatgcagatgtaagagcagcaagggataagaatggtgtttacattgcacatgaaagatatacacaagaagaagttgaaaagaaggtagattcaaaagaagacacttaagtgtatattcattttatgctgggcttaatgatcactttgtttcaggcgagaattgagaggatagaacagttggagaatgaactaaatctcagtgaaagtgtacgtctgcctcacattatctcttaacattaaagtgtatctgtacgttagaaactaaattaattttctcccattggaacttaagaggcttcttttatgcaggaggtttccaagttctgtgacctttatgagactgagaaagagaagttactggacgttgaaagtgaccttaaggactgcaaggtgattagaacttccgtgacttagtatccagattattcatccttttagtgagagttttcttgaaatttcaaacattcatgatccagagaaacctgcacaatagtaacaaggacttgctagatctcaaagagaattatatccaagttgtttcaaagttaaaggaaaaggaagtcatcgtctccagaatgaaagcttcaggtaacagttcttactcaatactttttctttacatgcttccgatttcttgggtttgttgcttactcatatttttcttgaacagagacttctttgatcgaccgtgcaaaggggttacgttgtgatctgcagcatgcgtcaaacgatataaattcgttgttcacaagattgggtacttcttctttcctatttctaagggtgaaaataagatctgtcatgtgctgatttttcttgtttctgcagaccaaaaagacaagctggaatccgataaccagagcatgcttctgaaatttggatcacaacttgatcaaaaccttaaagatttgcacagaacagttcttggatcagtctctcagcaacagcaacaattaagaactatggaagaacatacccactcatttcttgctcacaaatatgatgtagaaaaaagaccatacttatgtcaattcactttttgctttgaaccagttgatcacactagtggttgatttactcacgcaggcaacacgcgatctggaatcaagaattgggaaaacatcagacacttatacttcaggaatagcagccttgaaggagttatctgaaatgctacaaaagaaagcctcctctgatctggagaagaagaacacttctatagtatcacaaatagaggctgttgagaaagtatgaacaaaatcgagctatgaaatactaattcacctcttgctgtgtttctatatcttagcatgtgttttggtaataattcaagtgcctttctcttcttagtttctcactacatcagcaacagaggcttctgcagtcgctcaggacatccacaatttacttaatgatcagaagaagctcttagcacttgctgcaagacaacaagagcaggtgctgtaaaaatcactttctggattcttgttagttttactatttttctgaaaattcaagtttgttttcaacttatccagggcttggtcagaagcatgagatctgcacaagaaatttccaattcaacttcaaccattttcagtaacatctacaaccaagcccatgacgtggtggaagccattagagcaagccaagcagagaaatcaagacagcttgatgcttttgaaatgaagtttaaggtgagctgggacaaactcttaaagacttcaattatatatgttctgagaggttcgcacaaactcatccgttttgatgaaaacaggaagaggctgaaagagaggagaaacaagccttaaatgatatcagtctgatattatcaaagttaacttcaaagaaaactgcaatggtgagtctttaaccattataacccccttaggcttgttttattcatcagttgaatcaaacttaaagactgatgctctatgtgtttctagatttctgatgcatcaagcaatatccgggaacatgacatacaggaagagaagagattgtatgaacaaatgtctggtatgcagcaagtctcgattggtgcaaaggaagaattgtgtgactatctaaagaaagagaaaactcacttcacggaaaacacaatagcttcagctgagtctatcacagtcatggatagttaccttgaagattggtataaattccatctccccactgctttctattcaaacctctcacttaatttgcattatgtcttctcatacaaagattgtatttattgcagcttgggaagggccaatgattctaaaacattgtgggagaccactgaaacaggcataaagaaccttaacacgaagtatcaacaagaacttaatgtcacaatggagtaagtttttaacttctgtatccgtgcatctctctgtttccacatcatttcactgaataaactatctacgtatagggacatggcaaaagaaaatgagaaggtgcaagatgaatttacatccacattttcctcaatggatgctaactttgtctctaggacaaatgaacttcacgcagctgttaatggtaaccacactaaacctctgttccattccctactcaagaactactcaaaaacgtcctaatccttggttttacagactcattgatgcaagaccgtgagaacaaagaaacaacagaggctatagtagagacttgcatgaaccaggtcacattattgcaggagaatcatggacaagctgtttcaaacattagaaacaaagcagaacagtctctcataaaagactatcaggtacttaagcaatcataatggaaaatctatagtgtgatctatatgtgtatacattaacagcaaagctttggataaaatgaacaggttgatcagcacaagaacgaaacaccaaagaaacaatccataaatgtgccaagcctggattcgattgaggagatgaggactttgttttcgcagaatactctcagcgaagaacacacaagtttggagaaaatatcaacaaaacaaggacttggcgaagctaacaacagaactccattcttggaagtaaacaaatgagtaaaaaagaaagcttatgttcatcagctggatgagtgtagaagattaagactgtgtaaaggttgttatgtagtagtacgcaagcttatgttgtcatggataaatctggttatattttgacattaaaccggtatgcagattgctgaaattttagattttatggatgacgtttccggttaaattggcttattttctcatttgagtcaaccaaatatgaaaaaaaagaaaagtaaagagagaacaaaaagaacacaagactttgcattgcttccacaagaaaacataataaagtcaagaataagcacatacctctaatagtctaatttaccacttttttttttactttgacttgctcttccataaaattcaattgctgtcgtcaagaatccgtcactggtgacgatttcagtattgagctcttattactatctagatgaacaatgtatcaaaaaggcttttgtttggtctctagtgcatgtgtttgaccaaattgaattttctcttcgaacaaggtaatgattgtattcgaacttggatctgaagattacttttgtattttagctttgcgcaagtttgaagatttatttttttataaaaaaaaagtcttgaagaatgtagttttttttttactatacaataaaatatgaaaaaacagtttaccaaaggggaagaattacttatttagagctctttaaggctgtattttccaatgattagtctaaagtacattgaaatccttaattttatattttttgattaggatacagttggttaggtgttgatataaattattaagttatgcctgtggcaagcaagtccatgagaaaccaagttgcttgatttattctgtgttgtgtacacatgtgttgactatgctacttttgttagattcacatttttagcagtagaagtttctaagaaatgagaactatgtgatgtattacgggaaagacgatattacccttgttattcaacacccgtggtatgcattgtgccggcggtcgaagggtgatattgaaaatgtcaacttgtctcaagtcagagaatcagtgctctggtagttgtgttagatagaatattagtttagacgacttcttttggtcaaactactagaaagtccaaccttttaggtaattgctcttatataaatatacattacttctaagttctcaaccttcattacaaatcctctcaattcaggtttcttttctaacaagcaaaaactccaacctttactttatttttgttttgttttgtaaccctctcagatcttaattctcaaagaagtatgaagagagaaagatctgatttcgaagaatccctcaagaatattgacattgctaaatgtctgatgatactagcacaaacctccatggtcaaacagatcggtttgaaccaacataccgagagccatacaagcaaccaattcgaatgcaaaacatgtaacaagagattttcttcgtttcaagcccttggtggccaccgggcaagccataagaagccaaagctcaccgttgagcagaaagatgtgaaacatcttagcaacgattataaaggaaatcattttcacaagtgttccatatgcagtcagagttttgggaccggacaggctttaggtggtcacatgagacggcataggtcaagcatgacggtcgagccatcgttcatctctccgatgattccatccatgccggttttgaaacgatgcggtagtagtaagaggattttgagtttggatttgaatctgactccgttagagaatgatcttgaatatatctttgggaagacatttgtcccaaaaatagatatgaagttcgttctttagttttttttttctttatctttaagaagacatttgtcccaaaaatgattcatttgtattgtaattcctattcttttaattcttcaaacgttaatgtcaacaaacttcatggtatatgtgtggggtccctactccctatatagtatattcatatgtgcgttcttggttatcatgtacgctagaaaaagattttaaactaaattatttagtttccattcctggaacaagtacaacatattcataagcgggccaaattttgggccatatcccctatggaattggaaacatattccttttgccttggcatgtatgatatgcaacaaaggatcctgaatatattacgtttatcatttttttgccaatggcttgaatttatattagatgatttttctctagacaattgcaaaattctattgtcgtcatcactatcgtcggatatttcttatttttgccatcatcatgtaatttaggatatgacatgctttgattattatcatttttttcagtggctttagttttgatgttagatattataaatttataacaagcttgatcctctctagttacctaaattatattgtcgtcaactcgtcatcactagtgtaaaaatatctaattaatttcttcagtttaattaatttccattcaattttgacaaaaagaagaaaacaaatcgaaaaaaaagagaagaatgaccgttcggaattaaaacaatgcatgagtttttaactcttatagctcttcagtataacttgttctttaatggcagtaaaaataaagaatgtaacttgtttttcttactctaatgtcattgtacagtctgttatatattttgcttctatttcttttagttacatctaaaaaataggtgtaagacacagttataggatttatagctataggtcgccaggtaaaatgtacataattatgtgggaaaaccttaatttctgcttctgcatttctgcttccgtctttcggcttctcaaggtttaatttatgttttttaacgcctttcaacacttaaagcactacatcgccgtgtttgtaagatactttctctcattccttttaggtttttctccagcgcgtgtttattaattagatttaatataaaatgaattttatcatctcagttctttaaatcttcatcattatttcgtcaaatacattaaaatagccagaaaaaatcagtatatagatgctagatcatgtgtttgtgtgtggattttattttcattttttcgcctcattcattatttcgcttgattcattattttgcctaattcattacttagatagtttttgtatacaataaaaatgcaacttttgtgttatacactagttttatgattctgaatgcttacaacttttgtctcatatggttttcatctcttttaacctttggatttttagatacaacatattagtgcagatctcgtacgttttgtgttgttcttcacagtgtagagatgatagataagagaagaaatacaacaaaagtgaaaggaaaagttcgagcaactgatgacgtggtaaacagtttttccttccatttttgtagattagtgatatctaaaatctacgtattattattaatgtaattttctttttttttatacatgcattttcagaactaccagatatatacaaaaaacttgtttttttcattaggagtgtgtaattacagtttgtttatttcaatgtgtgttacaatttttgttgttcttacttacacgatttacctaaaggttttcctttccaatattcttggaaaatagttcaaaataataaaatggttttgcgggaagtcactgatcaaggaaatatgggtaagtctttttactatgtaccttaacatttacttgatgaatgattttataaaaacgttaggtattagtacaagatcaaattaaaaggtgacgccattgtttagacatgtcttaaattagagaaacttaaccttaaaacttgacaaaaagtatatttccttaatttcaaataattcaaccttaaagcttatacgtttgttgttcgtccctggaaaaatttgtcattagatttcttataacgattttccttaatcaatcacaattacttttgtttcgtttactttttaatgagaaataataatgtgcatgatttaatctgaatgataggttactgttggaccatctcttacaacagaatgattgggggcccatttatacattcatggtagaattccttctggaattctcttcaaagcatctatttgcccaaattgaagaaaaaaaatcaaatgggaatttaaagaaatacaaaggattgataaaatttcttaaggataaagggctggttagagaagaggattgcaaatgctttaaagaacaaaatgacgtaactttacctttctaatattttatccttacagcctttttagttttttcccactcattatcctttctctttcttttcaagtttcacttttaaccaatctgagacccaaactgaatcccttaaccatacatgttgattagtgggccaaatttaggggcccagcctgagttagtactaatgattttattacttatgtattactaatgatttccgggtcgaatagcaatacgggtaacaggtcggatattttaaaaataaatctgatactcgatccttacgtacgggtaatagaattacattattttttacccgactaagtttactggtacccttttttcaagactggtacgagtcgggtaacatgtatcgtcctagttgacaaaattacataattaaatttatagggttcttgtttaatattagggttactgttttgttcatacacgcaaggcgaattcgatgggggatgatttaccaggtactgaggtacgaattcaactctgtaaaattttgtttatatatcggaacaaatccctaataaagttagatatttttcctgtctcagattggagaaataagctggaacctgtgtttttggaatttgaggatggttgtgttcctgaggaacattattatccgtgtataagacgccgtgaggatgaagagcccaagatctcggcggaagaagagtattacctcatggtgaaagaagtcgaggattccaaggttttcttcatgttgttgattcttggtaaaaactataaagacagattttagtctgtcaagttttctttatctgtttggagaattcatcttgtgtgttatatagggttttgacatcgatttcgccaagttccgctgcgttttcaattaccgaccagttgatctcgatgacaacgagttggctttggaaccagaaactaccagagagtttatggacagactgtgtcggaaatcccttgagcatttcaatgaaattcatagtacaaaatatgaatttgtcaggtttatcaaagccaatcatcacgtctctgctggcatgatgtatttcattacctttgaaggtaagctactttccaatgatgatgactcaaaacagttccaagctaagctctgctattgcggtggtacccccgaaatcatctcatgcgaactcaaaccctagagaaaaggtaaattcgatgcttggtctatctttgttttcttttctgttgacttcagtttgttactggttataaaattctgttcggatttgtttttggcagttcactccatcgaagcaccggagaaagaagatcccaagaaaccaaggtttatatatatcttgtctttgttactttgatcagtcttttcctttctttgtcttctttcttacggaaggaaggttcttttacactgtcctgaatgttactttttgttttattgacatctttagattgacacttgagccatctaatgtcagtctaatacgggtctgagtgggtgatcacacgcaagcactctcgtgacaattgaccgtctagttctatgatgataatgtaaacttgattaccaatatgaaacagtgtctttaccaaaaatagctaatagttcatagctaagctaggacccaaaaagatagaaaagtctatatgaaacagttggcaaactctgtaatgctgatttaatttgttacccgtggttcttgaaatagtcttcatggttgttctcttcgaactagctaggaaagtgtctctaatgcatcggtcattatgtttaaaaacaactgatgcaggagaaaacaaggcgttgtggagcctagtggtttcattctttccaaagcatgtatactgttgcatctgtgagtcgcaatatgctttaaatttgagagatagttagaaaagctgatgatagccacaatctaaggaaagatgaaacttggtacaatgtatttacttttatgctcataacattgtaacagatcaaagtatatcacaagtaaatagcagcagaacgggtaaactcgtttctttaatactagtaccaaagatttagcaagtgcaaaaatcaaggtcatacatgcattcgcttctaattacgaccaatatggcaataatacaaaacattagtacaataatcaagtagccttctaatagttgattttttttttaacactgtaattataaagtctgcgtcaactgagcttaactttgcgtgttgaagaaagtcaaaggtcctctattttggagcacgcaattaattgccaactttagcgaccaattaaaaagtgttttagtaacatatgatagccactacttctcatctaccactatcatcacatggtccacatgtagtatagtttactaaatattttcatgcgaacaagtacaaatatataaaagacaaacatgtaacatatgcatgcgcggcgtcaaacatgatgaatcattttgtagtattgtagaatgtagttcgatgtatcaagttttgattctgaaaatttggtgacttaagtttactgaaggactatgtgtttaattagtttttaagggactcactggttcagcatatatgtatgtagaatgcatgcgtttatatgagaactctcactttttcatcaaatttggacgagttttgaaaacgttacggggacagacatataactatatataacacatagcgaaacatggatccatgcatatgagataacacacttgtttctcatcatcgtatattcgtatgtatgcataaaacatattctccactagctaatctgtcaaatgcttgttatatattgctcaactttattggttagtgatggcccagtttggtgtgtaccactaaaattgcataatcttaaacaatacctaaattctagcattcaggaatttctttttggatgcatgaaatgctcaattctattaagtattagttgatgcatgaatcacgtatatcacattaacgtctatatatatcccacttatctcaacaaatcattggttataattatcctattaactaatattcggaacatcccacttaggtcggtggtggtgcttccaaaattttaggactctagtaaaaatggaaatcaatcccaacgaacccgatggtccaaattcgattcattgtctgcattagagatcgtaaagaattttttattggtcttagtgggttgtttagtcatcaaaataataaaattaatgtaatattcttctattaactatatatatatatatatatatatattaatattaatataatgcttgaataggctagttataagaggtttaaaccataccctgctttggcatgaagtgcagttcgtgttattctcaagcgatctttcacgtcattgcttagctagttactattaaccgaatgtcaataaagctcattgaaactcctaattcaaaatagtaattactagccatgttataacagtaaaagattccagtggccaaatcaataggatcgacacatgtttttggataatcgtccatgatgtagtaaactgatatagtatgacgcaaaaaatattcactacttatataattttgaaagatatccaatataaaatatcaaccttttataatttgtgaacgttcggtatggtatatatatatatatataaatgtaacaacgtttttttttcgttttttttatgtcaaacaaaatttctattcacttaaacatcaaaagagtcacggataggatccaataataacattttaagaagttgaatacattgagcaaaacatgtagtcttgtgattagtgttagtgatatcactgtactactaaattcaaactcacaagtatattatatattattagcaaaccaataactaaaatatatttcattcaaaaacaattaaccaaaatatataattcacagttaacacatatactattgttttagttagaatatatatgaaattactctagcttccgctgcccaacccaaatctcagcagttacttgtgattgcttccaaccataaccacactcatcggaatcgaggtcctaccacaatcacaccatttaattagtatgaaattgtgactacttaaaaaatagataataataatcttcaattatatatatatcacttgatatgttttatgaaaaaacaaatttccttaaaatgataattttatagtttatactttatatataacctcgttagtagttcatattatgtttaattcatttatttatagtagcatatatcttatgattcttttcttactttttttttatgtgcagcagatcttttcttacttaatattttctaattctctatcatggaatttttctaaataaaacagttacttgatgaaaaaaaaaagagttacttcaaattttgactaaaaacgaaataaagttccagtatattatataagttaactaatttatattttatatatttgtaactaattttttttctcagtaacttttcccatattgtgcttttaaggctaaatgcttttctagtagaaacttctaaggaaaaaagtgaacctgtgtgtcttaagaaaatatcttacaaattgctaaatgtttttttttttttttaacagaacggctaaatggttttcagatggaaagttctacgaataacgtacggggattagaattacatcaatcaattaaaatgagagcgatatttatcacgatttgcgcatattaaagaggcataactaagaaaagtgggtcactcacttgcctgccaaagctggccatatgagagcactttctcggagagtagtggtaccaacttccctctctacacaatcattggtttctcaagtctatcatcaaaagtaaaattgattaatggtcttttgtattaattatagacttttcttcaaaaataatctttacaaaaagtgttatatgaagccgtaaaacacatccgatttctaactaagtgtataagtaaaacatatatatacccgttacatctgtccaaaaaaaaaatatatatatacccgttacacatgtatatggtgttggttgaaactaatggactaaatttagcataagatgaccaaaggacatacatgagtttggttgttatgctattttagcgcttgtgtttacgttgttacataatagttagattctgaattagatatttcacatctacctagttccaatttatatctgaatttgcttctgcaatatatgatcatgcatggcacttttacatctcattaacattcataattgttttacattcttcccttttcgaaatatagatcggacatgtgcatctatttgggaacttaacttttagcaagtgagtttaatgattagaacacttgattctagtcactaatcactaatcatattggtacaactctaataattggattatactttcgttctttagcctttttctgatttttattctccttttgtagattattaaccaaccccacttttcattgttccatacttccccattccatctcaaacgctcgttagccttttttgatatttaattaattaacatattcttccaatcatactttaatattgtcagggattttgtagatatattcacctttgcaaagaaattaacaattcttgattagttatacgtattttcggtttattagtcgaaagccattaactccgagtttaaacttcgttcaagagttctaagaagtaagaaccctttattttttcttgcatcaaagatataccttatcaaaaaaattgtgatgatatagatgattttgataattaaagtttcttttatatgtgaatttcaatgtacgtcgtaacaccgcgacgacaataacataaatcaatatcctaaaaatcatgatatgatcatcataaattagtttttatctctttataaaacactaatcttcatttattttcatcaatatatatattgatgaaaaagttatatagacttttcatttattttctgccaataatatgtagaccttaatttaattacctcaagtttagtgacttaacaaaccaaaacgttatatatatgtgatactgaatatatgatagactatgactgttttatgtttaaacatagggttcttttctaatctaagcattagttcacaaatcacaacctatatactatccatactctctaatttcgagcgttttaatggctatactctagttgttcggttctaaattttttctgttttgttgtaggcaaaaacaatacaaaatttcttgttgttactcggatctaaaattttgttttaaacttagattagacgacacctagtaaaacaattgtgatcacgggtcaatatatgtcttaaattgtaaacttgagtatttgtccttttatgaacttcacttgttttagtcaataattcttttcctgtcgacctccttggtttattacttaatggctgaaaatgttactttaatgacacattcatgtaatcaagaattcaacttttattactaagattatagtattcaaaacatttttgttgtcaaattccatgtctgtacgttgacatatatacgataatcgaagacaaatgctcagaaacgaaatatggacaaatatgacatatagatcagtatcaagagatttgagataatgaaacattacttgtcgtttgtaaaatccgacgtgcctgttaggtcgcccgcattatttcaattaatttccacagacccgtaaaaataagccacagttgcaaaatgttaaaaacttttaatagtttaattccaaaggggaaatatataagcgataaaaatatgcacattggaagcttcttcgactagtcaaacgtctaaaactccgaaagaacaattatcttaataagttaattagctttagaagagagattaataattgttaatacatgggggaacatggaacttcatttctccttgtataaaatggatcgataagatcatatccatggtgagagagacaggagatcaataaatgcgagaatttaacctacctgatctatatatgttgcgttaatatacggaccgtagataaatcaggacgtgtcgtctaagattatgtgattagttggttattaattatatttaaatacatgtttgtggaattctgatttgtacgaagactaaaataataaaggagctccaacacatgtcctagtgttaagcacgatgacgattcgtaggtttttgtgggttagtcaacaaaagagccttcaaaagttcaattttgccgaggttttttttcacccatataggcgtctgtatatatagatggctgatggctctaataaagatgttaattaaaaaagtacaagaaaatgtttaaaacgttcaaggaaatcagtaacgttattattcaatggtgtaggttgcagaagtatatatatattaactaaacattcatgaaaaagtgtccaatatataactttgtctattgtgtgtaaactgtgtgaagataaataattggcttaaaccaataatttcttaggattgctgcccttttacatttttgaagcatgagaataatttcataattggttttatatttctttagatatattcccgaaagttaacatgtttgaagataaaagcaaaatagtacacattttcaaaagaacttaactgatttgaccaagacatttgtacggtatgtgtcaactctgccaaatgcagtttgatttgcagtattttccacgtctgaaaaccttttttccttgaaaaagcatcttcttttgttttaaggaaactaggtgtaaatgtatgttgctaatattaaatatcacaaccaaattagaaaaagaaacaaaagtttcaaaaaaaagtatttaaaactcccattttggtaagattcaaaatgttatatgtaccactgtgctaaaaagtttattgtgtcattcatatggtgaatcagtacatcacatttcatttatgtctatatttgtgaggagtttaataagtttcaaagaacgattggagaagacgattgaataattgagttcattctcgtaagtaattagttaatttgactatcgtaactaaatcctacatgtttcgattatactcataatttcaatgttatgacaaaaccgtgggctcaatatgaaacttgtgtcaagaagtcaaccagacaagaggattcatttgagaaatgccaaggagttgaccggaatttttaaatcgttggaaaatgtaattcatgttatgttattttgaagcgagtccaaattatgaatgattccactttaatagtctaaagaataaaaacttactaaggacctttcattcaatttatattttatttttttggatcgtattttattattatagattcaaatatgttaataagactttatatccaaattcatactaatattttgtgaatatttaatagacaaaaggtattcttgatccacacacatttcctaatttctaggtctcccataaccaaaaatatactaaatttccagtattacaaagaaaagaaaaccgtataacttcctttttccacaaaccttctataattaacacgattaccatagctttctactactaaccttcccatcctaattcacatttaaataaccgtgcctaggtaatgtaaagtatcattaaatactaaaaatatcacacataaaatattggtccaatgagtccacctcacacataacacaacttttataaattccaatttacagccgtataagtgcacaatgtttctcttcatccttcacaacttttctctctctccctcacaagtttctttcttctcctcaaaaatttaaactggcccttctccattttcgttcacaaaaccttgttttgtataacttatactcatgtaagttctgctactaactctgtaataacctttttgttccttgatgaagaagtcgttttcggacaagactgtttattgtttgaactcactaatgtcttcgcttgaattttcctgccgccttcttctttgttactcgctctgttttcttcttcatgaaagctctgtttcctcattttctcctttaacactatgacacacaattttttccatctcctctataataaatactttccaatttttatcctttatctcatcgattaaaactatcaaatcgatcttgttattgcaccttcctaattcaaagatgggtacgcttatatttttgtataattagcttttatttcgaaatcaagaaacaaagtttcaattttggttttgtctatgtttccatacactctgtttttttcctctcttaaatgctaagcttaaaccaaactccaaaagcatttacatctaaacatggcttcttccgtatcatgcatgatatgtgttaattaaattttccaacatgctttttacataattctccttaattaagactcttggtctggtctctgttttgttattaaaaatcttagtttctggtttccatacactctgttttacctctttgtaaaggaagcatctagattgttccgtttcatgacatgtattaattaaattttccaacatgcttgttatagaattctccttaattaagagcctctaattaatcatttctctagtttttaaaatatctgtctccaattctcctgcaactaggatttttatatacttcccgttgaatttcttagctactagtagtattatttttggttcaatttttgtcttcgttttcttattttacattttaatttctgtctttcttgcttgttgattggacccaaattgcttaagatatattattcgtcattatttttcattaatttcgctttcatttacgcgcactaatatcttgcttacctctaaatttgcagatcctcatcctttataatcctctagattgtggttctagacattttacaaacaacggtggcggaaaaaacggcagaacgttctattacacaaatatgggcaagatcttgaaatctaaggtacgttctgtaaacaatgaaactacatctcgtttattattctcctttactttctttgctgaaaacggctccgtttaacagtcttcttggccaagaaccgtcgtgaggaaatggttaaacctacgtagcggcgcttacgaatttcactctgattacccagtcaaaggtgagatattaactcgtgccgttttagatatttttgctcaaatttcttgccgtttttttaatattctcgtctgacttaccggaggtttttttttctttctagggatggagccaaggcgaaaaagctgctccgacatgatcgtgccggaaaattttcaaggtaaaaatataaaaactagctcatgaatttgatttaattatactactattgttttgttgcatcgaaaacggcgtcgtatctattgtccgtagaccgtactgaattgagactgtctccgtaccagataaagctttgggtccatctctaaccgtaggattagacatctgtgttaaaaacgacggcatataagaaactgagattttctcttgaaaatcgtgttttttttgtcggaaaaaaaaaaaaaaaaaaaacgagtttacaaatgaaaattgtatcatctgtatccacgtgtagggtgagagattaggtttaggcggtaagtttaaaaaagtctttggttttaggtgtacttgccactctcaccattcaccagtttttgttttatccacataatatctctgtctgattataatagtctaaatactaattaagtgaagtatataactaattggttttgtttatgttttgtggttgaaataggttggttgggccaaggaaatggggatttaaaacattcaaccggtgaacaacatgtgacacgcgttgatgacaaacttgatcttaagtaataaatacttccatgattaacctataatttagctctggtctataattagctatgatcattaacgtcgtaattgtttaattgttgatgattagaatgtttgtggggacatggaacgtgggagggaagtcgccacatgaaggattagacttaaaagattggcttaaatctccggctgatgcagacatttacgtgctagggtatgcatataatcatattaattggttttatcgtacttttaatatactttttctggagtaattataacatcaatactttgttttgtttaggtttcaagaaatcgtgccgttaaatgccggtaacgtacttggagccgaggataatggccctgcggctaagtggttgtctcttatccgagaagccttgaacaacaccaacaatttatcgccaaatgagctcgagcatacgaaatcatcacaacagccccgtttcagcttctcaggcctctcagatgataccccaatcccatgcaattcaactcctcctcgcggctatagccttgcggcgagtaaacagatggtggggatatttttgtgtgtgtgggttagagatgatctccggaaacgtataaccaacctcaaggtttcatgtgttggccgtggtatcatgggatatcttggaaacaaggttagtctaagtttcaacaaaactgattctaagaaattttgataatctgtatgcttggtatagctaacgatgtacaaccttgtgtagggctcggtttcgatcagcatgtcgttgcatgagacaagtctatgtttcgtttgtacgcatcttacgtctggagaaaaagaaggcgacgagcttagaagaaacttagatgtgaccgaaatatttaagaggacaagattttcacgttcttctaaagattctcgaccggagacaataatggaccatgagtaagtctatgaaaaattaatgttcgaatactagttttttagtaaagtaaacattttctaatcgtttaaatacatggttgtgttacagtaaagtaatatggctcggagatttgaattatcggctaagggcgagcagtgacttgcatgaacagcttagaaaccatgattgggaatcacttctagagaaagatcaggttaatataatttttaatttaaaattgattggtttttctgttatgattgcttatataagagtagttaaactaaaacatgtttctttcttttttctatttcagcttaagatagaacaaagagctggtagaatttttaagggatgggaagaagggaagatttatttcgcaccaacatataaatatcgaataaactctgataattacgttgtccaaaccgaaaaatcaaaggaaaaacgaagaactccggcttggtaagataattaacatgctctaaatattttataatgatgatgatcttaaacgttgtgtttctaatgttgttttcaaaatcatttatttcaggtgtgatcggatattgtggaaaggtgacggaatgaaacaactttggtacgtgaggggagagtcgaaattctcggaccacagaccggttcaatctctattttcggtacatattgacttgaagaatcaatcgaaccggaaaactaaaccggttaaccaaaatcatcgtccaaacccggtattgacttatacgtgccacgggaaagttcaagctgaagagatcttgttgctcacacgtgcacagagttgtatagatacactacctagacttatttcgtccgcttcctaattttcttttgttttttgtttcgatttctttttggatgttttcatgttgacaaagaagagatgacacatggattcctaggattggacaatggagctttcaaatttggcaaaagcaggattgttttaaattattttaatattgggttaacgtctttttttgtttgtttccctctattagctaagttttggtttagactttagatcgaattgtggagtttttagtttttgactttgtttacatcagcttttgtttatatataataaaattgaaaaatctagttatattattttgctattttccggtaattagacaaacttcattaatggacccaaagatccttgtacaaaaaaactatcattattattactgatcagtaaaattaatatcccctcggtgaaaaaccgtaatacgcccctcgttttttcacatatacaagctaaaactacaacaagtgggaacttatcctgttgagaatcctatcttgcgaaaagcgcaaatcactcgagcctctttctctagaagtgccatctatgggatagctcaagagcttagaaacacactaaaagatatgttgtttgattttatcccaacaatgactagctcgtctatcaactagtttatctttgcaaagtcctgtactcattgtttgtaaagtcaaccaataaaaaataaacgttgttttccttccattgaagaaatgatatgagaaaatgttacatggtcttcatttacataaactaaagaataaagatggatctctgtatatattcgcaactgaccattctgttctctataagtctatacgacttttccttctttttttctcccatcttgtagttagtgattatattctacaattgctctgcaaaatagtggacaacatagaaagctggtatacgttatggctcatccatgctaaacatttggaccgtgattgttaagttagactgattctatcactgttcttctttgttctttttgcttgcttgtggttgcttgtgctaagtcatcatctatttgcggcgtgctaggatattcataatctttggctttgccccatatcacaaggtatagacctacacatatgaccgtagcaccaagagccctgccaaagaacaagatcttttcattcttttttttttctttctatcaaagttatctaactcatggctggtgtttcagtgtttttacataccttccgaggtacatctgctcatcaaagatgatgctcgacataatcgccacaacgatcatacaaagaggtttgaaagctgttacaaacacaggacctctggttttcatcaccactcctccaatgtagtaaccaagcgctgagcacactatcccctgcatgagttttatgttcaaaacaatttgacttttataataaataacctacaagctactctcaaaagcactactttattgtaagtctaaatcttacactataggtgattgtaagaagtttagtgtcccaaccaatggcccacacgctaggatttcctttctccatcactaatgctacaactactccctctattgtacctattaggcatatccatgttgcgagagagagctctgcagggtaagtcttcaatgtgattgcctgaaaaaagcatttgattcatcgtccaaatcgatcgacaagtgtatttttttttatattttttgaaaatatccttacttgtagtatcatgaaacatgcatagctgaagcaaccaattgtgactaaaactgcacctttgatggagctatgaatatcggtcccaactgtgttctgtgcagagggtcctttagtccagaagaggtcaagagctggaccttttacaagtgtcatgaccatgattcctccaactgtagttactgttccaaccaccttagcggcactcctgatactttgaaacttcacgctttcgagcctgaatattaaggcgaggatgaacgtgactgcaggtaaagtgttgtacaaggcaattgcaaatgtagctgtcgtgtatttcatcccgagattgaataagttttgagcaatcactggactatttatacgcaaaatacatgaacgaaatggaaaataaatcagattcagtcaataaaagaagagatgtgatgtctcatagaaaataatttgaagaaggaaaaaaattactctaataaaccaagaatcgctattttgaagaaaatcaacgctgtcatcttcggtctcactatcctgttttttttcatcgagaattattaggaaatccaaaattgtgtagatcccgtactctgcacaactggttcctaatttattactggactacaatagtaattactgttgcataactacttttatcggtttatgtattaaatgttgaactcgtgtattttgtaaagaaaacactaaaatcttaagtactcagatttaatgcatgatattggcaaaactgttacaattcttgtttttaacatatatgttaaacgtccaagaaccatccacaaacaaaaaagactcaacattgtattatctttaatttatgtatctgaaaataattcgttttgtagaataaaagatttagtaataaaagtagactcgattcccaatttatatcaaactatagagctgtgattgttttagacgtaaaaaccacgtttacttttccgtttgcgtttataatgctgcaaacgcaactaccaattaggcctgaatgataatctgctatcatggtcttgaaactactcgcaaaccaaacattgaattatgttttgtgagagaaattgaaataaagatggaaatgtagagaatacttgtcgaagtagaaggcgaacggagccataacaacggtggcaactccgtgacggtagacggaaagaacgtaaatgctcatgcctttgtttaggacatcctttgtaagaatatccattcctgcataccctatttgcaacaataccattaaaatgaatggtagtgccttcttcatacatgccatctctgcaagatcatttagaggatttcaacaaaaaaatagaggaaagaggctgaaaataatcgatggaagagataagggggagagagaaagaaaaaaaagtaagtggaaacattagaaaaaaaaaattcaatggcacaaatagtaaataaacaaagattttgagagttagaaaatcttctacatagtgttgcacagtaaaacatgcctattttctaatttaaatattgaaactgcccaaattcctaattaagttttaagaaaacagtctattttgaaaatttcccaaatatattattatcacataatatgtcaatatgtgtgtaattttgtattatttgtttgttatatactttgaggcaagatgccaaatcctacctgaaatgctagtgctgtggactcacctatttaacttgacctaagtcgaacgcacgttgtatcaatattctctcattttctctatctaactagtagtaacgttatggaagtaaacagttggttcttaatagcacaagtacttcgtttgtccgtctgtagaacaaaaggcgacgatgtcagaagaaacttagatgtgactttgtacccacaaaaaaaaaaaacagatgtgacagaaatatttaagaggacaagattttcacgtttttctaaagattctcgatcgacccgaaacaataatggacaatgagtaagaaattatgaaaaatgtttgagtaacagtttttaaacatatgaagttttcaattcttaatcgtttgttatgtggttgtgaattacagtaaattaattaaattaatacggatcggtagaaactctcagttacgtaaaataatattatgttgccacgtcaaggattagacagaagatttgcttaaatctctagctgatgcccacatgtacgtggtagggtatgcatatctaatattaattgagaaatcagtaaatccaaataattaaattaaaaaaaattgataacaaatcttttaaatgattattatataaatatagataattcagtttgttaccacttgaatggataacagatctttcaagtgctagaaatggatcagaaacacccataaaactagaccgataaactcttaattgatcaattaaaccccaaaactgagctgtgtaaacaaattcaaataggaaatcatgtaagaaaaaggtagacgaagtccaatgagagatttatcaaatataatcggaggagattcagcgcaagaatgaagtacgtcaacaaccaaccggtgttgaaaagtgtttcgctgttttgctcttcaatcgtatttgtgagacttttttttggataaagtcaagtgcttgatatagaaacggcgtcgtaatacttaaattagcagcaaaacagagaagtgctaataggtgagaaattaaatcttgtggaaaggtgataggaggaaacaaatgtggtacgtgagggaatagacgagatcctcagaagtcagacctcagacagaccacataccggttcaatcactattttctgttcattgtcatttgactcaaagtcaaccgaaaactaaaccggtttaccgaaatcattgtcccaaacagtcgatatattctctgtttaggtgtagccaatacaactgcaatatattcattctgtatttgaatgaatccaataatttcatctttttttttgcatctttagtcctcttaattagacaattattattctcccatggtagttagcaattctatgacattgtgctctgaaacataatggacaacaaatgaaactgctatacgttaattactcctccatgaaaaacatttgtgccgataccgttaagttagactgtttctacagctgttcttctttgttctccttgcttgcttatagtaatgacttcatgatcaacattatccttcccgtttccgcttagttctagctttggttgtgctgattcgtcatctaattgcagcgtggaattatatttgtaatcttttcctttgccccatatcacaaggtataatcctgcacatataactacagcaccaagaaccctgccatagaaaaagtttttttattacctcctttcaatcttggtgtttaaaactcgttttagatgttgtttgtgtcttgcttaccttccaaggtacatttgctcagcaaagatgatggtcgacataatcgctactatgatcatacaaagaggactgaaagctgtcacaaacacaggacctctggttttcatcaccactcctccaacgtagtaagccaatgctgagcacactatcccctgcatccattttatattccaacaattttaagttatcaacatatatggtgtagtccatgaaatcactagtctactgagatatgtatgcttacactataggtggctgtaagaagtttagtgtcccaaccaatggcccatgcgctgggatttcctttctccatcactaatgccacggcggttccttctattgtccccataagacatatccatgctgtgagagagagctcagcagggtaagtccttaatgttatcgcctgaaaaacattgattcattgtcaaaattgatccataagtgtttttttatatattttttgtttgccttacttggagaatcatgaaacatgcatagctaaaacaaccaatcgtgaccaatactgcgcctttgatggcgctatgaatgtcggtcccagctgtgttatgtgcagagactcctttggtccaaaacagatcgagaactgggcctttgacaagtgtcatgatcatggctcctccaacagtagccaatgttccaaccaccttacccgtgctcctaatgcaccgtagctttactctttcgaggccaaatatataggcaaggacgaaagtgattgcgggtaggacgttgtacatggcggttgcaaatgtagctgtcgtatatttcatcccgagatagtataagttctggtcgatcactggcctgttatgacaagagacatgaaatgaaaatttatcagattcaactttgaaaaatttaaacagaatgaagatgaagaaaaataaaatattactcgagtaaaccaaggagtgatatcttgaagaatatcatcagtgtcatcttcggtctcaccttcctgatttgttttacatcataaccatacattacattagaacgtcgaaccattaccaaaagaaaaaaaaaaaagaaaaaaaaaaattccaaccaaatcattattttatttttattagggacattggattatatgagaatcgttgtaagaaaataatatttgagaatcatctaaactaaaaattaatttcaataaaaaaggaaaaattgattaggacaaatattctccatggatagataactagaatcatttcaaattagttacgtacaaatctgtgtaaatattactggattacagtcataattaattgcagaagcatacacacattttgattacgcactaaaaattgaattagtgtttctttttgtaaagagacactaaaaaagtaaggactcacattcagtgcatgacattggcagaaaccacacaaaaaccaaatataaaacggttacaagtcttttgtcttttaacatatgagtgaccctttcttatcatatattacgtcaaaagcatcatggtttctttttgctactctcatcttttcaagcttcaaacactaagcatcactcacaaaaataaattagacaacgtaacactcaataatatattaaatgattattcatgtttttgatataatctgttttgtagaatatggtcacaatttttattttattttgcgtttgcacaccctgaaaactcaaaacacaaaataataatcctagctaggcaaactaatttcatcagaatatatcaaactagctaggttgatattctgttgtcatggccttgaatctacctacttaaacaaaacattttacttatgtttatgagttggtacatatgtaaagaagggaaagtagagtgtacttgtcgaaatagaaggcgaacggggccataacgatggttgcaacggcgtgacggtaaacaacaaggacgtaattgctcatgcctttgtttagaacagcctttgagagaatatccattcctgctagccctacttgcaacactaccattgaaatgaatggccttgccttctccatacaatccctcttctttacttcctccatcacttaagagcaataatctccctctctagttagcgtagaagtaatagatatatggagagttttttttaaaaaattgatatgagttgttatgattgtcttggctatctctctttatatagagccaaagttaaaaggatgtgatgtgatgtgaacattcttctctctacgtaaacttattagtgtaaataaatatgcgtgtaaattttctttttttcctttttgttatgtattttgaggctactttccaaaccgtaccctgaaatcatgggacttatttctttaccttatcaacaaaaagacatagaaatttgtatttgatcgtcacataaccgaactaattaaacaaaatacagagtgccgtggattcgcaaatttcatcaaagtcgaacgctagtatcactatctctcatctgattgattttcatgataataacattgtatatatgttaccatcatgtcaactaccatcatgtatttccgcataaaaaatgtattgttaaaaatgtatcatccgtttcatattacttgatgtttggttttttttttttttttgttgtttcattttgtatgatgttttaatttttcaatgtaaattttactgtctttttttattgtttttaattctttctattcttctatttactttttcactggttgaacttttttagatatgtaaaaataaaattttagtataagagagatataatttcttaatctatgtacaaagactttatatattatttaaaatgagccgagagagtatatatcaaaaaaaaaatattgacgtaaatgctaattttatttattagattattaaaacatagaaaactgaatgatttgtgaaccatagggcatagtttaagaatgatttgataaataccaattacaacacaaattaggcctctaatccaagagcttgtctgtattggaaattagagaaaattttaagtggtgtttcatgatttttttctgtgtgtgtgtgtgtgtaaaacagtatatatgatattgtgccgttttttgtgaaatacaagagctgttactcagaataagagttgtataatttgtttttcatcatttatataagaaaaataatttgtaaattattccaagcccattcactaatgttccatatatgtatcttcgcctaactccaggagaggtgttgatgaatcgagttctttccaatctataaagtataaaaatgaactaatgattaatgagtcacgatataccgacactgttgggtagagtgatcattggttagatttgctttttttcctttttaattaggttattttgtaatttattttagttcatggaatatttattgatgtaagtgcgtataatcgccaatattttgggtcctttgtactgtttccattgtgccacttagtttctggtggaatcactttcattattttcttccatataattttgttatagaaaaaggagcatcggttctctatcaatagaacgtttttgattcattattctgcacttggaaggtatgaatattcacgatataagacgtatatcaaatttaaagttgttttttttttggtgagtcaaatttaaagttgtttggctctagctgcagtgggctcatgatattaataaatctgcaaaatttatttaactcatgagctcagtttcggtgctataataatgctataagtgatatttattgatgtaaatttattttatttatttttataatatgatgtaaaatcttttgtctcaagaaatatcataatcttaaaaattattcataaaatctagagaagtttatccacgttttgcatggacaatacttatacatttttataatagaaatattctttttaaaacgttgaaagaatctatttaaacttaattaaaattaatataagtcaaaagttggttgaacacttgaaacctatacaaattatggataatagaaaaattcaggaactcaaaccagttttgtttaatggtccctctccctcttttagtgaacgttgaaatggcacggtttctcttcacttgtttttcaagatagatgatacttaactaaatatactatttaaatatttttagtaatctacatacgactagaatagattatcatctaattattaagttcaagataactggagtaatttagttaagtatagtatcccacaatcctgtatattaaaattttaatatggagtaatttagttaagtatagtatcccactatcccaaagaaccaaacaatagatgtagatatcatagtttatacacaacgatttagtttgatcctttaatatggttatatgggtatacgtgtgtattattttaatgttgtggcggttataagttgtaggattatgaatcaggattaaaccttttgatggaagttagttgttcatcaagcgaaaatcagcatctaagttcaaatacaatccagattttctatgtctagcgagttctcgttgaacataaagtataagaccatcattattgatagtttcttaggttagttctttcataaagtaggtcttaaatttaatgttataattcaattaattgttaagaataactcttatataagagccaaatctaatatttcttaggttaattcttaaataaattaggtattaaatataatgttttaattcaattaatcttaattcttagataaattaagtattaaatctaatctaatattttttaggttaattcttaaataaattaggtattaaatataatgttttaattcaattaatcttaattcttagataaattaagtattaaatctaactgtttgtcatatttgtttaaaattttatgtcatgtatgtttcaaattttatgagttgtaataattattaagttttttttaaaattataatgtttctaattttttttttcaattttttttttaagaactcaagttaagagtccaccattgcatattgccaaaatttcaatctcttaaccaaattcttaacttcaaaattttcaaaatcaattataaaaatattcataactatattaagattatgctaagaaactaccattaatgacttcatgttccagagacatgtaatagtttttattgaaattaaaagaaaaaaacaatcacgatgaaacatgaacctagtcaagaaagacatcacttatacatcttcattgttttttttttgaataaaatgtgaaaagaatggagtctttcaaagttgcgtcaagtcacgcatatatatatccaccataatatccagtatatgttatgacgtatgcatatgaaacaactcttatgaatctacacatcattataattttaatttgaccaaatcttaaacgtactttgtgagaaccaataagagacgtgaaaaataacactgaagatactaaataaacgtcttcttttccttttgggctaacaaaaggtaaagattccgtgtggtgcaccgttttttttttttgtaagttgaagtttgttttttggaataagaaagatataatcgtaattacctaatcttatgtccttaacaagaacataaattccaagaagaaaagtttctttcaaccaaaaaaaagaaagataaaaactcatatagctaggacgtccctttctaaattttctacgaaaatctacaatgtccttttctatgcgggctaacgtttcgatgacctataatatctactaggtatatatgtggaaggacgattcgaaaccgcatatttaaggctgttttgaaagctccaaaattaaatgtaggcatcgaaaggaaaaggtgaagaatgggatccattagtttatatggtcaaagatacataaaaaagaaaagaaagataatgatcgtcttcttctgatcaagtttcccaattgctccttttcttttaacttgttatgtgatgctttctctcgcattattgtctactaatgctttcccccgcattattgtatgctaatgctttgggcggtcctcattttaatacatatgggctttgtcttttcttttaatactttttcttattattattttttatcagaagttatacaataattacgagacttaatattcttttagcacagaattttatgatcatctatttagtggaattagattatttatattcttcgaaatcattagaaatttgaattggatttgctagtagatatcttcgatttttggctttagtgtaagtgtaactattctgatgatattagaaagtagaagaagataaaatctctaatttctggtcacgagttcgataacctgttttttattggctttttctttaggtaggaagttttcatgatattaagctacaataattcatcgtactcttctttgtttatttggaaattaaaataccacacacgagcattatattccacttcttttaattgtatagtcttacaaattgttaggaatctcagtctcacatatgataaacataaagtactatacccttataacttataagaattttaattgttctgtttatcaggtttccctttatcagaagaaaagtgtatggatgttattcaaatctggttctaccttagcgaaatatggttgtacttattctaccttttattctggttctggttctttacctatttggcttgatcgatacttttgtaatgactctaattgattaatataattgttttgacgtaaaaaaaaaaaagttattcaaatctggtaaaccatattgatcaatacaattctaatcgaaccgaatttttttaatcatatatataacaccaaccttacttgattagaatgaatttattgttttatatgaaaacaaacaaccttaacgaaaacgacaccagacctatccataatatattcacttttacttgttttttttttttttaaaccaaaaacaaagaaacatgaacctagttgcgacttgcgagccatatacgaaaatcgtaatgtttgaggttacagcttatgcacacagtcatccaacgcccacaaagttaagtcatacgtgctacagcttaaatatctttgcatcacgggttagactatgtagataagagttggacttggtgagtgttaatactataatctaaaagcagaaaatgaagttactaaataaagatgtaggcaggaaaatagcaataattgctaattaaaaagatgagaaaagaagaagtgtgtgagattatggagaacagatctaagtgaagtagttggtgattggtgggaacataattactttggagtgtgtctgtgtctgtctcaaatgtaaaatggtgtaagtcgactcagacatcaagtcttatcacccacttgtagctttgtttcttcggtgcgttcttcatcagatttaacttccttgacctatctataaatcaccacccataatcctttttgctaatagataattgatagtattaatcatgacacaagagattcttcatagaatatgttgttaactaatcatgagagaagcgcattcatattttttttttttatcatatctcatggattttttgttaaaagaatagagatctcatttggttattcgtgttgaatattaagttgataaaacagaataaaaatgaaaaagaaaatggacattgtttgaactttaaaagtatattgtgctcacctaaatgctaattaataaagatatatggcttgctttattaatatggaatcggcaaaaataaaagagaattaggaatatatcagagacaataggcatcacttacgacaaaaaagaaagaaagtaaaagagagcccattacagattttgaagacgtgcaaataatttccaatcacataccaaaagatttttcaacaatcctaacctgtcttctcttttttttctttctctttaattgtttctgaaacatcaggtatggtttagataataatatatagatatggtgatatatatatgtgtcggtcacattcgggattaaacgttagtgacgaaactaaagcaatgcagaagcaccatatcatagaaaagaacttaatagtgcatttgtttcttcgccatagcgagttacgtttagtgttttaagaaccacaaaatgctgattttgctttgcttgggacgttgcagaaggctggatagcttggttcatcatgattgtttgtggctagctataagtgcaagaaagaagaagttggggtcacgattaaaacaaaaaaaaacaaaaaatgacacaaatcgtaagacgactgtaagtgatgttgttgggatcagataagtgatgttggaatccacaatgcatcttggtaagtggattgggattagggtagggtatggactaatattggtcagatgtcaattaacccatggaaaaaagaatccttatacctttgtcattttactacattccacacatattttcctattcactacttcgttatactacgaatagttaattttgttaatacacagttttatatactccaagacatatacttagtaaaacttaaggtcctctacaagttgttagtctaagcggcactgggcttaagtgttcaactccatgattggttaatgcatggaaataagtataaagctaaggagctcattgatagaatcatacaaacctaggccctgacgtcaatatctgctagactttgcttgatatatctttaacaattaagaaggaaacttccatcaaagtcagccaatggaatggatcaacccattagatatatatgctcacaaaaaaaaattgattccatattcatttgcaaataaaaaatgaagtgacgtcttaaaactcacgtgaaaaataagctggagaatactactacacatggatggagaaggtagacagtagatatactcttttgatattgaatcaaatctgcctcttgttccctactagaagaatcttgttgacattgttagaagcgtgctgctcaatgttacggatcggattcctgatgtctactcacagtaataaaaaagaaaagaaaagaatgaatgtgatcttagtagataatatttgctaactaatatgtagaagtaagagaaaaaatagatctgttgcaaatgtaattttttgttgcacaaggcctgaaattgaactaattaaaactgtgatctaaaactaagagtaaagataatagtttagtttagaaagatgattcaactgtgacttgatacacaagtaaaatgccaatagctccaatatgtagtatgttacgataagatcaaaccagttacgcgatatttccagattcccaccataataaagaaggaacacatccataaaacaaacagctaaataaaggataaaaaagcaaaattaagtggatagattcttagagaatatcacaactaaacatgttgtgattataaaaaaaacggtcttatcacaaatctgatgcttaattcacttcccatcaagctgaatggtccataacttgaaattaatattgtcaacacgcagttccactaataagtggaaatagacaaaaactttgtctcaaagaaaggagaagcagagagtttttgctcgttggcaaaagctgtgactgtgatgaagtgaaggctttagcctcactagtcatgggccttgagctataactttcagatccagcccaataaaaggagcgatgcatcagatattcagatggcagagatcctaaataatctcaaccgttctagagatcctaaataatctcaaccgtttatttatttaagccacgtcatcgatcctcgcgaaaaacaaatacccatttacaagcagttacatatctgtatataaacaattatcatcattcagcatcaacgcgtctctcaattctcacattctcaaaatcactaaaatcaaactcaattttcatcaaatatctctaatggcgccgaaagcagcggagaagaaaccggcagagaagaaaccagccgggaaagctccggcggagaaactcccaaaggcggagaagaaaatcagcaaagacgccggaggaagcgagaagaagaagaagaaatcgaagaagagcgtcgagacttacaagatctacatcttcaaggttctgaaacaagttcatccagatgttggaatctctgggaaagctatggggattatgaacagtttcatcaatgacatcttcgagaaacttgctcaggaatcgtcaaagctcgctaggtacaataagaagccgacgattacatcgagggagattcaaaccgctgtgagacttgtgttgcctggagaactcgctaaacatgcggtttctgaaggcacgaaggcggttaccaaattcaccagttagggttttcctgtaaatttccggttaagtgtttggtttagactcggtttgtttagatgttttgagtttcgtgaattgtttgatgatcactctaatggttcaaaattgatggttgaatttgattcttcttcttcctttcagtgatttataattgttttatttaacgtttgagtccctggaatttggataatatgcaaattgctccatcaggtatttataaactaatttctatccatcaattgcgttatagagttgcgtttgtgtgtgacatcgacaaaacaaactaaacgctatttctctaattagtggattttattacaagagaaacttgttatatcgtcgtcttctacaccaacaggccgttgaatcatgagacgctattgataagaccgacctaataattaggtagatttttttggtgtagtttatttccagtctattattctcagcccattagacccaaaaggaaaatatcaaggcccgtaaggaaagtctaaaaagataagggacacgtgtacagtcataaatctatctaaaggtaggccgccacatctatcaccgttggatattctagtttaaaatcgtcatcaatcataattattcatttcttcttcgtcttcttcttctttctcaaattagcttttctttatcgtcttcctcaagcgtgagattcgttgtggatatagtttttctccttgattctctggttctttccatgatccaattttaagggtttcacggcttcgtttttttgggtatatctagctctatcgttcgtggtggttttctttctggatcaaagttttctgagatctctgcgatttctgggattcgaaaattggagaattagggcttttttacggtaacagggtttcgaagagcataagataagaatgccttcggtgccctctaagcttcttcctctcctgtctttgattccttcgttgactccttatcattctggtttgagttctaatcgtttgaaacctcttgaaaagtgtgattggcgtggtaatcttagttaacatttcctttccttcttctctcctttttaccctttcttctctcgccctcgtttacttcttgagattttcttagctcgatttgatctttggtgctttaacttctggcggtgtttgatttgcagcacaaaaaggtgattttttttttgtttctttgacttctgcaaatttaattctgttcaatttgggatctaaacacatagtctatgttttaattcatgggcttctataatatcatgcgagtagagtgaataaaatttgagcatgagtctttgttttcgttgtgtgctctaaagatcatatttactgatgataactttaaatttgtttgtgcagttactactactactgtgattaccttgtactgttagttggatatgagctctgtttgtggtaagttggatttcaaagatgcagactttgacatctctacttcgagtcccacacaatgttctaaaggctcggagcatacctcgtttactggctctgaagattctcaggagtctgatggagatgaaactggttatatagacccaactgtgaatgatgaaaccgctgttcaggatttcggcaaatctgttttaagtcctaactcttctgatgatgaagacaaggatgagaaccttatgactgtaagtatcatcttttgaaagcttgaaagatcacagtagttagttgttttgcctaggctcgtgtgtcattgatatttgccatgtgtggttgattttcactgaaccagtccagaaagttttagaaagaataagtctccatatatgtagtccaagaaaggaggaaacatttgatttaagaaatcagtgtctctggagttccatagtttgtacattagtaagagttttaagagtcctcggaattgttgttagtcagattgatttcatagtgagatccttgtcatatctctcaagtcaaggctgtgtgttcctactctatcctgattgtttctcacatgtttcttaaattgcagcagacaccaattgttcttatcccagccataaaaggcagtcgagagaagtatggcttgtcactgaggaagtcgagtgtttcatggggggctgatgtgtatgatcctcctccctcgatagcctcccacacagtcacaagaagcaagaaacagcagcagaaatccaagagcaaagacaaccacaggaagactggaaagaaaggacagaagtctaaagacaactcttcctcacgtggtggcagcagcaaagacaagaagcaagcttctcgcaaacacagtcgagacaaatttgattgggtaactcagatgcctatagttgcagcatcttcatgaatgagtggctgctagtaaccaagcacattttcagtttggcttcctcttgtatgataaataatcaaatctctgtgtgtgattcatgttgagtttcgtaacttttcagtttttttttttatgggtaatggatgatccttgacactattgtgaagattttgttgaagtttgttacttttttctttttggttccagttttcacttttgagaataagtcaatggaactttattgttgaaacgttgtccgcttatttgaaccaaattcagtttataatttgagatataacacaaaaacagtaaatgaaactctgtctctcggtctcagttctatgaggtgtactcagcgttgatcttgacatagtcatagctaagatcgcatccccatgcctttccgatggctgcaccatcacctgttcgtaggacaaaaccacactcaggttcacaatacatggttgatttaataatgctagccaaatgaatctcttacctacggatatatcgattgtaactgttccgtgaacctcaccggttttcttgaggtagttacttgctccatccctgcgtatatacacatgtataagaacatgatcgaacttcattttcccaatgaaagacatatcagttgtaagataaacctgtcaaacggaagaggttgaccactctccatgagtgagaactcgccgagggatatcttcagcttatccatctgaaaagaaaccccggcatagccagcagctgcagctatgcgtccccagtttggatctctcccataaacagctgcctgtcacaccagcaacaacagacgtttagtattattatttagaaacaagaaagctccctttgattattcatgtatacatctaggatctcatactttgaccagggaagaggaagccacagagcgtgcaattttcgctgcttctgcttcagtttctgttcctttaacagttacctgttgatatttgtgttattggttaagatttgttttcaatcaaagggttgggaataatagttttattttgtgaacctcgatgagacatgtagcaccttcaccatcccaagctattgatttagcaagtccttgcatcacctgaaaaagatgggctccatgttaagtccagctcttgaacaactgttaggaagatagcaaaataacatacataccgcatcgaggcatgcctgaagctgtgcagcttctttacagttcaaagatgatatagaaggtgatccagatagcccgctagctaaagcaatgactgtgtcgttagtactcgtgtctccatctacctataagaccatgcttttatttaatgagactggaaatgaaataatttaattacaacaatgtttgaaaattgaaattgtgtaacatacagtgatctggttgaaacttcggttaactgcaacctttaccatctttctccagatatcactttcaactagtgcatctgttgtgatgacctgagaaagataaatatatcgatttggaatcgtttaacatcaaagtgtatgtcttaatataactacacaggcaaaagaaagtaagagctaaaggacatacacctaacatagttgccatattgggatggatcatcccggagcctttagccataccaccaactcgaattttgattccaccaacctgagcaatgtcaaaaattttgtaagagatatcaatgctagaaatagagtatacaacgtgtttcttaaacctacctgtgattcaactgcaacactcttgcttacaagatctgttgttgtgatagctacagcagcagaatctgccctgcatttcaacattcatatggttatgcccaatggctaccaaagaaagtgaagactgtgacctacgaacttaaaagagagattgagaaaagaagattatactcttccacagagtctgatctcgagttgactagagttggaagtgcgtggagaagctcttcctgcaaagattcacgagtaaactaactttgtcaagcacttgcatggaggaaaaatgagaaagaaataagttataccttttttattctctgaccgataacaccagttgactcaattaacacttcctctggcttcactttaagtagctacaacggtaaagaaacaaacggtaacagtgttgaaagatacgaagtttcgcgggagacatgggaatgaaagacaccaaaagcataccgtcgcaatagatccaacacaatctaacatatcttggtaaccagcatcaccctgaaaaacgtataacaataatgagtgatccatagctaacaaccctatagatttcaggctacttcaaaatcatatgaattaactcctaaacaacacagctcgagatatcttaccgtagctgcattggcctgaccggcattgatcaacactgcacgagcctaaagaacactaaaagttcaatgctcagaagcacaaaatgcattgttctaagtccgaaatccaattaatgacatagaggagtaccgttttcgaagtctcaagaacttttttacagtaaactacaggagcagcagcaaccacattagtagtaaacacacctgaaaattattttcaagataaaagtcaaaaaagcttgtttacatttcaaacaaacaaaaccaacattaaaggagccacaaaagccagcattggacctgcagctacagcttcgacatcacatgttacaagagcgagatcaggtttcttccctgcagctcgtaatccagcatacataccagcagctttaaaccctttagcagctgtaactccaccagctatctaaacaaaacactcaaattttcagactttgatagcaacttctcgaaaagatttctaattttatatgcaattcaaaacctgtttccatgacccttgaggtagagaaatcggagccgctggtatgttaccggacgcctcctcgacggtagttgccactgcgaacactcttaattctctccgtgaagacaccacaaaactctgttaagaaaatccaaagttttaaacttttcttcttaattggcgacaaagcacacacaaaagagataaagaatgagagaagagaccttaggcgcgaagaaatgaggaagcttgaaagatacgaagtgagtatgagaacaagaatgcatcttctgagaccaatcgccgaattgattgtacttttgtctgaatatcaaaccttaagttacagaatgattgattatacttttgtctgaaaatcaaaccttaaaccctagaggaaagtcacagtaacagagaaaattcactgttgggcgttggcagagaaagagaaaggctgtgattagcctaaaacgctgcgttttggtcattattattttattgttttgtgtgcaaagcgtttttgttatttaatctgcgtttgtaatttgttaaagtgaaaagagaatgagttgttgttgttcgtttgttaggtaacttgttattgcatcatatgatagatatctcgaaaacataagttaaggtccaaaggatttgtcttttggctccaagaaattattttcatttcatagcataagtagttggattttgttcatttacaccatccgatggttttgttggttgtgaaaccagattcggaggaaggccgaagcggttcctgttgcagaggccgtcttggttctctaggtcttgcaggatcaacaaaaattacccaaccgtccaagaactttgcattcatctctgccttggctttctctgcatcttcaattgttgcatatgtcacaaaaccaaaaccctttgatctcccggaatctctgtctgtgatcactctcgctgcaacatgaaaacaaaacctattgatctgatgctctatatatattggattaaggaatccaagagtaacattaccatcgacgagctgtccaaaagaagcaaatgcatcctgaagcttttcatttgttgtgagtctggagagacctattcatagataccaagttcatataatggggttaacattctttaacttcaagccttaaaagaggattctaaagttccaaacaaacaaatacagtagcaatctataaactcaggacattcttatgagctcgacattttgagacctttcgatagtagcaaagaaggaatcaccaacacaaagatgattagcacactgaccacaagcctcccaatgcctctctaaccactaaattcaactataagaaaattggcaagtagatcaaaaccttcatgttgattctagacacaagatacaactgattgataagatcacagatcctaatctctcccgaagccaaaaggcgccctctttctcaaatggtcaaagaccctctctacacattctttatcttcaggccttaaagagtctaataaagaaaacgaaaaacgatacttatgaattccacaacttgttgatgctttccatcgtaacaaagacggaatcaccaacacaaagacgattagcacactcaccacaaacaagccttacaatgcctcactaaccactaaagtcaattatcagaaaaaatggaaagtaaatctaaaccttcatgttgatttccagacacaagatgaaactgattgataagatcactgatcataatctcaaagccaaaaaggctcccactttaccaaactcattctaatccacatttcctctttatacccttcacattaagacttaacactctgatactgaacaagtaggagatcatatctcaaaatggtcaaacactgatccacataaaacaaacacattatcatctataagctaacatgaccaaaatccaagcttgcatattccaaaaaaaaagataagaaattgaagacagttgaagagagaaattaccgctaacgaagagccggggagacgtaagagttgagcagcggcgaacacacaaggatggagaagacaagaggctactggatccggcaacgagacggcgaaagctggaaacgaacgccattatagcaagtgggacaaaaggatttgagatcggaaatggcaatctttagggcttatcaaagggttttaacttttataaatcagacaaaacgtcgtcgtttcctctgttttccacaggttaacaaacatgaaagaaatgatgatgatacagtatacacatatgtaattgaagtataatttcaagggaaacaaatttgaagttaagattgttatcttcatccaaatcttacataagatttccacaaacattacagaaaacaaaaagaatacttctgaaaatgatttattttctggttaataaaaaacttagtcccaagaacatgtttatagctatctgttttctatttattctctttggtctctatacaaaacatggaactgttctgggacttctttgtaaaacctactatctatattcaaaaatattacaaaaaattaccaaaaaacggttccatcttccagaaaacaaaaacaaagaagaggaaagatccgaacaccaaaatcttgacgaatcttttaacgaaacagatcagatgagagttgtagattctgataaacccgttgtcgccttaggtactttcttctccagcattgaggttcctttgaatattgtaagctgcacttccttttggtactcctgcaactgcaaaaaaaaaaacaccattgtaattgcttgttaccaacaacatcttgctgcttaaccaaaatctatatctatcgaaactatttgttttccccgacttgtctgaatactaaaaatctaaagaaaaacacaattccaaaagaaagaacaaatcacttacttgctggtcagacatctttgtaaagccaaacttctttgtccatatagactctgcttcttcagctgccggaagaaccaggttctcaacatttaaagaagaaagaagattctctacacaggcatacagcccttggaagtatccctagtgacaccattcacatttaatccattggttagagaaaacccacctagatattacgataaatatgacatgtacagaagttttacccttccttggtactctcggcttgtggccactataggaagttcagcaacttcctgaccaaatatcctcagcagcgcagcagaaacaacaagagaactaaagtcacatcatgagaagaagaaaacgattagcatagagcacacagaagttgaaagagatacatcagtgataaagagaaagagacaacatactttactatcaggaccaaacagtacattcctccaaactcctggccagatatatttctcctgcaattatatcataagaattacactgcgaatcaaccactacgaaaacattgctattgtattgtagtttatcacgtcataacttacccatacaccatgacaggaatcagatcacggccagactttgcaacaatgggatcaaaacactcctagaagattagacatgcaagaattaggctgcaagtttggtatacataatttaagaaggtcaaagttaactgcgagaaagtgacccaagaaatagcccgagagcacatatttttttcaagtgataaagtcaaaagatagttggaacacatctcaggtaaagacataccctgaagataacagccgctcgtgaaagcaaaggcagatgctctgggtatcgactttttccactaagtattctccattcgactgtatccccaatatcggtaaatattcctttttctctgtcttttctgcatatcatgtctaacaaaggtgtaggaagagtttgtggcccacaagaaacagaattctgaactgccgtgtgaatcctgctgcaattgctacagcagaaccatttctcctgcgggatttcctacagcattcaggagagaggttaaataaagttgaatgagttctgctagcacaacgcagaaggagccagccttacacaacttactttcaaatcacagaacccgttctctctcaggcaaccaacatggtactctttctcacactacaaaagaaaagaagaagaggactatcagaaaaggctgaactggtaatgggaagcaatgaattatagagattatgaatcaagagagtacctggtcacagagaataacagtcctatcatcaaattttccaatgctaaaatcatgggacctatcaaccataaaacgagagtgaaacacagtaagcagtaagcaccaaaggggaagaatacacatatcaaaactggcaccttaatgtgtctcacaaaaaaagtaataatccacatctagattccacatcatgcacagtaatcaaaattgcaactaacctgcagaacacacagccaccaatatcgctttctggcgctttcacgactcttgagagtcttataactataggcctagcgttgccagaaggatcagtagtagtagcctttttactagagataggtccatcattgcagctcgaacagtaccaagtaccttcaggcatagactgaaatttcaaacaagctgcatatgaaaagagacatgaatgatcagaaccagaaaataatacgagagtttaattctaagcaacgtcgtccctgaaccaaagttccatatgctctatggttgaggaaaccattatggatctgtgcttcagctactttcagtttgaaacctagaaattgcatgtttaatatagtagagtacagtacttttacacctacctgtatgaaatgcttgaggacatccagcacaaagtaacaaatctccaccatccccacaaatagaacacatgtcatcactatcaccagttgtaatgacatgtccattggccagtgacatggctatatcatgcaatgacaatccagaagagatgaagatatgtcgataactgcacaagatacaaaatattcagatatgcattccaacatgaaggaaaaataacataatattggataactcacggttgtcgtctagccgccattccagcatgcgcttcaaattgcgaaggactaatctatcgtatacaaatacaaacgaaaaaagtaaaaatcagtaaaattatatccgaagtttaaaccgagtctgatggacaaccaacatagccactgcataacaccatttacctctctactgcagcagctacatactataccacttccttgcttgtaaccctgtagtagtttctgtatgggaaaaaatgtaagcaaaactaaagttcgattcaaatttcacggaaataagcagtacgagttatttgtctgcaataacgaacctgcgttttcacatagtaagccaattcagtcccgtctggaagtccattaggcataaacagcaaccgatgtaaatcattatccctagaaacagaggattgtatcttttcatcaatatcggatagaaattagagattcaaaggctaacagaaaaaacacaaatgatgaggttgatcaaaaagtaacacaaacctttttctattgcttccttcagaaactttcttatggcaacccgtaccagatacatgagaagtaagcctacaggattagcgaccaaataaatttcttacctccatagataattgtccataaggaccataagtaatacttagattactacagtgattaatttgtaaatgaaaacatcaaatatgcctacttctttgctatccgcttcggctcatctaatgtgtcctttgcatatgttttctctgaaaaataatggttctccacagagcatggagtaaggctctgactctcatcaagaccaggaccaagataactgcagctttcacaggaatcagtttcagatagtaacacaaaatggtaacttaatagtgcattaactaaaagttatacgaaacggaaaaggtacgtcactacagggtccaagtatattactgactatctactcaaataaaatccctaattagtaattacagatcaagttctaaaccagaagtaggaggtgatagtacctgacagtggaatgatccgtaatataattccggtcagacatgctattactctgttggaaacttgctgcaggaaataacaacatatcaggctcagcagtactaatcaaaactacggaaagcgcatagatgcaccaacaagctaaacacctggccatcacctttccaagctcgtaagccctcctcattcagagcagaaccagctacattccttatcacttcctcgagaacaacacgaggagcagtcttcagttcttgaactatgttataaaccgcccttctattctccaaaaatatgtgattattaggatgtctagtttttgcaccagcatgctgctcaaactcatacgcacttagaacctttatacataaacaaaatatcacatcgttaaaatacacagaataagaaacaagaaaaccataaataataaaataacaatcgcaaaacaactcactttcgagaaattgcaagttgtacagccacacaaatagccacccgaatggattatccccagaagctgtctctatcagccatcaaaagtggtataagtcagatacaaaacaccctaaaggaaaatatcgaaacacaaagattcaaactttaccacaggtggggttgaaatatacttcactcgagctccttcaagtatacccgtttccaatagcttcttgacattagatgggtagctcaaagaaacaatctttttcttcggcatcttcacaacaccagcgtcccaagtatgatcctttatcaaaggcaaatcatcaaattccttctttggtttactcaacttaaacgtgatcttcgtgatcccagtcgagctaagatgcttaggaatctccaacacaaaacgagatggtaaaacatcactcgactgctctgtttgtgagctacctacaacggatgcatcgtcacttacagtctcttcggacccaaaatcactcccggagcactcaactaaaccggatttaaccggctggctagagacatcacgaaaaagagacgtgctttcaaccggagaagcgactggatttgaaatctccgatgtaatgtcatcattagaagcttctttagcttgtttcttactgggaaagtgatctcctttattaccttcatcagtatcatcatcaagcctatctcttttcaattgaccattctcttcctttggcatctccaaacaaatagttccttctcccatcagaaatatattcaatatcacaacacgattgcatccaatagacacaacagtaacactaacttgagttagatctgaatccaattacagctccactagaattgtaatctggaatcctcggagaagaaactgtcaaggtggttattggttaacggattgattaatgagtcgaattc

SEQ ID NO: 342 - DNA, 93845 bp, Arabidopsis thaliana
gaattccacaacttgttgatgctttccatcgtaacaaagacggaatcaccaacacaaagacgattagcacactcaccacaaacaagccttacaatgcctcactaaccactaaagtcaattatcagaaaaaatggaaagtaaatctaaaccttcatgttgatttccagacacaagatgaaactgattgataagatcactgatcataatctcaaagccaaaaaggctcccactttaccaaactcattctaatccacatttcctctttatacccttcacattaagacttaacactctgatactgaacaagtaggagatcatatctcaaaatggtcaaacactgatccacataaaacaaacacattatcatctataagctaacatgaccaaaatccaagcttgcatattccaaaaaaaaagataagaaattgaagacagttgaagagagaaattaccgctaacgaagagccggggagacgtaagagttgagcagcggcgaacacacaaggatggagaagacaagaggctactggatccggcaacgagacggcgaaagctggaaacgaacgccattatagcaagtgggacaaaaggatttgagatcggaaatggcaatctttagggcttatcaaagggttttaacttttataaatcagacaaaacgtcgtcgtttcctctgttttccacaggttaacaaacatgaaagaaatgatgatgatacagtatacacatatgtaattgaagtataatttcaagggaaacaaatttgaagttaagattgttatcttcatccaaatcttacataagatttccacaaacattacagaaaacaaaaagaatacttctgaaaatgatttattttctggttaataaaaaacttagtcccaagaacatgtttatagctatctgttttctatttattctctttggtctctatacaaaacatggaactgttctgggacttctttgtaaaacctactatctatattcaaaaatattacaaaaaattaccaaaaaacggttccatcttccagaaaacaaaaacaaagaagaggaaagatccgaacaccaaaatcttgacgaatcttttaacgaaacagatcagatgagagttgtagattctgataaacccgttgtcgccttaggtactttcttctccagcattgaggttcctttgaatattgtaagctgcacttccttttggtactcctgcaactgcaaaaaaaaaaacaccattgtaattgcttgttaccaacaacatcttgctgcttaaccaaaatctatatctatcgaaactatttgttttccccgacttgtctgaatactaaaaatctaaagaaaaacacaattccaaaagaaagaacaaatcacttacttgctggtcagacatctttgtaaagccaaacttctttgtccatatagactctgcttcttcagctgccggaagaaccaggttctcaacatttaaagaagaaagaagattctctacacaggcatacagcccttggaagtatccctagtgacaccattcacatttaatccattggttagagaaaacccacctagatattacgataaatatgacatgtacagaagttttacccttccttggtactctcggcttgtggccactataggaagttcagcaacttcctgaccaaatatcctcagcagcgcagcagaaacaacaagagaactaaagtcacatcatgagaagaagaaaacgattagcatagagcacacagaagttgaaagagatacatcagtgataaagagaaagagacaacatactttactatcaggaccaaacagtacattcctccaaactcctggccagatatatttctcctgcaattatatcataagaattacactgcgaatcaaccactacgaaaacattgctattgtattgtagtttatcacgtcataacttacccatacaccatgacaggaatcagatcacggccagactttgcaacaatgggatcaaaacactcctagaagattagacatgcaagaattaggctgcaagtttggtatacataatttaagaaggtcaaagttaactgcgagaaagtgacccaagaaatagcccgagagcacatatttttttcaagtgataaagtcaaaagatagttggaacacatctcaggtaaagacataccctgaagataacagccgctcgtgaaagcaaaggcagatgctctgggtatcgactttttccactaagtattctccattcgactgtatccccaatatcggtaaatattcctttttctctgtcttttctgcatatcatgtctaacaaaggtgtaggaagagtttgtggcccacaagaaacagaattctgaactgccgtgtgaatcctgctgcaattgctacagcagaaccatttctcctgcgggatttcctacagcattcaggagagaggttaaataaagttgaatgagttctgctagcacaacgcagaaggagccagccttacacaacttactttcaaatcacagaacccgttctctctcaggcaaccaacatggtactctttctcacactacaaaagaaaagaagaagaggactatcagaaaaggctgaactggtaatgggaagcaatgaattatagagattatgaatcaagagagtacctggtcacagagaataacagtcctatcatcaaattttccaatgctaaaatcatgggacctatcaaccataaaacgagagtgaaacacagtaagcagtaagcaccaaaggggaagaatacacatatcaaaactggcaccttaatgtgtctcacaaaaaaagtaataatccacatctagattccacatcatgcacagtaatcaaaattgcaactaacctgcagaacacacagccaccaatatcgctttctggcgctttcacgactcttgagagtcttataactataggcctagcgttgccagaaggatcagtagtagtagcctttttactagagataggtccatcattgcagctcgaacagtaccaagtaccttcaggcatagactgaaatttcaaacaagctgcatatgaaaagagacatgaatgatcagaaccagaaaataatacgagagtttaattctaagcaacgtcgtccctgaaccaaagttccatatgctctatggttgaggaaaccattatggatctgtgcttcagctactttcagtttgaaacctagaaattgcatgtttaatatagtagagtacagtacttttacacctacctgtatgaaatgcttgaggacatccagcacaaagtaacaaatctccaccatccccacaaatagaacacatgtcatcactatcaccagttgtaatgacatgtccattggccagtgacatggctatatcatgcaatgacaatccagaagagatgaagatatgtcgataactgcacaagatacaaaatattcagatatgcattccaacatgaaggaaaaataacataatattggataactcacggttgtcgtctagccgccattccagcatgcgcttcaaattgcgaaggactaatctatcgtatacaaatacaaacgaaaaaagtaaaaatcagtaaaattatatccgaagtttaaaccgagtctgatggacaaccaacatagccactgcataacaccatttacctctctactgcagcagctacatactataccacttccttgcttgtaaccctgtagtagtttctgtatgggaaaaaatgtaagcaaaactaaagttcgattcaaatttcacggaaataagcagtacgagttatttgtctgcaataacgaacctgcgttttcacatagtaagccaattcagtcccgtctggaagtccattaggcataaacagcaaccgatgtaaatcattatccctagaaacagaggattgtatcttttcatcaatatcggatagaaattagagattcaaaggctaacagaaaaaacacaaatgatgaggttgatcaaaaagtaacacaaacctttttctattgcttccttcagaaactttcttatggcaacccgtaccagatacatgagaagtaagcctacaggattagcgaccaaataaatttcttacctccatagataattgtccataaggaccataagtaatacttagattactacagtgattaatttgtaaatgaaaacatcaaatatgcctacttctttgctatccgcttcggctcatctaatgtgtcctttgcatatgttttctctgaaaaataatggttctccacagagcatggagtaaggctctgactctcatcaagaccaggaccaagataactgcagctttcacaggaatcagtttcagatagtaacacaaaatggtaacttaatagtgcattaactaaaagttatacgaaacggaaaaggtacgtcactacagggtccaagtatattactgactatctactcaaataaaatccctaattagtaattacagatcaagttctaaaccagaagtaggaggtgatagtacctgacagtggaatgatccgtaatataattccggtcagacatgctattactctgttggaaacttgctgcaggaaataacaacatatcaggctcagcagtactaatcaaaactacggaaagcgcatagatgcaccaacaagctaaacacctggccatcacctttccaagctcgtaagccctcctcattcagagcagaaccagctacattccttatcacttcctcgagaacaacacgaggagcagtcttcagttcttgaactatgttataaaccgcccttctattctccaaaaatatgtgattattaggatgtctagtttttgcaccagcatgctgctcaaactcatacgcacttagaacctttatacataaacaaaatatcacatcgttaaaatacacagaataagaaacaagaaaaccataaataataaaataacaatcgcaaaacaactcactttcgagaaattgcaagttgtacagccacacaaatagccacccgaatggattatccccagaagctgtctctatcagccatcaaaagtggtataagtcagatacaaaacaccctaaaggaaaatatcgaaacacaaagattcaaactttaccacaggtggggttgaaatatacttcactcgagctccttcaagtatacccgtttccaatagcttcttgacattagatgggtagctcaaagaaacaatctttttcttcggcatcttcacaacaccagcgtcccaagtatgatcctttatcaaaggcaaatcatcaaattccttctttggtttactcaacttaaacgtgatcttcgtgatcccagtcgagctaagatgcttaggaatctccaacacaaaacgagatggtaaaacatcactcgactgctctgtttgtgagctacctacaacggatgcatcgtcacttacagtctcttcggacccaaaatcactcccggagcactcaactaaaccggatttaaccggctggctagagacatcacgaaaaagagacgtgctttcaaccggagaagcgactggatttgaaatctccgatgtaatgtcatcattagaagcttctttagcttgtttcttactgggaaagtgatctcctttattaccttcatcagtatcatcatcaagcctatctcttttcaattgaccattctcttcctttggcatctccaaacaaatagttccttctcccatcagaaatatattcaatatcacaacacgattgcatccaatagacacaacagtaacactaacttgagttagatctgaatccaattacagctccactagaattgtaatctggaatcctcggagaagaaactgtcaaggtggttattggttaacggattgattaatgagtcgaattcaatccaaagatgatgactttatgaagaaatcaattcataaaaggaagcataagaatcaaacgaggaagataagagtaaaagtttgggtataatcaatagtagggaattacggatctaaaagatctggagataaaaggtaagagatttcgaatatgggaacgaaattagatagagagaaaagagaggacggcgaagaaaattagggttagggtaaagggggggaaagagataagatgggggggagagaaggaagaagaaggaacgtgcaaggcggcaacgaaccagaaaacgaaaaagctttgttcgcggtccagattacttttcaaagcaaagaatagagagagatgaagaaagaaaaaagaaaacagaaaaaaaaaacagatatttttttatatttttggaaaaaatagtaattaggagataaaaagaaggaaaataatatccgaatcgtgagaaaatacaaactggcccttgtttttaaatgtaactttttgaccggattactttatctcttaaatttcaatctgcttttagaaaaaaaaatgttgattcgagtaagtattaattttggttgcgatgataatttctatgtataattttatgatattaaatatcagtttaagtcggttacacgaaattatgagagtaaaattggatattgtagttaaccgaggggaaaatatgagataattaaaagtatggagactgtttaagaataaattaaaacctttggagtgattatgtaaatcgaaagaaaaaggggaagaaaatcgtggcagttgctggtgagtgatgacaacttggaagaaagtacgagaagagaacaaatcatttcagtttctgtttaagtgaatatccacatgtatatgtgggaccttttgtgttagagatgttttttagtgtttttaacttgaataaaatatcctacaatatatatcacaacccaaaacacaaattatacaagcctttaataactaaaacggtttaatttaacttttaagtaaggtttgtaaattcatttaagataattttgtaaattttactagtaacttggtatattttggaattttaggattgataacataatttttgtatttttcacttttccttattcgttcgtcaccaagagcaggtaagagattaggttatcttctctttctacttctctttttcatcgaagctactccaattcctatggcggaactctttacgatcgatggaactataaatatataaagagaacgaagaacacttttaagaacttaaaaccaatgattcgccatatgttctcctctctgactcacagattcgcatggcggattccacacttcgtctacggcgcaacgtggacgttgtttctgacgttaacggtggctatcatctcgcttgcaccggaattcgctttcgtgtcggcgattttcccgtcttcttctgaggtgttctcgcggcggtgcggttcttatgcagccatattggttccgctggatcttccctcggaggtcttgtgtttaccggcgaatcttttccggaggtcgaagatggacctcgttgtgccgccggtttttgcagcaattgttgtggctctttccgccgtcgtcgtaaggactatgggcctttgggaggccgacgaagcccattaatttaggcccatgaactggttatgatataacctttgttatttcatttgggagatataaatagattactagatgaaaaaagttattttcttacacaaacaaattgtgttttataattttattcaagaaaaaatatggataatgatttctaaattatggtattccataaagaaatatgtggtggtgaaaaagatatggcattaatgtaacaatatcaagaaggataaataaattttgaatgtctaagaatttgtcttgatgatgatagattatttagagatagaatcgatgagaaagacactgaaatcccaaagtttatcggcgagagaattgttggtagcaaatttgctcggagcaacgatgttacagtcgccgaaatactttccggtgacgccttcgagatctggatgaagtgcaacgtagcatgttgttgctgctccctgaaaatgcccccaaaagaattatatttgtaaaataaaaactaaaatctcataagaacatttatttgaaaagggttttaaattcacctgaggtatatttttccaaaagaggaaagtcatagccctgaagacctctgaatatgcaagtaaatgtcgattttaagataagaaaatattaaaatttaagtgtttgaatgaccattggagaattggtatacgtactcatgctaaaaccggagtagcgaaagagattagtggtgacaagaccagggtgcaccgaatttatagtgatgttcacaccttcttcctacatcccaaaatcatattcatcattttatggcatcaaactttgatttaattaaagtatatcaatgtgtaaataatatattacctgtagtctacgagagagtgcattggagtgcaacaagtttgagagtttggactgtccataagcccttctctccgaatatctagataatgcataggatagagaattagtgtttacatcagttaaaaatatttagtctcgtttcattagcataaaattgaataacaaacttacccagcagggtcattgatgccttggaacttgataccttcagagtaagtataagtatgagcaatagatgacagattcacaatccttccttggactccactttctcttgcggtacttttcattttgtccagaagcagattcgtcaacagaaaatgacctggacaatcattataatataaatatatatatataaagattcactcacgtaatgttatataaaaatggtttattgactagtatatttctttataattcatgtcataacatgatgttttggtaacgaatattgcgtatttcgatactgacaagaaaacactatcaataaaatcttaccaatgtggtttgttgcgaattgtgattcaatcccatcttcggtgagcttgaaaggacaaaacataacacctgcattgtttctaataacatttcaaagacacaacaagttaacatataattaactcttaatcgctgcaaaagaaaaaagaaaattcaacaagtaatattcaaacgtacatgagaatgttgagaggaacattaagggcaagaaactgatcaacgaaggatctgactgatttgatggaagagacatcgatctggagatagtcgacgcgagcattagggttcatctgaagaatcatctctttagactcattagcagcttttgggtttcttgcggcaatgatgacatgagctcctctcattgctaacactctagctgcctccaatccaatcccacttgttccacctttttgtttgttcaaacaataattgttcataaaattgcatattggtcaaaaattatagtaccaactaaatactacaaaacatattagctttcaattttaatgaaaataactttggcaacaacattcatatgcgagtttaattttgatctattaacttagtcttaattagagagaagatacataactaagatattttgtttatggacaaaaaatcggtcatgacaaaacagaaagaaaatctttggtgtttgaaatacaaaaaaaaaaaaaagtcccctttatattatttgcctcacaagtcacaatcgaaactctagcttaatcctaaaagtttgacttttcatccaccattaaaacatttcatcttccattcattgaatttatagtagacttgactaattttatagtgttttccgattctttttttggaagaaagtcttacacgacgagtaaacgtaaaataaaatttgtttggcaatagtaatagattgggtttgcaagaaaatatcagaaggaaaaggaaaaatgaaagaacctgtgatgatggcagtgagatgactggcatcaatggcttgagtaacatcttcagcagtagaagcagatccaaacccactctttccttttttccctgtcatcactccatatattcccatgatctctctctctctctctctcttcctctgcaaatattttagagaaagaaaatgaagaaaccaacaataataaaccctaaaagatgttgcagagcaaacagaatggagaagaaatagagaaagagagttacaagttggatggatggtaaggaacgaagaagaaaactgtgtggctttaaataggctcacgcgtgagtagagaaagtttgctgttgacaggtagtaattaattaagtttttatatgacagctaattataatcaatgtttagattttcgttgaatgactagaaaagaaagttactactgatatagtaaacatcaatccacagaaatcttaaaatttggattttactgtaaaggggtttatttggacaatgatttctcaaatattcaaattgacttgactatatatttgttaaacttctagagacttttatagtttatattcgtaaagtgcatactaaaaattaaaatgtacaagggattatattttgtaaagttgtaatcttgaaatagacttttacaactaataaaaaagaaagacaaataaaacatttgagttggtacgtatacattagatgattcttgatttttataattaagagaattggttagattggtacgaatatttgtcttttaactatctttccatcgattgactccaatggattgccatatatctcttgctcttttaagtgctttaagagtttacctggcctggttcaggatgtcggattattgaatggaagtgtgaactggtccggtttgaacgatagaacataaaacgtgacagagacatgctctctctgtcatccttcattgaccaacttctcttcgttataattaaaattttaaaatacaaacatgaaatgagacgtgaaatgaaattatgacatgcattcattaaccaatttgcatcgtatacgttaagcaagcttagccttccttaagtttcaaactttcaacattccaaagagacattgcttggtatatcgagatttagttagtgtgaagtcatagtatttcttccataatgtttcatctccgcttaacaccgccattttcggacataacacctctatttatctacttcttttcctcaaggtactgaagaaatttatgtatgaaataagctgagaaaaacgttataacccattttctttttgacgtactgaaaattcattctgaatatgtaaatccgtaatccgatcagatcccggtaaactagaaattcagtgaagtaagaaacgatagcaacccgaccaaaagtagtatgcgaatgagaaagaagacaataaaacggaaaatttgtcttttgtgatcattacaaatttcaagaaaaataaaagtttgaatctcaaaaaaagagctgaagactaacccgaatagtttagcaagcaatcctctgtgactgtgaaacttgtacaaataaaaaaaaaaactatatatattgtagaagaacaaatagtgacgatcgatttgattgaacgccaagcaattgatatgtgaaaagaaagaccagtggtggcttaatggttgagatgaccactctgctctctcttgtgacagagcacgagaagaccacaggctctgctattccttaattgtacaaacttcattcaccattatcctgtaacacctgcgatttagggaatagtgttttgtggtgattatatagacgtttacatattcgattcgtttaacttgatttggtgcttaccgttagagaaaacctccaccggtccaagcagtgtctgatttcccattgtgacctacagatttcttatcgcttgcaggctgataatagaaatcatcatctttagcatcattatcatcccaaccagcccaaccgccgtcgtcatcatcattagaagtcgacacctttggtgctgcttcctttttgctattgttctcttctccccagtcatcccaagaattcgagttacgataactgttgttgtgaccacttgatgatgattgtgatcctccaaaagatgaatttgctgttttgtttccaatcccagagttctggtagtaaccgttgccctcagttttattctgttgattccaagttgatgcttcttctttagtgaactcttcaaccttttgtgaggcaattgccatcactcctttcatgatcccccatgtcctctgtcctatctctgttgtcttactcgcaacaacattaacagtctcactgaccgtctgatctaagccaccttctttgacctgcacaatgaacaaaggtttcttatctcacttgtcttcaaaattctataatttctaatgttagcagtatttgaaaagaaggacgagcatccggcattatgctcagttcagcgttttagaggatctccctagagattttgcaggggcataaagacaaaaaaaaaaaaaaagagctttaacactgcaattaaagtaagaagattatgcagctagaaaagactctaattttgtgttacataacaatgtcaaaaatgggataatctaacaaacagagcaatgagcatagcggcaattagacagacaccaagcgaatagtcacgatctcaatataaacttaacaactagactacagaatgttaccaaggagtgagcttactgatcacgatgcaaacgaatcaaccacaacatcgaagcagaaatgataaaagaagtaccttggaagtaaactccatggttccagtctgaacaacatttgcagctgatgcagcaacaagagacaatcttccaaaaccctataagcatatacgcgtaaaacaaacacattcatttacaggataaacagagaagtcactcgcatgtcgcatctaaccaaatcactctcaaaaagcttccaaatttacctcagacataacagagaaaacatcaccaccaccactctgttgattgcttctcggagctggacctggactagatccaaacccaacatacttaccaccttgtgaaggaggaagtccctcaggcttagactcattctcagccatccttttcgcaaagaaactctccttattcgccgccgacgcctccagctgagaccgtgaatatatatcctcagacgatttcgacttcgccggagcaccacgacctcccgatgacctaaaatcacccgccgattgattcctcctcatatccgtagatctaaacgaatcatcgttatcccaattatcccatccaccattaccagaatctctaccaccgccttgagacaacggaggcttcttattcatcaatccaccaccaaccgattccttaacaatcggcggatctctccattgtcttccctcagctaaagcttggatccgatctcgatacacagacgcggcgttggaattgtacttggagatgatatcagtctctttcgagatcccgtactgagcgagaaaattgttgagacgctcgttgcctccagcgtccattttcttgatctggatctcggaccatgaatccatggtgacggatctgacgaatgagatgtgaacacctaaaccacggtgcttaccggagcattccaagcacatgaagattccatatgaaatcgatgcccattgtggattcttctgggagcaatcgacacagaccttgttctccggctgagattggagcgtccgtaatcgtctcgccgctgccattatattgccggctctccgatctgacccctgactagatctgatccaggttccagattctgatgcgttttttttggctcaatcgttttgcttaataaacgtggtaacttgaataattttgtgcgtgtttttgtcacgtgagagcttcactcaatatttccaaggtctctgctaaaaacgtgtttgctcaaaaagcatgggctttggtcgcttcgatatcgggccgggtctggaaggaacaaccaaaaaaactaaaactactctcgttttcttcttccgctcaaccctaacttgtggaagtcagtttaaagtccaggtgagcattaagacaccaaatgtccttgctgtgaatatgaacgggagaacaactgatgggggtctgaagaaggaattaactgaagtgatgaagcagggacagattctgagtgtcaaggtttgtttcttgttcattgattgttatgcattgcactgttttaaaccataagtctttgatgatattcttttatttttcactaataagcagataaaaaaagattggtactggaattgtccaacaggtgaacctaatgtagagtcttattaacataactaaaggccaaaaagcggcagaacacttcatgaagcatggacttgaggaattgttcagcttcacattattccggtccacgtgtctggtacggtagagtagccaaatcccagcaaagtcacagttaccagaatttactctttcattctgaattgttgtatctttttctttcttttcttttgaactcaaatccttgttatctccctgttgactatctttttagaacaataatgctcattagaagcttttcaactctagttatatattattttccaatgcacaaattataacatttgattcattcattcaaacaattagaacatttcatacaaatccctaacaacagctgagaaatctcaactcccccaattaacaaatctcaataggccatagccgtcacagtctttctgtcacagccatgtgattttgtgaacatcacatatagaccgttggatctgttgtcatccgtatcatcacatcggaaccgtttaatttttatgattgtgaaacgacgacgtaaagttgttaaccgggaaagacgaagaaaaacgcgcgggaaaattgagagactgcatcttaatcatcgtagggattctctattttttggaatctgattcatatgtttggggtttaatagtctcagctcaaataaatctaggttaaactgtgtggatcgattcatatattctccgtcaaaaccaaaaccaaaccgatttgtcataattttttcttatcatccactttcattggctagagggacattgtaacggtgtcgtcgtcgccaaacgatttgcctcttcctaaaggtatgttctttcatttctctcagtgcccctttgcgtatttcagcttcttctttacgatctaattcatttctatgtttcgtttgattctttgttcaattctgaattgagaaaatggcgattcgagatctatcttttcggtttttcatgtaagaatataatctagctttggtgtttgtattggtttacttgtgggaagaaaagtctttctctttgggactttaaactttaattacttaactccaacatcatcatagttgggttctgtttgcgagattcattctgtttagttcagttctcttatagcagcaataacatattgattgatggcatcaatcttgtgatggaaccatgggaattcagagttcagggaggattgattaattagaatctcatatttatgagagaataagagaactgatgtgtgtttcttttcctatgtatgttgtgcactttcctatttctataagctcttcaggataacaacagttgattgggtctgaattaccgtgtgttaaagtgtgttttcggaattaccgtaattccccttctgtgtagcttttggcgattgggtctgatccaattcttaccagcttcataccattgttcaaagtgaaaacagaaatagtgttgattctcttattactgttgtctcaggagattctttcctacataggaattgagtttaaggtggaattcttctgttattttgttgttgcacgaaaatggaggacattgagaacatagaagaagatgagtatgggttttcaagaaactacttcttggcaaaagaattgggtggggcgagtaagcgttctgcccacaagctctctgatatacatattgttgatgagcaggtgagttttgttgggtatgctcttttaaattatgcttttggtaatagatactttccttgacaagttgatggagaagcattgtgtgtttacaggagcttagagaaacggcttctacaattgaaatgaagcactcgaaagagatatctgagcttatgagtgattacaagactatgtactcaaagtgggtctttgagctcaggtgagaaaagctcttacttttgaagctagaacctgaatattttagtttgtctatatacttctggtgttctcaattcttgttgctgcttccaggtgtggctttggccttctaatgtatggctttggatctaagaaagctttagttgaagattttgcttctgcttctttgactgactattctgttgtggtcatcaatggctacctcccttccgtaaatctaaagcaggtactcttttgtcagtttggatgcagcaattttttctcttgcgcagctctatgttcttcaggttggaaaagaagtagttttaaatgatgactaattgttcttttctgtgttgcaaatttaggttcttttggcattagctgaacttctatccgagcttttgaaatgtaaaagaaagagttccgggagtttgtctaaaggtcaagaaacatttccttcacgctccatggatgatattctttcctttctacatggtccacagtctggagataaagactgcttcatatgcgttgttgttcataacattgacggccctgctctaagagatcccgaatcacaacaaactcttgcccggctttcttcttgttcacacatacgcttggttgcctctattgaccatgtcaacgctccattatgtaagcactattctctatctctcctgctaattgcttatcatggctgaggtctattgcaaaaaaattctgttcactgctatctgtcaaagacttctaagaccttatgtactgcttatttgacctgaggctatgtttcttgtgtccattggcagtgtgggacaagaaaatggtgcacaaacagtttaactggctatggcaccatgttccaacatttgcaccatacaatgtcgaaggtgtattcttcccgttggttcttgcacagggaagcacagcccaaaccgccaaaacagcagccattgttttacagagtttaacaccaaacggtcagaatgtcttcaagattcttgctgagtaccaactttcacacccagatgaagatgggatgcccactgatgatctgtattcagcgtctcgggaacgcttctttgtgagcagtcaagtgactttaaactctcatctcacggaatttaaagaccacgaactggttaagaccaagagaaactccgatggtcaagagtgtttgaatataccgctcacttcggatgcaattcgacagcttttgcttgatctcaatcagtagcctgaaattgtatttctgatatgattcatttttattgcttgaacgagttattatagttcacacagtttacatgtttaattgaatgttatagtcagcactcacagctcttattatataatcatggtgtggtagtactatcagagatcataacaatttttctttctttatacaaacaccaagttgaatctatggatagggttgattccaacacaacgtacacaagattgcaatgtgtgaaaaatcccattaaaacagtgaaaacgcctatatatgagtggccaatatcaatgagagatgactcctataataagcttctacaaacaagaaaactaaacagttgtttctctttttaagtcagcataagatcgtttccaccgaggttgggacggagacacacccgcacctcgtgctcttccgggccagctcttagttttgggacaagtatctcaagaactgatccaggtccatcgtaatacgcttcaatgtttgcatcttccgggattcggtttgataatgggatctctctgacaaattcacctggcgggcaatgctcagaggctgaatcagtcaacttgaatgttctatcatgtctctttatgaaaggtacgcgcgatgtgctgaggcatgaaacttttatgattccatgtgtgagagtgttcctccaggagactttaacgctgttcaaatccacaaaaggaaggctgattatgatcaagtagccttcttcgtcctcatagatcgtttttgcagcagtaacaggtccataaacgtttttcatggccccagtaaactcgtttgaccaagtaggtagctcattctggtgagcttcgataacaggaggttgtgggtttacagttaagcaacactcctcctcatgaatcccatttgagaacaagtccttcctcttcttgtggctcgaaggagataaatcggttgcttcaccattagaatggttggatggttgagtcgagagattgagccccgagccattgagtagtttcttagagtggtttgcagtaggattcttcaaagaaggtgtaggcctctcaagctcaaagtcagtgttgggaaggtttctccaagaaccaaagtcactagcttcaggtggaatggtgaaattcaaatcacgacccgtaagctccatccaccttttcctctcttcttcatctagacacgtgaggtttggcaaaggaacaagctcaatcccatgaacgcactgcggattcgacaaacctctgtagtgtttcctctgcattctgtgagacctaacaaaccctttctcaacactaaatggaaacaaacgatccccttgtctagaatgaccattcatgtaactcctcaactgcatcttccctagtgcattctcaggtctttccttaaacacccacatatacatattctccatatcatgctgaactaaaaacacatcaagcttcaaatccgacttgtcaaaaccagatatcccattactatcccggacgattttcgcctttgatttctcgtttaacgcaggcttgaagtagaaactgaagaaaaaccaagcaccccagatactatcaacacgtttagcacatttcctcccaaccttaggtacaacactcatgtaattctcagtctcataagcttgtgaacctaacccaacatccaaaatatcacaagcatctaaattccacggcggaggaggaggacttctctcagctgagagaggtaaattgatatcaggagggccagagagcagagattgcctgttgttattcatctccaaatcaagctcctcatgagaagaagcacttgaatccatagacaatagagtagaaggatgatgattctccatagccaagacgttaaaacaaagtatctaccaccatctcagctcacaccagagacaagtctcatagccaataaccataacaacacttgtaattctcatcttcctctcccaaagttaaacacttgctaagaagaaccaaaccacttacagatatatctaacccctattttcccaattccaaattctccaattgttaacttctagattctaataaacaccaaaaaaaaacgaaactttgaagaagatatgaaaaaaggagcactctttttttgccttaagcacagataaacccagaaagaggagaaagctaagatgagcacgatgcagatggtatcgtcatcatcattagcaaacaaaatcgaatcgattactcagtctctgtggcttcgccaacacaacaaatcttgatttttcttcttcttcctctttttttttctgtagagagagagagaagaagatacggacccgacggagaaaacgcctgccctggatggaaccgtggagacttcctccgttacttaacggtgacgatgtttttttttttttttaataagaaacgatgattgtatattggtcgcttctcttgcttcgtataacagttttttctattaattatgaaatatgttaaatttttggtgataagaaagcatataaaagattgatttttcagccaacgttgtttggatttgtggtaaataaagaacaacaacatatttgtgtctacatcattactctaaagtgtctttatctttgtggtgaattgtatgtttcttatcacattttcttccatcaaacaacacttcatgaaatttgattattctggatttcttttttagaacatgtaattcatgtgactatttatgtggttagagtctctactatattttggagtatcccttaggtcttagctgtacatgactacatcatgttaccttggatagagatagctagagttttagatataaacattgtataatctttttatatgattctgataccgatcataaaccaattatgagaagtagcaaaaaaataaaattatctagtgattatatccatcattttaaaatttaaatcttcatttatgatcaaattagggcaaagatcttcactctcttttttttgtcaataaagatcttcaccctctttagtttcaaaactctcatgtaaaaccaaaatttagatatgagaatcgtgtaccgctaaaatccatcgttagtctccaatatacctcaaagctgaaaaaatcactggcccattgagtttacgacccaaaccaagagtcccaggtaaataaataaccaaggtggaataaagaataaaaatcatttttggtgacaccgacaaagcaccaaatttccaaccactacttccatgtacccatcataacaaaacaccaaagaagatcctacttcatatctcactcattcatttattaataccaaaattaattatacatgatattttgattacgaagacatgctgaatgaaagaaatatactatattgttttacaaaaagaaagaaaaaagactttaaaaagagttatgtaataccgaaagtgattgttgcatttgagattatcaaattatacactgaatactacttaattatcgttacaaataacatttggaagacctattggccggttttatttttgaatattccactcagtttaacaaatatataattttgacctttcgccggagaaaaaacaaaccaaacttacttagtaagaagcactttccattattattatctctgttcccccaccacatttcatattcacataataataatgttcaataatacaacaacctccttcggctccggccccggcatcgtcgtcgtcccaactcccgccacaacagttcccaccaccgacttccccggtaccaccatcacttccaactccaccttcattatcatcggacctccaccaccgttcccagctcctccccggagcatcgaccttactcctctcaaactaatcttcgtcgtcatcgccttcgtcgccgttcccgctttagtttacgctctcttcttcaacggcccatgttcttcctcccgccgcaactcctcttcttcccgcaccagctcttcctccgacgatacacctcacgccaccgtcgacaccccgccgatcaccgagaccaccgtaacttcggaatccggagggaaattccacaaagatacacattctaaagagattggaaacgagtgctccgtgtgtctcatggtgttcaccgacagcgatgaactccggcaactaagcgagtgtaaacacgcgttccacgtgttatgtattgagacgtggcttaaggatcatcctaattgtcccatttgtcgaactgacgtctccgttaaacaacaaaccgaagctcccaacgttcccgttaacgttaacggaaacgtgaatcgcagcggcggaaaccgtcgcgtttcggccactagtagagatgacgattggcgtcaaggtttacctgatgcttctagtttagtttgaattttttatttaataaaatttatttctctgtttttttccacagatttttaaagatatttttgtaaacaaattacgtcaatttcgaaaaaattatgtccgttaaattaatttattttatgtaattggttgaatcgtaactccgtataagcaactgtgagtgtgtctgtgcgtgatgtgaaatctgacgttgactcacagcaagctcatccaacggtgtatgaagatcttatactaatcggacggttattaattcatacacgtcttcccatcagaacgctgtcgttttggtgttcaccaaccgattttttcaaaattaaaaaaccaaactttcgtcttcttcccggctttactctctttctctctccaccgtcggctcagatctagacggaaatgtgccggtgaaatcgaatcatgaaaagatctcacatttcgtctcctcgttcttattcacgaccagcgatttcaatcttcggtgtcttcctcttgtttcttctggttttaacactaagctctcgaaaaccatcagattcatcctccggtttagctccaaatcgaaacttagccacaaaatcgacgattccgaggtttgcgtatttggtaacgggaacgaaaggagatgggaaacgagtgaagcggctgcttaaagcaatacatcatccgagaaattactatctgcttcatttggatctcgaagcttcagatgaagagagaatggagctggcgaagtatgtgagatcggagaagaagaagtttgagaatgttatggtaatgggtttagctgatttggttacggagaaaggtccaacgatgttagctagtacgcttcatggtgttgccattttgttgaagaaagctaaggattgggattggtttattaatcttagtgcttctgattatcctttaatgcctcaagatggtaaatgttcaatctttaaatcttttcttcatgttttgtgtcttagtttggtattgataagttcaatggagattcatagagaaaatgttcttgttctgttatccaaaatcgaaattaggagttacgattctgcttcttatatggattggctcatgtatattggttcatcattcttatgtatggcctggttggttttcatgtagaaaatgttgtacattgtattgtatatgaatcaagaaaatcttaatgcttttgattgtcctgtttgatgtgtccttcatatcaaagcaaggatttaaagtaaataaaagtagaagttgaacttcctgtctcttggagtattgacttgtataagaattaggaagagatatgatgtatatgatgtttaattgcttctgtgtattgaatttgactagcctccgaatactggacttatcgattcttattttacaggttaatgatcttattgtacttttggctctttttgtggtttcagatattttgcatatattctcatacttgccacgctacctgaactttatcgagcacacaagcaacatcggttggaaagagtgagggagctaatattatgtatacataccttgaatgttctctgttttatatttaggaacaaatcatttgagttgcttcttgtataacagctctaactatatattttgtaggaaccaaagagcaaggcctatcattattgatcctggtttttaccatttgaagaaatctggtgtcttttgggctaaagaacggagatctttgcctgcttcattcaaacttttcatgggtaagaaaaaacactcaatctcatttcatgtctactcgtatcctaagcgtatggttgcctcttcttcttcattttgtggatgaatctcttctaataggttcaaccagcgttgctttaacaagaccgttcctcgagttttgcatttggggatgggataatctcccaagaacgctattgatgtactataccaacttcctcttgtcatctgaaggctactttcagacagttgtgtgcaacaataaagattatcagaacacaacggttaaccacgacctgcattacacaaaatgggatccgcttcaacagcgcaccctgaatgtaacggttgagaatttccgcgatatggtccaaagcggggctccattcgcaagggagtttcgagaggatgatcttgtactcgataagattgacattgagctactaggtcaaaccgatactggattggagttgaagactccggatgttgttaaaccaacggttagttggaagaggcttgagaagctcatggttaggcttcttgatcatgagaatttcagggctaagcaatgtaaataagtttatgtgttgcctaactcttgattattgattttattcttccaatcattaattttcatgaaaagtgtatttgccttggaatatctttggtctcattcgtctaaagagttctatatgttttgttccaaactgtcatcttaaaaatttgtttatcctaatgtaaagtgttctacaaataatcaaaaagttagaaatgatactcgtatcctaatgttttgtattccaaatgtatccaaaactgatcaaaactatcgaaatctaaagtaaaaagtaaaaatcaaaccaccatcgataatcgaatgaccaaatatttaaatctgcaaatagttttgtttgccgtcttttgtttactagattgatgaaatctatcgaagtgtgtggagaatgtttgcgtggtaggtaaaaacttacaaaagaaacctcggaaaatggacccaaaggcccaaacctcaacgagctagagagagtcacgcggttcgagggagcgtgaggatcaatcacatctacgagaagatattgccatgcagagcaaaaaagcagagacagagagagggaacatgatggaccggtcgcgatgcttcggctgtcgtccaacgaccaaagcaccaatttttacccactttttcctattttcaaatatcttcttcttcttttgctttcaaattattataaatcattatatgatcaacgatcctattataatcattatgctaacacatcggaattcggtctacataacacctttgtctcctaaattcactccatatattctactcggatcaatctacacagaaatcaactatgtaatcactgttaaccagataaaatttgattgtgtaagttgaatccacttgtacaatgacacattgtggtcattattttaagggacaagggttactttacattaagacttcatccaattcgattacgtcgttatctttgaacaaaacaataatatgtttcttcgtcatcttggattcataacaacaaattgttatgagcatccaaagcgagactaaataagtttattaaattgttaaagagttgatcttctatggtatagagatatatcacactgtcaaaaacattttttcgtaaatattggttagttttataatgatacataatacagatgaaactaaatataattcttgtttaaaattctgtacattaagaaatataattatatacatatatgtgaaactagtgataagaaatttaaaccctaactaaagcaagaaaacaaaaagaatcatgtcagtcccaccccatatggaacacaaaccctaataattacatatatgacaattatcttcttataatatatctccatacaaaattattgtatacatatggacatagatatatataaaggttcatccactttaaattttagccatcttcattctcacactcaacccctctctctcctttcattctcattctctctcggctttgttttctctttgatctgattcatctattctatttctatcaccacacaaaaagaagaaaaaaaacaaactttactttaagaattttgaagaataaaatcaaaagagaataaccatggttttctcctccatccaagcctatcttgattcatccaactggcaacaggtaaatgctttacaattccttatatagtagctagacaaacaatttcgtcttgctttgaattagcatgatctaattttggaatcaaactcaaaaagagtactaatattaattcaaagaatgaaaaagaaaagacacaaaagttcttcttgcttagcatgttcttgaatattcttgttaaatatcaatccttcttgttttgttttgtaactttaggctcctccgagcaattataatcatgacggaacaggcgcctcagcaaatggaggtcatgttcttcgtcctcagctgcagccacagcagcagccacagcagcagccgcatcctaatgggagcgggggcggaggtggaggtggaggcggctcgatccgagcaggatcaatggtggacagagcaagacaagcaaacgtagccttgccagaagcagcactgaaatgtccgagatgcgaatccaccaacaccaagttctgctacttcaacaactacagcctcactcaaccacgccacttctgcaagacctgccggagatactggacacgtggcggagctctccgcaacgtcccagtcggcggtggctgccggagaaacaggcgtaccaaaagcaacagcaacaacaacaataacagcactgctactagcaataacaccagtttctcctccgggaatgcatccaccatcagcacgattctctcctcccactatggaggaaaccaagagagtatcttaagccagattttgtctccggcgaggctaatgaatcctacttacaatcatctcggagatctcacaagtaatacaaaaacagacaacaacatgagcttgttgaactatggaggattgagtcaagacttgaggtcaatccacatgggagcttctggtggctcgcttatgagctgtgttgatgaatggagatcggcgtcttatcatcagcagtcaagtatgggcggtgggaacttggaggattcttctaatcctaatccatccgcaaatgggttttactcttttgagtcgccgaggataacttcagcgtcaatctcttctgctttagcatcgcagttttcttcggttaaagttgaagataatccttacaaatgggttaatgtcaatggtaattgctcttcctggaatgatctttctgctttcggctcttctcgttgagttcaaccacacaacaaaaaggaaacttgagggtatactttggtggggaaaaaactagttaccaggttaattttgtcttatttttcgtttttgattagttaatgttgtttactactttcctcgttctcaatctactatgcttctagttctaggtagcctaagttattggatgtttttgagactatccctttgttatttttgtcgacaatgttctttcgttatctttcgagtttggtcactactatcaaatgaacttaatgtattaaatagatctttctatcgatcttaattaaaaattctgatatattggacgagtacttaatttaatttcatactaattttgtctaatccgttacttttattgtcctaggacttatatatcgtttaatttgttgttagttatttcatatttagtgactagtaatttctggcatactttgaagccaaatgattatatatgttaaatttgtaaaccacactgttttaaccggaaatcgcctaaagaacactagtttggtcaaatagtttctccgcagttcgctctcctcttcagtcttcactgatcgaatttgaataaatgatataaactgaaagaggaaatatacgtctcttttatttgctttaatgaatccacaattagccaaatttcccttcaaatctctactaacgaatcccaaaatagaggaatctaaaatgaattgttcttatttgtggatatatcgtagaaatcatgtacatatactttcaatgtctgatacaaaatctttttatttgattcaacatgctttttcatataatttggtctgatttaaaggtatactttacccaaataaacgcattatttacaaggaatattgtttaattcttgagattgaagatttgaatatggaacaaaagagtggtgaaatagaaacaaaagaaaaaaacttgttgtggattgggttgaattgacgaaaccaaataaaaagtaaggaatcttaggtttaataattccatattttcttttctatgtccaaagtaaaatagtgtctttttttgttaaagtaatattatcatcaagatgtagttgtgtgaaaataaaataataactctttttttcaatcacattttaattacgtagtagatgataaattaatcgtacgtaagatgacggccggattttattcttacatgtgactacgaaacattaagaaggacagaagcagagaatcaatgtcgggacgagaatttaatcttaagttgtcagtttgaacgcgccttgggacgcgtgtacacaactcacaaggtgacaagtttgcttttttgtcagtttgtgtgggccacgtcatccattttcactctcaattcttagaagaactcattctcaagactctctactgatttggtcattattagagttttttttttccttcttccaatgtctactgattacattttttcccttttaccaattctacgtaaaaaatgagtgaatttgtttttttttgaaaattgattgattacttataaagttttaaaatgaggaaaaggatgactattgatttagtcctttgcggaatgtccttcatcatccctctctcgaaaagggataatttaaaaacgaatagacagaatgatatattatatacattttttttttttttttgggtcctaaaaaaggagggattggtttatagtgaaagaaaggaatctaaattagatgattgtgttctgcttttgcaagtaccaaggctgctcaccaatatggaataaagcacattcaaacctattaaagctaagccacataatataaacctgcccaatctctcataatttagctacatttattaaaaatttactaacgaaacataatcatctatattttttagtatcacctacaacataaattatcataagttaaatttcgaattttcaactgttcagaaatattgatacattggttacttgaattcccatcatatcactcgaacttaggttcaaacttaattttacacgtacgtcaaccaaaaataagaatctgttcatgaaaaaagaagaagagatgtgagtactacactacacagctttgatatacagttttgtttcacgagactgttttggtgtatgtactgtgagataatttattggcctttataatctcacatcctttatcttataattacttctaaatcagaactttaacaatcctaaaaacgttatcttatcagctactcgtcaattaatgatttgaagtgataatagcgctaggcataaatcaagataggcttctgtatatgagacccaacataagcagagtaggctcagaaatccaagttaaatcttgtctcctgatcatgtatgtatttctgtgcataaatatatatattatatgtatgcacatccatgtatgaatttatgcgaaggtctaggcatatatagacgacgaccagcatatttgtgtactacttctacagcagctttcacttttacagcatgtgttttcacttactttcctgagactacaaataaaagaaggcataaacatatataatttcatttttttttaaatcacttataaaattactttttaagcaaatgtgtcgaaattttagatcgtaaaggtacaatttagttatatacgcatgtgtacaaaattttataatcacgctctactgtttaattaatacactttcccaaggttataaaaccgaatagttttggccattatttgatcggataccttaatggtataatacagtgtcacgtcgattttggccaaaataaaaactaatcggtcagccactggtgtagacaacttaaaggaaaagaaaacagcgatgataaagtggcgtctagaacagaagaagtatcggttcacaaataattacaatattttcataatgaaaactttgaacaaacgatcaaaacttttttttggtagccgcgctttgtgttggagtctcttattttgtgttttgtagattatgatattacggcggcttggacaataacatctgtaatatgcaattgccaaatgccacaagtttccaatagatattttatggtttaaattggaacatggacttctccttttgtacgcaacaaaaaatttgtagaccttttaatctttaggaaccaaagatattatattgaattcaattagttcattatctaacatccaccagtatttgaactgatcagttacatattcacatttagccaaattgtatttaagcatcaacgattctccaaaagtttcccataaatccacgttgcatcacatatgatcaaataatactcgaaatattcttagatatgtgaaggtctacaaaaagagctgtatagagtctctatcatcttttagatgttggaaattgatcgatgtaaatataaggatcatacatgtggataaagtggtgaagggattataatctcttagtagtattgccttgtcacgtttcttcctcacgttgtcattcatcaaccacacacgttcttcattttcagaccaaagattccttattagccatacacttaatgaaaagtacacaagcgtacgtacatctttatttatataatcgtgcatgcataatgtacaaacatcctcctttttggcatcctgaaatgtggtgtttgttctaaatgaaatgtagtacatcagttgggacaagtttattcgaggcccaaaagtgaagatatttcgatagctggttactattgggctacgggttattgggcctgctttataataggtattttctaaacgagcaagggaacaaggcattggcatatatgaacaagaacagagagaaacaagattaatccacatccctaacaaagcacaacacataaacgctttttgagcatacagaagccaaaacttgatttccaatagaaagaaatatgccataacacagaagcctaataagatgtctacatcttcttctcagcagcagcagcaccaccaagagacctgcaagtggtcaagacagtcgaaaaattagtatagttcaactgctagacatgaagagaaatgtatgcaaatggatagaccatctagagaaatgccaaattgaaactcttgtgaagctaaaaacgaatgaaatcaaataatacctcatcttgcggagaacactagacatctcctctctcttcctcttagctctcttgtgagtacccaacttcctcttagcaaccttaagagcacgcttgtctttcccaaccttgagaagctcagtgattctcttctcataaggagccattccagctacttccctaatcagttttcttatgaatatggtcctcttgctcgttttctaaacaaaaatatcaaaacaaaactcttgagaaatgaattaccaaagtcagtgaaatgaaactcttgtgaaacagagagtaaaaaaacaccaacttaacagtctaactcttgctcaaaacaagaccattttcaactcaaaactcgacattttcattaaaactaatgtagtcaatattacagtaactgatatacacatttctaagcttagctccttaaataccataagtcgagctcaaaatgtagacccacaaaagccttatctaataaagcaataaactttgtaatcagagggaagaaagattgatacccctttgcgagaattgggacgaggagctagctcacgtctggtgacgacgtgtcctttgttcaatccaacgaacaaaccggtcttcactgctggagttgtcatttttacctgcaattactcaaaagattcacagagactaagttaagaaatcgattttgaaatctaaacaacggtaacgaagatgagagcgtttgatcagattctcatacctctgcaatggagaagcagccgctgctacacaacgatttttggaaaaaatggaactttatatatgaaacgacaaaagacaaaaccctacaacatattaaccaattgggcctatttgctaaaaataatttaatggcccaatatattgatccaattgaaacttaaaacatttgtatctgatacaggcccaaagctatcttgtttaataagacatgatacgtaacgtatagctaagtaacagacaaattacaactttggttatatgcattatcaaaatcaatttggttcggatctaataatacaaacgatatcttctgtggcagacggaggaccgatattcaatcatgtatacgaatttgcgaaattttacttgtttaatttgttgaagttctatgcaaaatattgactatataaccactgatatttggtgttgcatatcggtagcaaaataattctttggtcttccatgaaaaaccaagtttttgtataatttaattgaagaatgtgtgcagcaaaactccgtctcaagaaatttaatctatttcccatattttttctttggtgaatgagaaaaccataacgtttcattcaagctggaatcataataacaataaatggtcaattaattaacaaattaggagacaggtcaacaaaaccgaaagctacataaaagaaagagagtaacatagacgaaacgaacataacggcaacaaaagaaagaaacaaaaattagtgaggaaaaaaaaaagaaaaaaagattttgaagatccataagaaaaaggaagaagcttaaggagttttcgtgtagcctttttactaaattagcattggatgttccaactttagacgtcgaaggaacttaaataaggcctcgacccctaaagcgtttataaaattctatatccaatctcttttcttgtcctgtcttcttcttcatgtttctctcccttttttcactttaactctctctcttagcttttgctgacctttaactttacgatatcatcttcgttcattgtgagtgaatattggtaaacaagtatacattatacaattgtcaacaaatctttttgtagcttacccatatcacaaggctactcgttgatgactaatactaactgaattttcactttactaacgttgaaccatcatttcatacgagtaactcgagttttatagaaaaaatgtcatgaagaaacatatttaagtttttagagtaagtgtactctctaaacatccagcagcaatattagcaataattagctattttgcatttacagaaaacaaacataaaaacagaagaaaaaaaacaatattggaaaaaatcataaccaaaaagaaaaacctaacaatggacaaattataatgatcatcttgaaacgaaaatctctatatgatctgaaactcttaaaaacaaaataccaatgtaatcaagtatgtttcttttatctatttcgggaaaaaaaacgttcagatattttccaaacgtgacctaaagatggtcatcaaaataaaaatcataaaaactaaagttaaaaatctttctctctctcattaatcttatttcttgatcgtcattgttgtcgtcctccactgcaaatccgttataaacgagttgacgtcatcttccggcaagaaactcaaccgtctccggcaatacattgttctacctctaaacatctccgacgaacgtttcatcggcgccggtggacattctctaactatagggattctattctccggacgagtcggtgtcttgaacccatcattctcttcctccacaacttcttcttcttcttcttcatctaatctcttccttttcagacaaatatccaacacaagtttatcgtcggaacattcttcttctctcgtctctttaacaccacctaacgttacctcttcctctttcaagctcgtctccgacatacctaaaaatctataaaaatcaagaaatggcacccaaaaaaaaaactcttgttcctagatagagagagagaagagaatgagaagaataagaagaagaaataatgattgatcgatgtagatagatccaacgtggtaaagaatattaatcaagaaaattgtcagcttttgtttttttattaaattatttttcaggtttatttatagtcggagattagagcgagtttgttgtgtattgttggatgtggtaaggagagtctaaaggcatacataacgtaaccaaaccctctgattcattgagaaggagacattattcgacataataccgttacgataaccataatatctcgtcgataaagtaatcaaaatatcgccgatgcctttctgcttctcgcaagttaagcaccaaattgacatctgcctttacgtttccaatctccatgtgcgcttttttttcttctcaggaggaaaaaaatatatttgttgccgttagactttaattacgtatctaactcatatttattaccacctaatcttattgctaataacttttgtgtatttataaggaggagacccactcttatagttttacattaatgacttctatgatcagtttagataaatatttttcctcaaccggactaaatgtattcttctatatatatataattaggataaacattttatgtaagaaatctaaatattgtttagttgaatgtaagaaagttttttggtgtaaatgttaagaaatgaatgtaagaaagttttcttccctattcatttttttgtcttaactttggtgatttcatgatatttatttcatttaagaataggaaatcgcttgtgaaattggaagcaaattaagaaaatacatgatagagcttttaaaagtgtggatgacctttcaatacatatttgcttggaggcgatggtgaaaaactgaaaatgacatcagatacacgcttgtgaaccatctttaaagtattgatggactcttcactatgaaagctctctttaaaattaattttctttgtacatgtctctaagcaatgtcaaattaattagaggtccaaattcaaaaaaatgtcgtattgaatcattccattactaaattggttcaatgtcagatttaaacagcctagggataatttagtgagatatgagattctactttcaacatatactaatcctaaatctctagcaactttttatataagctataaatatcatgaaaatgtattttaatcgtttcataatttatgcagtcacactaatggaaaaaaggccaattattattattttcttcagactataaatgaaaacataaattaaaatgcagattagtttaaaattttaataagtaagtaaaatgcttatagccttatacaaaatcatatttggaagtttctaacattgttgcaatttgttatcacaaatcacagtaatatttgtatactaattagtaattacaactatacacaaatttaaatgggtaatcatatatttgtgtccagtggattgaacaaatatgctcggcccatgcggaagtaatgccaattttgggtgagtaaagcccatgcgaaattttcacataagaaatgcatgctttttgttttcaacgacatgagttgcatgctttttatcattgcttatatagttgcaagtttgcaactccttgatattttttttatgtagacactactaccaccaaaaacttttggtctgcttattcttgtttactatgtaaaaaaaataaatgaattgtttatttactccgatttgatggagtctggtttatgaggttttatagcctttacagaaaattgatagttacaaaaatatttttcaaaaataaaagggtaaaaccgtcatttcaagttgttattgttttgggggactggatttgaaatgaaatatagaaccggaaaacaaggtgagccgaagtcgaagcctttggacccgtttttatatttactcctcccattcccttctccttcaatccttccttcctcctcctcccttcttcttcttcccctctttcattttccagccactacaaacttttctatctctactttttttcctctcgatttcaggtactttttgagaccctttgttgtgattttcgaacacacaccccaattacgtttgatttttgatcccgcatcgatttcaattcatccgtttctgagtttcttttggatctgggtgtcttgagctaatcttttcgatctgttgtttatcgattttactcatgcgtatgttcattacaccatttgttatttgtttaatcaaccaaaagactcatgtttttcaaatgtctttaatataatttttctgattgaattttataatatttacatgattctggatccagaatatccttcttcttcttccattttgtcctgtattgatttgtctttgaaaaaggattgttctttgtatctgtattggtgaaaaaggattgttatttgttgataaaaatttgatctttaaacaatgtttggttttgcataaaggtagaagaaaatggctgatggtgaagacattcaacctcttgtttgcgacaatggaactggaatggttaaggtgtgtcattctttctctctgttttttttgacaaaagttttcatctttttttcaatttttgattgatgatcctctgaacaatgtagcatttgtttttttttgtttaagatgatgatgttcttttgtattggaataggctggttttgctggggatgatgcacctagagctgtgtttcctagtattgtgggtcgtcctcgtcacaccggtgtgatggttgggatggggcaaaaggatgcttatgttggcgatgaagctcaatccaaacgaggtattttaactctcaagtaccctattgagcatggaattgtcaacaattgggatgacatggagaagatttggcatcacactttctacaatgagctccgtgttgctcctgaggaacatcctattctacttaccgaggcaccgcttaacccgaaagctaatcgtgagaagatgactcaaatcatgtttgagactttcaatgcccctgctatgtatgtggctattcaggctgttctttctctttatgccagtggtcgtactaccggtgagtgtagcgcttttgtgtccttatggtgtaaagcttcgatctttgtacatttttgcagagcaaaacgtaaagcctttcttgaattgtggatgtgcaggtattgtgctcgactctggagatggtgtgagccacactgttcctatctatgaggggtatgcacttccacatgctatcctacgtcttgatcttgctggtcgtgacctcacggatgcgctgatgaagatcctaaccgagcgtggttactctttcaccaccacagcagagcgtgaaattgtcagagacataaaggagaagctttgctacattgctcttgactacgagcaggaactcgagacagccaaaaccagctcatctgttgagaagaactacgagctacctgatgggcaagtgatcaccattggatcagagcgattccgttgtcctgaggttctttaccagccatctatgattggtatggagaatgctggtatccatgaaaccacctataactccataatgaagtgtgatgtcgacatcaggaaggacttgtacggtaacattgtgctcagtggtggaaccacaatgttccctggaatcgccgacagaatgagcaaagagatcactgctttggctccaagcagcatgaagatcaaagtcgttgcccctccagagaggaaatactctgtctggattggagggtccatcttggcctccctcagtaccttccagcaggtacacacagtcccatcacttgtttactctaaacagacctaaactaaatcctaatcactctcagcttaactaaactggttcaattctgaaactatgtgttaccttgtgcagatgtggatcgcaaaggcagagtatgacgagtcaggtccatcgattgttcacaggaagtgcttctgagttcaaagttgatcatttttcagagaagaagcaccgccagggtttttccgaccatttctcaagccgggtttttaatcttccgttattctgctctttgtttttgttctcttatgttttgaaattcatgccaaatacattttcatggatttatggtaatctgtttgtagtatggtttaaaatctaatgcaactgtgtttttgagtgaataagtacacacctcttcctcttcaatttttcaattattatgtaacaatttgttttctgtcttctacttgaatttacacatgtaaagatataaatcgattttatttataaaccaaagtgttgcagctgactaaatcaacatcaagcttgagaaaacaaagccatggataaactgaagtgataaatggaacacaaaggtaaaagaaacaaatacaaagctgaggtaaggaacccaaaagtctaagtaaacattggagacacccaaatgatcaaagacaaaaaaaaacaaaaaaaaacaaaaaaaaaaccttacattacattacaagttacaacaaagagtttaggagacggttcaggggcggtctaatctgcaacccatttgttgttcaagaaacttggtgagtctgatatgcctagaggtccattgatcagccagtttctggtctttggcctctgcgtctcgcctcaaaccaacgagctgttctctgtactctccttcgatcttctccattgcgttcttctgctcttccctaagagctttcatctttgcctcaatctcctccatcttctccctttgtctacacgtcttctctgactctagctgcagctccagccttcttagcctccatgcagcctctttcttatggtctgcccaagctcggtgcccttcctccaactctctacaacactccacaagctctgacaagaacacactctcgctactcccactacaagacggcatcatactccctaacacaagtccccctggaccgttctctgctctctcaggctgttgctgctgcagccacgggattggcggttgaggcgcagctgcagccactgtggaaggcgataatgtcaaagttaccgagggaggccttgcaacaacattgttcccattgttagaagtagctaaccaaggcgggatcactgggttaggaggctgaacttgttgttcagaatgtaaaaaccctccattcgaattagccatcacaaccgttgcagcagcggcagcagcagggacaacgttagaccgctctttgacaagcttctcagcgaaactctcgagaatccgatcgtacttactctcgtcaataggctcaactctcttgttactctctttctcttctctctgttgcttctccttaaacacttcccaccacttccctaaccgctttgccgtcctcccgggaacctcagcagcaatcttcttccacttgttgccgtgtttctcctgaagacggatcacaagcctctgctcttcctctgtcaaagaccctttcttgatccctggcttaagataattcttccatctctctaaacaagacttggcgtcacggttcaaaggtttgttcatacgctcagacacaagatgccattctctcggaccgaactgtctaacgtaagcacgtaacaatgcatcttcttcaccactccaacgttgtctctctttcatctcctactcctcctgacatcacttcttcccatctcaccatccttcttcatctgtaccaaattcaaaatcaacccgtttcataaatctctccaattcaaaactctaaaagatcgaaacaaatctacaagatctgtcgaattttcgaattagaaattacaaagtctgaaaaatttccgtttcaagaaatgaaaatgacaaaaactttgacaatgtttgaagcaaaacttggaataatttgttattatcacactatacaacctatattctggaaaccaaacaggggaaattaatgctgaccccaaaacactattaagcaaagacttattaagaagataagagagttaaaattattactataaaacaaaataaaaatgcttaccaaatgatattgaaaagataaataatcccaaactcaagagcaacttccatcacacagatttgctctctctctcacttttttttttttatatagttggagaaaatggaagagagaaaacgaaaagaccaaagtgagagaggcttttaaaaccagacgacgtacacgattagaccacagagacggcataattaaaataaaatctttaaaaaaaaaaagagagaaaaagtttaccgactgagacacagacgttttcccctttttacatcacaagtggggaaaaaaaaaactctgacagaggcgcgtggaggtgaaaagttgaaattccataagttcgttgtttgtcattgacaatattaaacctttttttatatatatttactacattgggatctcaaaattcatttttctataacattatgagaaataaaatgacaatctaatgtaggggatgctttaaatttaaatgaaaaagtgttgtactttagtggctgaaaagtcatttacttgtcaaaatgatagaagaaaaactaaccattcaagaaaataatgctccatttataaactccttcactcaaacaatagaattttatgtccaatttgagtaacattaatttccacttacccataagaaaaataattataatagcataaaaatagttaacatttaaacttgttgatttattttccaaacacttatattttgaaacagcatattaacatggaaaagtatttgttgaaaatggaagatttcgcaatgatgatcaaatagagatgagaaaataaagtttttgcaatgagaagagatagaacatcactaatgttactccctatcaaaaaaaaaatcaataatgttgcaagaaaaaaaagagaaattttatttaaaaaatgagcaaaactagaaataatcaagtaattttataaaaccttagaagatctttctatttgccatttgaaaactttaattagtaaaatagatttggctaaacaaataaaaaaaacttttaggctaaaaattggatttgacgtatgagtaattggggatgagggggacacgtgtcagaaaatgggaatggtatcttttggggaaagcatgtaagtgtgtaataatggtccccttctctctcccataaccctaccaaaaatacttttctttgttccatcacatccgactaccactactcactcacaccctccgttttttttttctgctaccatgcgccaaaatcttcatagcgtattttagtatttctccgacgtctataatcaggcagacaaaactttcactcttttatcattgcatcaactagtcactcatcacccccaagtatctagcttatacaaattaggcaaccacatgttttctatataatatgatgtcactaaggtctatttatatattattataataagattattgttgacattgttgttgtaatagtgatactgtaatactattattctaataatgtatttggataattcagtgttgcattatgtgtaatagttaatcgtagcagacacagcattactaagtcaatacattttattttcgattttttttgataaaaatttagtttgcaatggtttccattttctattgtaatttgtaaatcatttcatcatgcaaactttttaagagacatgacctgacattaaaagttcttttcacaaaattagaatgttaactacaaaaaagtgaagagaattttcaaaataaaatcactacaaatatagtaataatatcttttttttttttttttttttttacagcaatagtagtaatatctttccccaacaaattaagctgaaaaaatcaatattcaagaaactagtttactctcaattttttttttttttttttttttttgtcaatcagtttactctcaagtctcaaaataatacaagaaattatgcagtggtgttggtgtgatcttacacagaggagcggagagaacagccaacatggtaggttgatttaaccaaaacaagaaaagtatgttgatatgagaatagtggtgggccttggatgggcctgctttgaaggataaaaaaataaattatcgatgtgtatgatttacttgaccgtttgattgcctaatatatttctctttacattcaaaatttaatagaacttttagtattgtgtgttttaagtttgagttagtgcatgtttcccagttgcgaatcgtaagatctatcattaatcacatgtttaataaaaaaaataaaaaataaaaatgaatagttttttattatcaggcgattcggaccattttggtccatagtctctgatcaaccttcaataatatttgtgatggatccacagacattaatcatcatgcatagttcataatattgcatggccctcgcgacctaacatgatatacattttagaattttgattccggaggaaaaaaacttttagtaagcaaaacaataaaagaaggataaaatatactatactgtatatatagaagggaatgtgaaacagagcaaagacagtaaaaaaaaagagaaggtaaaaggtgatggtatcagagaaaggtgtttttgaaataggaaaataatagtagtgagggaaatgacatgacatatgagttgtcaaattgaggcagatcccttctctgatcttctctctgccatctcttgccttttacctcatgtgctccattctctccggcttttttttttctcttttctcttttctttttctcgtttttttaatatttataaaaaccttttttcctacaaaatatgtagggatattttcaatttggatacattcctacatggaattttctttaattggtaaatttgttgaaaaataaaatttgtctttagtgtttgtaaaactagatttttttgggtagttaagctaggttttcttttagaagacaaagctagtttttctttaggacgtcttggtagtagcgcttttttaataactaaatttttatatttgtattaatatgttttattctaacttaaattcttagagtaggagtatttttcagctagattctttttcaaactacaacttcttattaattaatcagtagtttgagtaacaacatgcctataggaccatagaaaaatcgactcggttaattaatggttttacttggacaattatagtgatttcttgaataatagggttgtaggcgttttggttcatgaagatatgaaactggttctgatggcgtgaattgaccattctctaataattaagctataaagatagggagattggccggattggggtatatattgaaccaattggatattcatccgatcttttttccgagcattacagctaaataattgaacttaacttaacttgagattttgatccccaaaaaaaaaaaacttaacttgggattatggtatatgaaattatgagtttgggtcaagaaacttgtaggacatgttcataactggttaaggagaataacatgtgtatcaattgaacaataaagaatattgaatcgttcttttaatgatatctttcgaccatcctatttatttaaatatggtttatgtagacgttataattcaggttatcatggaaatgttgaaatttggatcatgcatgcttgatccggctagccatttcgttgtgtgacaattgacaaaccattatgaaattgacttgttcctttgttgatttttttttgtaatcgaacctatttaaatgctaattataattaaatttccgttttggattggggaaatgtttgttaatttggtctgatattggactaaagagttgcttgtacttggtgtttatggcaaatgaccagcagaacaggtaaagatataataagataacgaagtagctaagtaataaataaagacaaatgatactaatgtgatgaggatcatgatagtatgaatcaatgaatgtatgatttaggttaagtgtcgtatgttatgttttattgatttatgacatgcatgttctcattcgagtttcatagtatattagtatagcgatcataaagagtcgtacgtgaacactctacacattaagtaaaagaacatggatcaaaataacaataacaatgctaaacaagaaaataaagcataacatgtactaaagagtttgacaaaaagaaaaacatatactaaagaaatcacaagcacaatgacacacaaaaatgcaatagaaagtaacgagtacgtaacctcacaaactggcaaatccgtttctatatccatctcttttctttagctagtccataacgacatttaataataccttttaactttcataaccactttgcctgggccaatatagcctttaaaatcacaaccttaataatgcaaactacaatcaattgtctttactcttaactcttaagtcataagacgcggagaactgagtcccacatgaattatgaaatcgagtttaagaaaaattgtaatttagtagtatttcagattttatatcaagaaaacttggcccaatggcccattacacggtccattcgactcgatcactgactgttcgacactctttggcttattagcagaacgaagatgccaccaacgaaataattaaaggaacaaaataaccaagagaaaaacaaatcactcgtaaatcgcaaagattaaaagaaattttgctgataataatactaaaaacggaaatattttccacaagccaccggaatattcccaagaaaattaaagggaaaacccagggctggaaaatgtctcatctctcttcttgtttgtgtcttcttccattgtaaaaaataaaattaaaaaacatcttttgggtggtttttcagatttcagactcgaaagtttttgccggagaaagtctgaccaaactgccacgtggcaggagcaacgttccatgaggtagaagaacgtcggtcagaggcggtgactcggaaagagagtgattggccgatgagaacggcgttggattgccagttctgtccccagttccgactcatcctcacccaatctgtctttgatccctttacgctaactccgttaatatctccggcgccggcaacgttagttaccagaacaagattgaagtatctgaatccgtttactgtgaatcttatccctcctatcttccgacaaggtacccttcagaggaaacagaaattcagacaattattaacaacaagacaagtgagactgagagtgacagagagaggtggatctctgggttactgtgtctatgtgtcctgcttggtttcccgaaaagataattggaaatactatataaataattcgtatttaaattgtgtataaagagaaagaaagaaacaaaaaataatactaataatcgagagtgatggtttcagtttctgaactctgaaacacataggccgttatctaaaagtgctacaagcctagaggtaaacaaaaaaacatgttcggtagtcggtacaagtatcttttaaagttaattaaagaaacagaacctaaaaagaaaaaaatagatattgtgaaaatactattttaaaaaaagaatctttagatttataaaggatttttttttttttttgaatattggattaagaaatttttaaaacgtcaatttcacatgagacatgaaagtgctatattcaaactctgtagtttctagcatattataacgaataatcgaaaactaaagcctctaatttgttttacactaaagcctctaatttgttttacacgtaaaacatttatctccccttcaaaatattaatctcctttaaacataatctagatttgcaaaagtcactatcatgaatcatccattaatgcatatggttctttgtgtaatttcttcaccgtattattaacagtgaaattcttattgatttcgccaaattataatagccgacaaaaccaaaacgacgcaaaacaaaaaacagagagagacctgcgataggagacggggacaatgcctgcacggtatagaccgatcttgaggaacataggcatggcgagatcaaaatgctcgcgcggcggattgcaccaccctccgtcgtcactcggctgagcaaaattcggcggacaaaagttcgtcgccgtcacaagaatagatggatttcccggaacacaccatctcggatcatcagtacacttaatctcaaaacaagcaccacagctgaatccgttgttgaacaaagcagtgctcaacgccgccgtgttcacaccgtatccttggctgtacaagttcccgtacccacacgcgccgcctagcaaaaccccacgcgccaaaaagaaaaacagagagaacaaaaaagttagaaacttcacaaaaaagaagaagtcagaaatcataattcatggtatatgtacgaaatgaaatcgacaatggtggatttggtaaggacgtaaggtagtgaatatttatacccattgtgccggaggcgtcactgccaccgtagaaagtggcgtgtgcattctgccacggtccgccactgtaaacgccggggattttggcgtttgttgcggttaagagaaaggaagccgtaacggccaaccacaagccgaccctaaacgcagtcgccgtcattgagttaataagagagagagagatgtgtattggatagggacgagagaaagcgggaaggactacgagtatttatggggactgatgctggttgggtgtttttaaccttccagttaaagttttctgtaatttttcagatttataggttttggtaggtaaattaattgctgcccatctcattggtttgattggctttcactttctgagactaaaccgaaggtggcaattgtggttatgtgccaaaattaaattagtgcagataaattagtaaaccaaaactgaaaaatagatgttgttttagttatgttatatccgaaaccaaacagctctcaacccaaaatttaatttcggtattcatagttgaaaaccgaaaaaaccaaaagctcgaatttcgtataaccgaatcaaaccaaaattataaatataatattttttttggtaaaacaaaccaaaattatatgccaaacacagtcacgtatgtttgtctttccttttcacgaagtaaaaaggttatagttattttatttgccattatctacgcatgcacgcatgtataagtttttttagtcacagagcatgttaagttgttaacatatataaatgtattaaacaaacgtaaaaacatgtatgaagttttcctctatattttcttgtgaacatatcttataaatgaaccaaacgaatcgagcatcacattaagagcatgtggttagactaaggtcgacatacaaataaataaattagttttgcagcatcagcatatgaatattgtttatttatgatttttctgaacaataataaaagttgtattaaatggatgacattgtcacattctcatagggccgcaaaagttgaatgacaagcttctcgagagttatcgtatattatatgagcatgtggagtgtctgtgatataattgttacacaaggtttatgttccatgtgaattattataagttccaaggctccgaatggctgattttagagcagctttgttttactgtttacaataattgaaatacattattccaaacacttccaacttcatatgtagaaactaaaaagtaaaaagacatatataatttcaacagttaaaagaaatttgttgaaccaatcaatttgtttcgatcattgtaattgttcaaagaaatttacttgaatttatataactattcacacataatgtatagcaaatcatttgcagaaatatgggaatagaaagacatggatagagaagcaaaagaacggttggactaaaaaaatgaaaatctttgaatctttctctatgtagcatttagtcaaattagaatatcacaattttctccacaaaaaattactagatagatctactatataaacggtctaataagttttgagatcatgctctctactatgtaacaagcctgtgatgaatcaagtctttaaccctgactatccaccggcatatgggtggatgtcggtgctgccctgtttgcgtcaatggaaaccataaactctagaattccatttgcaatccatgcgttaatgttagttggtggtcgcatgtgcgcaaatgcaatatctttgtaatctacaaatggagggttgtaatatctcagtacgattcaaatctacaaaagatggagatgttggccgcttaatttgttagaaacagctaaaacgaaatgagtaagttttttgtttgtgtttttataaagaactaagcattacaaacgtaactaaaataaactaaactagataaagaaagaaggatgcataaaatgacaatgaactattgaatttatattagggagaaaagtcagcaaatatatgaatacttgcatccagagaatagatcatagacgaatcatacgcaaagattatgcgagagttcgtttgcggtcttgctaaaatgttaaggacttttacatgcttgatctaacactagttgtggtctagctatctgtttttttttttacggttttttcacgtgagcatataaccatcgtattactaagacgcaaccaatatgaaagttgaaaaatgtttgcacgaacattactatcttactcctttaagcaagcaataaacacaaaaacatttttgtatgaaacataaatcgataaattttgaatggcacttagcatggatttttgttgggtataaaatctggtttcgattgctactgaacacatagcatggagcatggattaacacaagcaataccctaaaaatatgattctattttaaagttggaaacgaattttatagccattgtgccgttgggggaaggtcgagagactctctcattatcttaatcaaatgggtcttaattaactaagaaaattattaaaaagtttaaagaactctgtcaacatttaaggttcttaaaaactaattaaggtttgattttagtaccatccaagttggggaaaaaaactatacataaatctcattaaatgtgtacttgccactaacccaaaataaaataaaactgtactactcgtactaatttgcatattaaaaaataattaagtaagctttacttactgtaatgacgacacgtggcgaacaatgaaccgataagaaaagcacattttagctattgtcaaaaaaatgataaagcacgacgacgacaggtccccacaaaacgcatatgatccaacggctctgatttgcttttccctacctcgtagattaggacctttttattttaattattttaaaaattaaaaacgcatttattctgattcctctcttcaccctctaaacgtcgtcttctcttcttccttcggtaatcatcttcttcttccttaataatttctcaatcgagaaatgattactgaaccaagtctaaccgggatttcaggtatggttaatcggaaccgtttatccggtttacccgatcaaccttcttcgcatagcttcactccggtaacactatacgacggtttcaattacaatctctcctccgatcatataaacaccgttgtagcagcgccggagaattcagtttttatccgggaagaagaagaagaagaggatccagctgatgatttcgatttctctgacgctgttttaggatacattagtcagatgttgaatgaggaagacatggatgataaagtctgcatgcttcaagagtctctagatctcgaagctgctgagagatcgttatacgaagctattggtaagaagtatcctccatctccagaacgaaacttagctttcgctgaacgaaacagcgagaatcttgaccgtgtggttccaggaaactacactggaggagattgtataggttttgggaacggtggaatcaagcctttgagtagtggttttactttggattttcgaaatcctcagagttgttcttcgattctaagtgttccacaatctaatggtttaattactatctacggagatggaattgatgaatcgtcgaagaacaatcgggagaatcatcaatctgtttggttgtttaggcgtgagattgaagaagctaataggtttaatcctgaagaaaacgagttgattgtgaatttcagagaggagaattgtgtgagcaaagcaaggaagaactctagccgtgatgagatttgtgttgaagaagagaggagtagtaaattacctgcagtgtttggtgaggatattttgaggtcagatgttgtagataagatcttggttcatgtaccaggaggagagagcatgaaggagtttaatgcgttgcgtgacgttttgaagaaaggagtggagaagaagaaagcttcagatgctcaaggtgggaagagacgagccagaggaagaggacgtggaagaggaagaggaggaggaggagggcaaaatgggaaaaaagaagttgtggatttgagaagtttattgatacattgtgctcaagctgttgcagctgatgatcgtaggtgtgcaggtcagttgttaaaacagataagattgcattctacgccgtttggtgatgggaatcagaggttggctcattgttttgctaatggtctcgaggcgaggttagccggtactggaagccagatttacaaagggattgtgagtaaaccgagatccgctgcagctgtgttgaaggctcaccagctttttcttgcgtgttgtccttttagaaagctctcttatttcataactaataagacgatacgtgatcttgttgggaactctcagcgcgttcatgttattgattttggtattctttacggtttccaatggccaactcttattcaccggttttcgatgtatggatcaccgaaggttaggatcaccgggattgagtttccgcagcccgggtttcgtccggcacagcgggttgaagaaactggtcaaaggttagcagcgtatgccaaactctttggggtgccatttgagtataaagcaattgctaagaagtgggatgcaattcaacttgaagatcttgatatcgacagggatgagattactgttgttaattgcctgtaccgggctgagaatttgcatgatgagtcagtcaaagtagaaagttgtagagacactgttctcaatttgatcgggaagatcaatcctgatctctttgtctttggcattgtgaatggtgcatacaacgcaccgtttttcgtaacacggtttcgcgaagctctatttcatttctcctcgatttttgacatgcttgagacaattgtgccacgagaagacgaagagaggatgttccttgagatggaggtctttgggagagaggcactgaatgtgattgcttgcgaaggttgggaaagagtggagaggcctgagacatacaagcagtggcacgtacgggctatgaggtcagggttggtgcaggttccatttgacccaagcattatgaagacatcgctgcataaggtccacacattctaccacaaggattttgtgatcgatcaagataaccggtggctcttgcaaggctggaagggaagaactgtcatggctctttctgtttggaaaccagagtccaaggcttgaccgagaaatcctcgttggcatatgagagaccatctcttgattttcttcctgtgtaattcccagagacagaattacaggtacaactcggattcatattcacatagctttattaataccatcagaattctttctaggcattgtactgagactgtgttatctcttttgcagatgtaagaagagaatgctgcacaaagaacttgttcaaagataatattgatgtaagtcctgttttataactttctagctgtgtttttgttgtttctcagctagattctcctaacggtattcttgtagctagggtgatcagattgtttgtatattgctagcagagttagtttgtctagattgtaacacatataagaggaagcttagagaaactatggtttaaagagaagttttttccttctccaatgtacacacgagaaccaatgttgcattgaaataagatgttttactatttctggaaaactcttctgcttggaacttgagctcctagttattagttgtggtccctcaatactattagcgagttttgatgatctctaaagatatttcaaaagcttttgatgttacttagagattctagggcaagacatcttgagaaatagaaagagccggttcagacacataaagaactcatccctctcagtgtcaattctaggactttgctacaatgacaaagggaacaaaaaaatacttaatcagaacttagtggttacttgagtgaaaagcgccttgaaatcctttgttggggtgcctgttccctcgggctttgaggccaggtcaagagctttgaattttgcctcctcaagctgcaatgcctgctcaaataataaacaccatggattaggagaagcaaaactggtttaaaagatatggtaactgttgatggattatgcagtttacgaagcccttttggtcataatgaacacacacctgaacacagacttctgcaacatcagctcttgcgattgttcttgtttctgtctcaagtagctcgtcatcttttcccacaagtaattctcgaatgccaccgtccttgtcctgcagacctccagccctgaatccaagagcaatattgcaagatgagaatattccgccattgcaatttgtaccggatgcaagtaaacaataaaagttacctgatgatggtgtatggaataccggaatcagccaagtattgctcagcctttctcttccagacctacaaattgcataaagactgtgaacatttgccgtgaaactcatctctgtgttcaagaaaacagagaaagagtagtctcaccagaatgttagcattgccaatactattgagagggtgattaatgtttgttcctcccatcgacccaaccaaaacaatctgcttaactcctgcagccttagctgttacaacaaacgacaatccatcatcatcaacacctccgctaaacacacatacaacagagatgatgaatacaaaccagcgtctatctgattcttctgaccaatccagtcaacctacaaacaaaatcatgaattcaaaaaccaagaagaaatgaagaaatccacaagaacacactacactaagatcaatgtagtcacctgttctggataagctccatcatcaaagaagaactcaggtcttcctcctttactaggatcaaaaccgggcttcatctgcggaacagcgctagtaagaatgaccaaagcatcaatcccttcaacagcaggagcaattgatgcagtatctctaatatctccaatgaatacttcatcctctccattgatcttctccttactctcctttgtcctcactaaaccccttgccacgaactgctccgacctctccttcaatttcttatacacaatttgtcctgtcacagtcaccatcaatattgaacagtgttcttatggaatttcacaataccacattgtagagataaagagagagaacctgttcttccaccggcaccggtaacgaggacggtgagaggttcagttgttgcggcggcggaaacggtaaccgatactcttctgttttttccggtgaacttacttggaccacaaatcgacgtagaatctgacacaagtgagcgaaattggagagacgacgaacgaggaactgagacaaaggaagaagctacagctccggatttgtaagtgttagcaggaagtagtggatggaagaatgttgtcgtcgtcgtcgtcatcatcgccattgactggagtttgatagctcagacgaagaagacgagagagtgagaaatatcgcaaaatttccgattttcgccacgtcaccttatcttttgaattatatttgtctttttgtttcattctaattacgctttaaacgggcctgattttaaaatgggccatggcctatctcccacgaatgatcgaagaacatctaattaattgaagtaacatagttttactgtttgatttatatttggagaactacacaaatttttctctgtgtatacaactcaatattttgaacgtcgagagaggtttctcaacactataagacggttgtttctgtataagaaggtttctttacgtactctacaagcaacaaagatacaaatcaagaaaaataaaacaccggttccttcctttttaaaatcaaaacagagtagtttggcgaccgattcttctcggtaaaccaaagttttgataagatcggatctcaccatgaactgtagccgtcacaatcaccatcccccaagccgttggctgtatagtttgcggaccatgccctccactgtcgaaccatgaccaagaagataaccttgacgatgtgtttatcgatggagattccccaaacctcgatgaatgctgctccgaagagttcatactcgaccgaaacgactcactgcttcccagctccggtcctgcctcttcctctggttgaatctgactctttgtagcggctttcttaggcattggaggtaaccctgattttttattccggttagatgtagttggtccagtcgccgaggtttcttcttttgttggtgagcttatggtggatgaaggctggcttgaagtagatatgcgctttgagtggcgtttagagtgaatctgaactggtggtggctcacctctaacatgaccatgccaaggaacagcggctgagacatctttgcaatgaaaatgttcgtgagattgtgtcgtgagtgttgatcttgttcggtgaaagtcattcttccataagtaaacttgagagtcttcactcgcacatattatgtatttcccatcttggctatacgaagcagagagttggctacatgtgtttctaaagcctgtcaacaaaaagtatcagtttttgtttttgttcatcttggctctagtgcttgtagagaatttacctttgaatttgtgaataacttcagaaccgtctagtattcgaatccgtgaatcagcggatgtgacaagaacttcagatggattcaccggggaaaactatataatggcatcaacaacttgttaacattttagtttactaaagtcttaagaaggattttggcttttaaagaaaggaacctgaaaactagtgatcttccttttcgcttgtgatttcttgttgctctgaacatcaatctgattagtttggctcagcttacaatctgttctacagaagaaaaaagcgcgtcgcaatgaaaagaagtattcaactggtaaacatgatgtttgatacagaaagagcttaggaagaaccttctgtatcgtaagcacgacaaattcctttatgtgacccgataagtgcacccttcaaccgaaaaaaccaaaacttccatcattataaaaacaccataatggatggattttgtagactactccaagaaacagagcaaaaaacagagcaaaaaaacagagcaaatacctgaccgtctggtgtgtagcaagcagcagtaaccatttcatgaagatcactccattccacaacatgtcgatcttgtatgctccatatccttattttagcgtcaagtgaaccacttaagaaataattttcatccactggactgaactgaatacatgtcactgttgaatcaatgagacaatatagtcaaaagtgcatgcagaaaattaatagctagatgtgaagataggatacaaaagatttgtcttaccatagtcattatgggcaaacagtttgagacatgttttggtttctatatcccataacctgactgttttgtccatagaagatgaaagaagaagctgagatttggaccatgaaagatccaaaatagcatccagatgacctttcaaagagcaaacaggcttatcagaaaacgagaagactgtttcaggaacatgtacgtaatccggaatatgattgtgtcgtctcccggatgatccctttcctttctttttcttctctaccacagttatctcatttccagaagagtcacaaagtgaaggatgaataggagtgagacttccttcattcatagacattagttcacattcttgaacctcccacacatgaatgactctatccgctcctccgctcgctagataatgagcatcttgactaaacttgatagtccaaaccgcaccctcatgagcttgaatctcttgacacatatgtaaagcacttaactccttgtaagatttccctgttggtctaactttcacccactcattagctttaccatgtttatgatctttcccctttttcggactatcagtgcttccatcgcttacatctttatccgcaacgcgtaaactcatggaatgagctacacctttaatgttcttcaacaatgcagctcctcttctcttacttaacctcacactcttggaaagatacgaattaaacttgcgaagatccattaacggttcgtagttaatcctattcacattctctctacgcataagctctttaaccacaggtgaataaccaacacatttctcaaactcctccaaagttaattgcttccctgtttgcagatcactaagcctattccacattccatcttcatcatactcattcactataaactctttccctgtatcaagattctttatcaagaaaaacgcgccaaccctcgcattcgacattaccgatgtcaacgcctctccaccaccgcgcaaagcttttccatttccacaaaccgcaggtgtttgtctgatcggagtttggtactgacaaatccttgtccttgtaggacaaatagtagaatacgttcttgtaagacgctgctttgagattttccctaaaatctcttcttttcttcgtttctcaatcaagaacctctcaatatctgattccgatcttgacctcgcaagcataaccggaacatgatcatgatcttgttcatcaacctcatgattcatcttcttcttcatcttcttttcttcaccgttactaacaacaggcgcattagaaacaacgcgacgaatggaaacagcactaaccatatctttattactagcaagtcccatcccatggagaagacgacgacgacgctcagatatagatcccggagcagccatccaaatatcgtaatcaggagacatcgccggcgtacgaaatttcctagaggcggtggttaaggaagagacggctgaagaaaacgagagtcgacaatcgtcgaaatcttcatcttcatcggaagaagaagcattagccatgtcgaaagttaaagcagaagagagacgatcatgagtttcgaagaatctatcatcatcttcatcttcaaaatctcctaatccttcccagttcatcgtcattgtcttcttccgatccaatttgtttccatcttccatcatctaccaactagctccaccgaatttgaaaatggtgattgaaatctgaaatcagaaaatttggccgatcattgatgattcagaggcaccgttatggaatgatgggcaaatcgggaattatggaggaaagtgttgaagacgtgttttgtctttttgtaagacacatcgatctcttcacgttcaatttcattaccataagtccataactaataaaaatgtttgatgatgttaattaagatcttaagtcaaaaccaaaggtcgtggaagcatgttttgctttcgttataattcaaaccttaatttacgttttgttcgactattagtgtgaacaaaatcatatactatgttcgactttacgtgttaaagatacttacataaaattactaaggataactatttttaaagtttggtgttaatttctttttaatcaacaattttttgtttttgtttttttttgctatttttatagcgaatttaaaactactagacattgaccaagaagactgataatgcgagggaaccacattctagcaaatcttgagtcttgaccatcatgccaaaatgttttactaggaagaatatcaataagctatcatctttttctttattaaatcagtttagattttacattagaaaggaacaagttgaatattaacaagacttttgaccataataagaaaaagttatgaatttttgtattatgttcagaagagagtgtattggagataatttggagagagcagattgaatataggtgaccaaccaaaaaaagaagaagatatcatctgaacaaacttattaaagaacattgactctcatttctcagttaagttggtactgaaatacatcagggatactcttgaacacaagattggttcatatgaaggatcagagtgtcataatcatctcagaatttttttatactaacttttatttctgatccaggcagaacaagatatataagcaagattagttttgcaagctaataaaaatcttaaaagttgaagactagagttgcaaacatttcaaagaagctctctaatcactttgaattgaacgtttttttaaggttgacaagaatcaaaacagaacgagtacagttctatgtacatacatctcttcatatatgttttgagtctcaacatcattttgttacagcattagcgttgagaagtattgttcaaattcttgatcaatggtaggcttctttgtctcatgtagagtagaatcatctgtacacatgaaaccaagttagtgaatccccggttcattgaatcaatacggtcaaaccaaaatccggttttctttaccttggttaacagtccatcttccagaggacagaacaaacttagcagcattactactacatcctttagcatcttcctcttcttcttcttgttcatcgagatagagaatgttttcaatgactttctctgaaaaatcctctaagttctgagtcccatagatgtaatctagatggctttcgaaagagatcatcttgtcttcaccgcatgatccagatgattcctctttcatctctatatcattgttacactccatagaagttgttgagttcacataagaagacattgaatactctgtatcaatctccgagttaccatttgtattctctgaacaagcaacattggcaaaacaagtgtgttttgacagaggtaataacgataactcatcagattgatctgtctgaaatttcctcttcttgctcacctcaacttcttccattttcaacacatttttactactacttatgatcatgtgatggaaactgcaaaaaaaaagaacaacacatattaagatagtggatggatcttaatcaccaaatatatgaaattgactttattaatcttgaacttaataagggtttaggaaagaataacaggaaaactttcttaatctcaacgattaaataagctaaaatcaagataaaacttcaatcatcctctgcagctatgatttttggtcaaccattgacatgaatacatacataatcagtcaatcctctgtatcttaaagaaactgagaagaagcataataagaaatttgatctctaatgataatatataggaatagattgagaaactgaaacctgttaatctcagatggcttctcgttgttgttatccacttccacttcaggcatagatcgcagagagagagagagagatagagagagttcaaagataattgtttttcttattactcttttaaaaaatgctctttccactttcagagggtctgaaaatctggaaactgcgtaacttaaaatacataaattaagcatcaagtgtacgacgcgctacgttggagcgtgtattacacgaaacatttgaatccgttgatctcgtcgacatggtgtttgatttggcgcgtgaaaagagtctacgtgttggcgaggtgacccatcttcttacacgggaccgttttttatttttatctttcgctccatacgattttgcaatcttttttactattgtcccataacgattttatgggcttttggatgaggatgtataaatatttatcaatttttcccttacataggtataaatattcattatcttacaaagataatagtttataaattttatatcattatttaaagaaaataatatgatgtagaactgtctttttaaatttctattaaaaacttaattttagaagaatttggattttttttacaaaaatttttagaaaaacttctcaactatttggtaattatttttttggacaatttgttctttttccagataaactattagcttggtaccataatgacaaaatagtatttttagttctttacttggtctggtctactagctaagcaaaaaaatatcttactaataatttataataattgacacgtcataatgtactggatcacgtgcatcgcatgtttagacgagagtatcatatggcgctgtctgatgattttggtagcattcatcattgcaactcgtaagaagaaaagctgaaaccagatcttccttcgttaactgttttcagctccagcttctgaaacggactgtccagaaacaaaatatcatcaggttttatctcaaacaacaacagattatatagtttgtatcttggactaacctgctgtttggatcataatagaaaccgctgatggaaccatcgctgcaggagaagcatacgtagtaaaatccagctattgttagtccacaatctgtgccaacgtttacaaagtattgctctttccatctctgcaccaccacaaaaataaacccgagttgcaggaattatggaatacttgagagaaaatgatgattggattcgataggaaaaactgagagttataccataaatatataaggataattgttaagatccaattgcctgccaccatcagattcaacttgtccctgcagtattaagtccagaacgttgcttaggagatgttactgactatacaaacaatgttactcgagtgttacctgaagaggcgaaaaagacgggaactttgaccaatgtctcatatcatcttccctcctgtgacaaacaaactttcaaaaatttattcacgataagaaatcatcagtttcaaatctacaagaatataggaattgggacatacgttgcttcccattttccggtgtaaaaggtataattctttccatcaacgatttccccttcccagaatgttatgacctgacactcacagaatcaagaatcgtgtcccctattagaaattcaaggggaagcaatatgaagaaaaaatgagtaagagtgtaagggcttacaggagtgtctgccatgggaacgtttagagcttccatggtgccacaaagataaccatgttcaaggtcaataccctgtatctggacgttgactctccaagcttcctccttctgttgattagagacattttgcgtaccagaaaatgcctgcagcacagcataaaaacatgtgtgttcctcatctttaggttcattatgaataaacaatctctttgagccaatgaatgttatacaatcccaactagatacaaatgcacttgaattaagcatacatgtcaacatgaaaaagatatgaagccaatcaaagcagacaaggccaacttctaattggtataacaaaaatcagcattactagagaatcgttatgcaaccagaacacttgaacaagttgcagatctaatgggaagaaagtaactagacccatgatgtttgttgcctgcctatgaatgatgctttgtgcctgaacaacgagacacgagatctttaagttcttttatgctaacctaagtagctaaacatcatggaaacttataactttccttctcatcttaccatagcctctctctcacaaatttcacataaagtatactagcaaacccttgtgaagcaaagtttcttctataactaccacagccaatcgacagaatcaacaataaaaaaattagctattcttgtgatttcaagtattcataagtaagaacttgtcaagtttgagagaaaattcacctttacacataaaaacccctaagataatgtctttataggtatactcagattctgcttacacataaggttatgttcataaaaagagtgtgcatacataaccacagatgcacaagcataactaataaagttctttctagtcctaaccaatattcccaagacctctatggtcagacacttgagagaaaaacttgtaaaaatccaagtatcatacgaatcctagaaataaatttctgcaaaataacatgttttgttaattcattaatcgttgtacctggccagcgccgagaagtgaactagggggaagtggtgatcgattcccaggatcagttcctaaatggcaacaaatctcaacaaatgagcgagagagccacaaagagggaacataaacaaacaaacctaaattcaaaacttgaagaagcgatcaaaaacctgaaacttgagcaggcgtgttgctctcaacaactctcaccggcattttcttccgtctcctcctttccgtctgataaaaatccgatctttggtgcgaccaaatcaaatcgtggagcctaatcaaaaaccacatctcatcatacccggttcggttttcttaaccgaatcaaattatacataaaacggattaggcttctccggttttcgactgcgttttgtataaaacctctcaaaaaccttttcttctctccccgtcagaccgatcttctctctcctcgccgccgcctccaaatccggaagaagcttttttccacctctattatcgaacttgctttataaaaatctaacctttggacctgactttccgacttctctctctgtctagctgcttctctcacccaggtttgccttcctctcaagttgaagctgcggctttattagtttagctattgactctaagaatgttacttgaatccattcacatgagcttcttacgtcgttttcattggtttagctattgacgttgacttgggttttgcttgagttcattctctattgtggtctaccatactttttcatgttacttgattgcatatttataaaacggtgctaaaagtattccgttttgtatagcattctagatgttgcttttgaaacaaagctcagctgctgttcttgtcgttggaaatacaactccagtccttcacacttctcgctccacctacagagttggaccttttccagtgaccagaacgcagtcgttccagagtttgactatggcaaatttgcagaagcttcccacttcttcgtctgggaaattgaatacggcttcagctgtgccctgtagctctcacgatgcttctcctatcaggtacctatgtcccctgtattgagtataatggtgtcaaccattcttcttaagtattttctcgattcttattattttcttggctattgtggtgtgttaaaagataaacgagattggatcaattaagctgaaaggtgaaagtcgttgtatttaaaccacatatcaattaagcctgcatatattaatctgtgaaaatgaagaaaaatttctcttttcttgtaagtttcatggacatgagaagttgcatagctgttgtggttaagattgcatcacaccaattgcaatgacgaataaaatatagaaactagctgtgcttccctgctcgtttctctgttactagacacaaagatttgaaaatagtaagactggggaaggaatttctaatgttatttatctttcctctttgcaagtgagaatcgcgagaataaacatgtccatggagtttctgagaaaattgtgggagttcttgggggtggacaattgggtcgtatgctttgccaagctgcttctcagttggctatcaaagtgatgattttagatccttctaaaaattgttcagcaagtgcattgtcctacggtcacatggttgatagctttgacgacagtgctacagtagaagaatttgcaaaaaggtctcttcttttgtttgtttcttgaatgcttcaggttctcaattcttattttcattacaatatttatggttatttttgtttattgtcgtagttagatgtggagtcttaactgtagaaattgaacatgttgacgtggacacactagagaagcttgagaaacaaggagtggattgccaacccaaagcttctactattaggataatacaggtttcataacctctcaaatatttcatcaaatggagttatgtatagtcaaagtttttcagcaattttatttatatgtggcagtttgatgttccaggataaatacatgcaaaaggttcatttctctcagcatggcatcccacttccagaatttatggaggttaggcccttgtttatactttgttgaaagaatcactcattaagttctccatgaatcatgaggagtttgttaattgtttttacccctaaacctcaccacatcagataagcgatattgaaggagcaagaaaagcaggtgaacttttcggttaccctcttatgatcaagagcaaacgattggcttatgatggacgtggaaatgcagttgccaacaaccaagatgagctttcttctgctgtaacgggtaaacccttaactaaccatatttaatttggtttcatagtttctagtaacagttaaaccagttaatcgtgtacaatgccacagtcaacgagaaaacaaaaaattgtgagttacatgaaccagaatgctcatgtgaaactagcaatagtgttctgagacaatccttgacatttattctaaagttggtattaagccctgacacctatgtctatagtagatatcctagacatactttttagctctacagtgtaatctttgtttccctgcgtttgcctcaatatttttttctcttttccagctcttggaggtttcagtcgtggtttgtatattgagaaatgggcaccttttgttaaggtaggatgacaaatttatctgctttagtaacttattgagctctgacatgtataatcggttgcatatcaaattttaggagttagctgttattgtggctagggggagagatggttctatggtttgttatcccgttgttgaaaccattcacaggtaactcaaaagcgcgactaaattttaattataagattgaaaggtatgatacaaattgttactttctagtttctactaatacaccttgaaatgcattctagggataacatatgccatatagttaaagcacctgcagatgtgccttggaagattaacaaacttgccaccgatgttgcccaaaaggctgtcggttctttagaaggtgctggtgtttttgcagttgaactgttcttgacagaggatagtcaggtattttctcataaattttaggcactttaccttttttatttttatttttaacttatcagagttagttcctcccagattctgctaaacgaagttgcacctagaccacacaacagtggccatcaaacgatcgagtgctgttatacttcacagtttgaacaacacttgcgagctgtggttggtcttccacttggtgatccgtcaatgagaactccggcgtccattatgtacaatattctgggagaagatgatgtaattgatgtttgtctttactttatcatttgaatttaatacctgttgcatcatctttttatccgtttaatgaacatgtagtggacttctggttttatttatttttaaatcagggagaagcaggtttcaaattggctcatcggcttattgcaagggctctgtgtattccaggtgcatctgttcattggtatgacaagccaggttagatttttgttctcttatagctttcttgtggtatgttgcaagtttttgtgaactattttggttactcacaaagcctgtatgataaacttcttattgttagaaatgagaaagcagagaaagatgggtcacatcactcttgttgggcagtctatgggcattttggaacaaaggttacaatgcatattaagtgagcaaagccaccaagtacacggtcagtttccatagcatcgtttggtatctatattctattggcttttagtttctgaatgccttcaaacttatctcaccaaaatctgttgtataacctttttgtgaacagtgcactcttcgttttaatgattgttgaacccttcatgaatcttaaaagtatccgactgaatttgtgttgcttgttatttacacatggcagagacacctcgtgttgctatcatcatgggttcagacacggatcttcctgttatgaaggatgctgccaaaattctggacctgtttggtgtgacacatgaggtaaatgttaagatctgctcgaataattgaatttggcacgacttacatgaattattataatccactgaagacagacagaagaaacctgaagtttgtaatttggtaaaactaactgtgaagaagctcaaacatatactttgcaattatgcattgcccaatatttggtcacatagataattcatggccttaacctctgtgcatcttgaatggtccgatatggtatcatttgcttacaggtaaagatagtttctgctcatcgcaccccagagatgatgtatacatatgcaacctcagctcatagtcgaggcgttcaagtcattattgcaggtgctggtggtgctgctcacttaccaggtatgtctttaacatgaactcatcttgtcccctcccacaagattgttactgtaaaataatggattttcttggaaattaggtatggttgcttcactcactcctttgcctgtgattggtgtccctgtccgtgctacccgtttggatggagttgattcacttctttccatcgttcaggtacactttcattgcatcataattaacttcagctattgattttcttgcaccatttgaaacgatttaggtctgcgattcttaagcctttccatttattctttttctttttgttaccaaagatgcctagaggtgttcctgttgcgacagttgcaataaacaatgcgaccaacgcagccttgcttgcagttcggatgttgggaatctctgatacggatcttgtctcaaggttctctttcttatcttttcttttgttacatatgagtcagatagaagaagaattagggaaccttaatataaatgagattggtggattttgatttggttgatcaggatgaggcagtaccaggaagacatgagagatgagaacctgaataaaggagagaaactggagacagaaggttgggaatcatatttgaaccagtgagagtgttactggtcagagcactcattgggaaattggggagtgaaccatcacgattgattttgctgctacgaagatcataatagagtgatctgagagttagcctcaattcttgagttagtttgttgttgtaattgtcattgccatccgctttaagtttaaagcatgattcattgggagtcaatgtaattgagcttgtttttccaaaagatgtccatgaaaactgtaagttttaacactaaagagtcctttaacatgtggattttgaaataacactgtttacccaaagatttgagattttgtattttttcaaatccaaatccattacaaattgttgaacccgttaggtctctaaagatggcagaagtagaggttggaaaccatttcgaagagcagcttcccaaactctaggaggattaatgattgaattgtcgtcgagaccgcactcgtgttccttccacccttcaagcgcgtgtactatcccaccaactctccatgcgctcatcactctcctccccagccaattctatagacatacatgtgttaagtacaaattataacctatcttcatcaaatacaaacacttgacaccataaatatatgttctgtttgtgcatgtttgaaatttacgtgtagagcatggttaaaatgttttaagtgtattaggtaaagattagaaaaaatatagtaaacctaaacgctaacgcaaagaaactacaaagactattttactggaattgttgtatacatacctcacaagaatcaatgttttgggcagagtgagggataatcatagccggagtggtgtggtaaaagcagtcttttcgtagtgttttaggaggaaattgagagaaaggaagaaatagagttccatcttttgccatcttctgctcttttgtgcttagcccatctcccaccaaccaaatctacatcgtaccgttacatattaatttgtatgtaaacttgaatatgttactatcaatttaatgtcgtttacgcataccattggatagtaattggttgtgagcacaagattttccttacacttatcgtccaagaattcggcgagcatggaatgctcttccttgcgcaacaccattacctatttattttaatttattgagcatgaaaaccgattataatttctctgaaatatgaatttatcattaaaatgttttaatatgtatatctttcgcaagctcaaaccaaatcataaaatgatatgccaaaattgtgttggacttaaaaagtaggccacgtgactgtagatagttagtggcgtaacgtttatatatggaaactccattgactctatttacgttcgatcctattttcacgcgcaaattggctttgtatattgacactagctagagaagaattaacatatatttatattttcttttttataaaaacggtccatccaaattgaatccttttgtttcactctctccatttgtagaaaaagaaggtaccttgatggcattttggcaaagagaaaagacaatggcacgagcaacttttgtgatttggcctctaaagagaacctctttggtcccaacaggaatgctatgaagcaccacctcagctgcaagactgcctccgtccactatccttatctttagctttggatgcctccttacgtacatttctccatacccatttaattcttcaccctgaggatattaataattatattagggtttattatataaagcatttttctcgtcaaaacttgcaaaaacataagaataaccaattaatgtattaattgcatgcctggttcaatagtcccaaactcattactttcacacccttcttatccgcttcaagaatagccgcctctatcattttgttgatacattctttctgctggtgcgacatgtactgtagatagccaaacaaaacttgttactactagacgtgaaattgttagatgtttaaagactagagaaagagaaaagagaaatacatgagaggagaacttgggaagaaggtgggagtgaagtgtgagatcacggaagcggtttctctcgacgacaaaggtttgaaaagagaaggacctgagaatgaaggagaggataagagcgaagggcttcatgagaaataggtaacaccgggaagagagcgggtgagaggagagggaagcaaagccaagccggagatggtaaatagagtcgagtgatgttagatgagtaagatgaatcgcgtcaggcttctcttcttctttctccaacgatgtttcgtataatgagtcactgcactcgtcggtggtgccatagatgtagtcgtacattggcatgaatagagagtagttcgtcctgaattgcgtatggtggagcgaatgaaacctacaattatcatatatatttagtcacaatgcttttatgttttgtaaccaaaacttctaatgttttcgttgacattcatttgtatattgtaaacgcaaaagtcaaacgcttgtttacgattaccaatttaaaatttacaaaactatatctttagaacattattttataaaaatgtgaaaatagtattacaacacagaaatttaaacgcgttcaaaggaatcgtggtaatagtataattactattctagtggatttaagtacttacgagggagtgtagcagaggaacttgagtggaggtaaaagagagaataaaaatttcggaatgagctcaaagttgcagtgacccatattgttcataaaatctatgtaagttaggtataaggcaatggagactaccgagaccgttccacacataaaagtcgttattagcggtagccccaagattaacgtatatccgatgtgctctgcaaacggatgtaccaccgctacaatcaagacccaaggtttagaatttgttgcgcatactaataaaaataagtacgacagtgaacatatatttttccaattcatttgatattattttgaaactaaaccataataattgctatgaaagtgtacttaaaataacagataaattcataaaatcaatagattatgagaaaaacaaacaaacaaacagtaacaaaaatcattgacatgactactatgtcaaaaaatagcaaaataacagaataacagaataactagcagagcgaactagctggacaaagttttcctagaataattataaaatgttgaatgtaacaaattttagaatatttatctttctttttctagttattgttggacacatttagtaggatgtatcaaaatcattagaaaatagcgaaatcatttttttcaaagcgtgaaaacgtgaacaagtgttcatcattagtttttatgaaacagaaagagtatgtacgtacaagtgatcggctcggtgacaatggaggaatggtggtgagaatggtagcgagagtagaggaagtggtggtgaagggctcgatgaaaccagtagtagatgaactccaccggaccagcatggaggagagcgactaagatcactccatcggttcgccagaagggaatggtactggtccctgagacgtacactttggttaagtaaacaatgagagtgttgaagatgatctgatcgtcccaggttcgttctcggtcaacttggtcaaactctatggacttgttcaggatccgcttggttccttttgcagtttggtaacgggataaacttatccatatttggctatgaacaatccgccacaccgtcacggccactatcaaaagtttttcgtgatctcgtatggttgcatatgagtagatgctgtcaaaaaccagcggggccaacaacaagtactgcaatatttatccgtattcatactattatcatgactaatggctaatataaaaaaccaaggactataaatggatgtttttgaagatggtatacagcaaaagaggcatagaaagagaccttaaagcttccaagaggtgtccatggccagtccgtgagaaaacctggtctagacgccatttttcttccgcacaaagactcggtcacgtccgtccaactttttgtatgtacgaatgctctatatatatacaaatacttgcatagttagaatagagggaatcacattcacatgtgaggcacatgagacttcctttttccgaaagtcaaaaaagattctaaacctaatatttaagtttaacagataagagatcccgttttatcggtcgactttacgaggccttttcttcattaaattctcttgaatctacacgcttcccaaatactatgttaatcatttgacaattgccttactgttttcattaattggtttcttgttgggaatttaaggagctgcttttccagcgaagctggggtctttgtttaatacatcttcatacaaccatgttagaggactgaaaaatctataagtatacctttcctaaaagatattgtcaatagtacttattcacagggtagattcatacaaccatttcaactcttattatgcccacatgattatgaatggaatagagttgaaatgaaggaaatagaggaatcatttcacaatcttgtaacgtcattatcatgtggccataatattctttagacagtaattttcaacatatgctgaagtatatatacatagtcccattcccatatctcgcccaaatagtctctacagatgaaatgcaaaacacacaaaaaggttcaaatatatttaaaacataactatcgccattaaataacatatactttatataacttcaaaacattctattcatctcccgccagaaagttgagaatcagcgatggaagatccaccggtaaaccctttgaatacggaggaggaatacgacattcctaattcactaaatccgtcatgaaccccaaacatcatcccacttccggacaagtccaacggagacaattctggtaactttgcatctcctcttagataatgtagcacttgtctcatacttggtctagcccttgggtcagagtgagagcacaagagacctagcttcaaaaccatttccacctctttttcatcacattccgaacccatattcggatctttagcagccaagatgtctcccttgttccacaacccgaaaacccaatccacgagcaagaacgtctcatcggtctcttgctggaactcgataggacgtctaccgcatgcgacttcgagtaagaacgccccaaacgcaaaaacatcggtagccatcgtggcacgtcctgtcctagtatgttcaggagctaagtatcccaatgttccaacaacatgcgtggtctgaggatccgatccgtgatcatacaaccgagccaaaccgaaatccccaagtctcccattgagctctccgtccaacaagacattgctagctttgacatcccggtgaatcaccacttgttcccattcctcatggagatagaacaagccagaggcaacacctagaataaccttaatcctctgtttccaattaagtgttacctccggagtgttgtacaagtacttgtctaagcttccattaggcatgtaatcatacaccaaaagaagctcacctctcctacgacaataacccaagagaggaactaaattcctatgactcatccgaccaatactcacaatctccgccacaaactctttcatcccttgacgagactcatgcgaaactcttttaacagcgatctccaacttcgtaccaggcatcacacctttgtaaacactcccgaacccaccagttccaagaagtcccttctccttaaaccctttggtcgcgtagtacaaatccttgaacctgaaccgattcttcccgaactctttttcccattcctcgagctcctccgcaaacttcctcctcctcctcacgatgtaacaaacgaggaaaataaacgagaaaatcaaaaacagagaaatcaaaggcattccgatcttgtagaactcagagattctcttgggctcgaagcgaggaagcttcgggagtctcgataaagctaaaggtggagccttttcgttcaaaccgaaactccacccgagaatataatgttccgacagaacagagcctgtcgcagaggagaaacccacatacatatcttggagtagaaccgaagaaagatctctaacagccgtaacaagcggtcttgtaggtttatcttcgttgaacggagccatcgtcacatcgattttatttgtacgtccgtcgtaatcgacccagacctgcatcggcttacgactgatcaaagtcagattcttgaattgacctttctcgtcccaatacccagcaggcgagctttgcacagacttcaaactattgatatcgattccgacatgattatcgtttgtatcattgaactctgtactcaagatcgtatctaattcaacagcaaagacatgatttgtctcattaccgttgtttgcgaggttgaagagacctatgtattgacttgggttgccgtaaggaaggcttgcgttaggagcgacgacgaaagctatgccatgaccgctgagaatcgcgatctgagagtgaatagcgaagacgaacgatgtcgagaaggatgaaacggtgccgtttggagaatctttaaaccggatcggtttggtatagaaggcgtgaccggttttctgaacggttgtgttggttagcttcaagagaccgttgggtgtgacggttgtgatcccttggatggataagtccgtcggtggattaaagccattgttgtaagcaaagttgagactttgagaagaagattgaaagatgaggttgaagaagaagaagaagaagatggttaaaagcttcaagaacatggctacctcttttttttctctgctctgtgttgttctttcttttgctttgtttttagttgtgaagagagaaagagagacgatttatggtgtgaagagagtggaaaagtcgtcactagctcttttatttttccttgtgtggggatatactcgtgattgagaaagattatgaaggtaggtgatatgtgttacaacttccaagattaatgcttaattaactctctgtttggttttaaaatactccatttctatactcaaaatatcaatatttaaatctgtcatctatcaggctcatttatgctgtaaccataaaaaagaagatgttttaggcactactagtatatatcaaagtatttatcggtgatgatggaagattcgacggtaactaataacagtgacagtttgtttatttgagacaaaacttaaaaattaattaattaagatttatagtcattatgattaattatgcttatgaatttgatctttaagaatggcatcagaattggcatcagcataagctgtcacgtttccgaggagtatttgagtaattagccctaatattgacttttagttttggcttttggctacactacttcctctatgatatttgtgattgtcagagactcacagtcgtctaaattaagtcacacagtcgtctaataagccaaccaaatacagcgagtttcaacatttcctaaagttataaatgtgaaagagatattggaagacacgtactaccaatcaaatgtaagaatctaatttgggcatatttgtggacacaaaagccttattggttcacaaagtcttgaaataactccttacatttttttgctaatgaataaaaatctcttacaaatgaattattgtagagagaaaaaatgattttctttaaatgattatatactttacttttctatttatatgcttaaactatataattcaactagtttaattttaagtaagatgatttaaaaatcatatgtatagaattgttaaccttttagcagcattgtttacaaatcatgaaaccatgagaattatttcttttgccatctcattgtacaatggaatttaatagtgtagggttacaacattttactttttatgagttttatcttgaataatggtgcagattgtgccccacgtagcaaatgcacacatggtcaaaacttctagaaaagggtccactctaatcgtggaagctcctgacttagataatcgttgattttttgagtcaaccatgtgaatattctccctttggcttttggtctactggagttttgcatgagattagtatccgtatatgttaacaaagtcttatttctcaatcttgttgtggttcgagaagaagagttatttggtgctaggaagaagttgaagtagagatctgacttttttaccgtgtgaatattcttgtccttttggtctactagagttttgcatgcatgagattgtccgtatgctaacaaagtcttctctctctcagactcttagcgcttgtcgtagttggagtagaagagtgttgcccgacgcgtcgatgtggtgctaggaagaagttgaaatggagatcagacgtttttgccatagagatctaactaaagtttttaatgtatatttgttttttttattatctctttatagagatctagctaaagtttttatctcttaatttaaagtaccgatctagtattccgtttacacttcgttttggttttactatatcattcgacccaaatgtcaaataattctctgtacaatctaaaatttttttgtactcgtattaaccataaaccaaaaagaaaactgtgcaatctttaaatcgacataaccttgtctatcaggtctttattgtgggagggtcgtgaaaagctaagttgttacaatagtgtgttttgaagcaacaagacatactttttcatgagctatcaaatgcattaagtttaagactttgattttttcatagaacttgatcaagtctacttaacagaaactccatcaaactacacaatggaaattaataaatcagatttgggttgataataaaatactgtttatgccctgatttctatgaatacgtttgtttcaaatttaaacctcagtatttgtcttctctcatccttagtcattaccttccattttttttttttaacttgcaatagacattactacatgattaacaaaaaaaaacaaaagagagaaagacattgctatatcaagaggtgggcctgaatattctaaggctacaatttaaaactatgagaccatcattattgatagtttcttaggttagttcttagataaagtaggtcttaaatttaatgttataattcaattaattgttaagaatgactcctatataagagccaaatctaatatttcttaggttaatttttagataaattaggtattaaatataatgttttaattcaatcaatcttaattgttagataaattaagtgttaaatctaattgtttgtcatatttgttaaaaaatttatgtcatatatgttttaatttttatgagttgtaataattattaaatttttaaaaattataatgtttctaaaaaaattttctaatttttttctttttaagaagtccaagttaagagtccaccattgcatattgccaaaatttcaatctcttaaccaaattcttaacttcaaaattttcaaaatcaattataaaaatattcataagaactatgtgaagattatgctaagaactaccattaatgatgactactattaaaaaactatgactatgactacaatttaaaaatatgactatactttaaaaactatgactatgactacaattctaaggcaacaatttaaaactatggctactatttaaaaactatgactatgactacaatttaaaaactatgactatgactactatttaaattcatatctacacttcagatttgagagatccaaatttagtggtggattctaattgcttgctgtcaagatctacacatcaaagctcactcgttgaagattcaatcatcatcaatcatttccggatcttgaacttcaacaacagagcaagcatctttctttgtttgagaattggtgttatctgtagcactcaatctaagatgtatggtggaaaaagttacatactcaaagggagtgtatcactttccttgatcatcctcattcttttggtgacaacactcctggtttccgcaaaaaaccagcctcgcatttctctgattgaagtaaaaacttgtaacttggcaaagggggaatgggttgaagacaagaagcggccattgtattctggttttgaatgtaaacaatggttatcaaacatattttcctgcagggtaatgggcagacccgacttctcatttgagggttaccggtggcagccagaaggttgcaacataccagagtttaacagagtcaacttcttgagaagaatgcagaacaagactatagcatttataggagactccttgggaagggaacaatttcaatccctgatgtgtatggccactggaggtaaagagagtccggaggttcaaaacgtgggatcggagtatggtcttgtgatacctaaaggagctcctcgtcctggtggttgggcttataggtttccgaccacaaacacaacggttttgtcttattggtcagctagtttaacagatttggtaccgatgaacaatacagatccacctcatcttattgcaatgcatcttgaccgtccaccagcattcataagaaactaccttcaccgtttccatgtattggttctaaacaccggtcaccattggagcagagataagatagaaaaaaatcattgggtgatgcacgtaaatggaacacgtgtcgaaggcggatatttcaagaacgttgaaaacgctaaaatttttacaatacacagcctggtgaagtggcttgatgcacaacttccattgcatccacggttgaaagctttctttacgacgatttcccctaggcatgaaaagtgtaacaatactatccctttgtctagaggaagcaaaatcacaggcgaaggtggatcgctcgatacaatagttgagagtgctgtgaatgggacaagggtcaagattcttgacataactgcactttctaaactaagagatgaagctcatatcgcagggtgtaaactcaaaccgaaaaaggcgagtaacgtgacttcagctccaacgttcaacgattgcttgcattggtgcttacccgggatcccggatacttggaatgaacttctcatagcacagctttgaagtattcaacatcattgtacacaagtagttcaatggattgattctttgttataataaaggttttttattacagtctttttgggagaaaaacaaagctctagcattttattttttatttttttataatatatatataaaactgttagagcatgttcataggtaatactcacaaagtatcattaaaaatttttttagtattatttataatatttgtttaataaatatatataatattttttgcttttgttaaatgtgaccaatcagaagaagccacgtcagatgatactggtatcacaaatatcagtgggctgatactgatcaagcatattctaattgctttactaatataaaaataatttttggacttgtgatactctaaaaatatcacccatgtacatggtcttataagatagtacgaaggtgatcatacagttcaacaaagcggaacagagtaacaaaacacacaaaagatccgaaagcatgaaaagtagggagaaaaataaacgttttgaaactaatttcgactaattgggtttatctagttgagtctgtttgtcgtttattttttctttgggggcaatggaacattttctacattagcgtttattgcggttgcggttctgctattcgcgtttgataagtttgcctttgaccgatacatttgtacgatagtaattcatctttttaaaaaaacatgtaaaagatttttggatatgaagaatccgaacttgtctcctacaccatcaatttcaagatatatcgtctagctagaccccaagcccaatctataagcaatacgaataaatatatctagggaaaatgtttacatgactagataagactatactcttcaaaatgaaatgctaaacaactaacagtctgtataattttgacattataaaaattttgatattcggtttgctgatatttacataaatgaatagttcatttcctcttgagataaaactatatagtctctgtagataaaacggagtcggtccattcgtcgttcggatgctttgactgaggagttacactttccaaaggattaaaatgccgtatcttgacattgattacgctttctgagtcttcttcactgttgacaatttcacaacattgtctacgtggcgcctgtaaacccaatcaaataaaaaagatatcaaaaatcaaatacaccgaatttaaaagtatactagattaaaagtatacaccgaatgtacaatataccacgaaaggacgctttctatgtttcttttgtcacgaatacaccgaatttatgtctatatatgttcacgaagatagcggatattttactaaccattttccaaagatccggcgtcaacgtagtagttgaaacgtcgatgaactcgaccgggttggcacgagaataatcaggcgaattacattgtgtactctcgcccacttcaacatgtttccgatacgtcgtaagcgtctgacccgaaccgacctcataaacccggtccaagaaatagacaaggggtctctcgcacggatcttcactgatgggtcgggtatcaaacgagaaaggctcagagctcgaagtccgccacgacttgaacgtaagaaatggcgtctcaagctctttagcggtgaccaaagttggataaatttggatggtatagccccatgaaacggacacataccaattacgggtctggtcatggcagaagctgtgctggatgatccggcttggatccgtcttataggccgatacgagtcttcttaaggcgtctatttgagtcgtccccggaaatattggatcaacatagtcgagatggtggagcgtaaccagaggagccaccggatgggcagctagtaaaccgtatggattgccacgtatgtcaacctggattttaccatgcaaagaaaaataattaaatcccgatcttataattagaaatgtcacttagttagttatatagttacaccaagactaaaaatttaaaatttcacatagtaagaagtaaatcgttgataaaaacaggacaccgaaatctgagcattgaagcgtctaaacatttttttttttttttgataattattttaatcttaaatctggcaagggataaaaattttgaacgatttgaaatttaaaactgaatattcaaaatttcaaataaaaggaaattcagtatttgcagctaaaaactagaaaccaattaatagtaaatttccatttattgattaggtcaaaataagtgaatttccagtaatcatgagaaaaacaaaaaggaaaatgtgaatatacctgatggaaccctagttccttggtcaggggaactccaatctcgcttaaacaagcttcaatcttttgatcagatccatataacgatgcgtaacgatcaatacaaccatcgagtaactttacaagctcgacggccaatggatagctaattgctattcctccaccaccgtaagccatggcgtaagagtgaacaatgtcttgttccacactctcggaatttcctccgatgtaatacatttgattgtgatcatacttatttagaaccgttataagattatccacaaagaaaacggtgtcgtcgtcacccattatgaaccatctcacgtccgttaaccctagctcaaaagtctctttgataattctcgccattcgtatagctgatcttgaaccataccttaaaacaaaaagtggaaatcgaatgaataaaattataggttttgtatggttaggtattcatccaaatacattttcacaatggttaaacattgacccttgacttaacttgactaagatcatctcgttgaaataatgatgttatagaagtagaaatagtttgtaccagcaagtgtaactgaaccgggaggtatccgccgagacttggtacggtggagaagttgagagccatgtcatattaagaggcggttcttcgtcaagccatatgaagccgcgtgtgacgttgggacgccaccagagctcggagtagcggctgcgatctctccacgtttgaatggagccacctatcccgaaagctatgtgggagatatcagtagcctccgaggactgattcggccggcggatagtcgaggaggaggctgaggagttggtagttaagtttacattttcaggacctaagcgacggaggccggtgatgtggtggcaatcggagcaaccgaagaagattatgtagaaggagatcatagcaacggagatgaagatgcatatggtgaagaagaacttagcgacgagggaaagaacatggcttggttttacagttgttgccggaaaaatcgacggcggcttatggtggagcttaaacggatcgaagatggccatttttttttttttgatgtttatggtctgtggaactttattttgtacaaatatgttacgactgtacgaatagggtttagtggaaataagattgacatttatttttatttttatttttatatttttgcagctaaagtttacatatattgcgatacaaattgagaaagtttatattcgacgaatattcctactcctttattttcgttgatgaaatatatggtttcgagaaaacaaatcttctaaaacataggaatggttttaactttgaagcatataggatgactatcagatactgtatgactagagtaatggacctttgttgaccaccaaatttttttaaaaaagttatggaccctaagctgttgcacatacgtatgttattgggccaagcatggtggagtgaaggaaatgtccaaaaatcttaaccataagactaagagagtaacaaacttgaatcaaaggtatattttactcttttgagtcgttgacaaaacatcacttacataacctcactcacatctttaaaactgagaataaaataaaagaaaccagactggtaaagcggaccaaccaagaatttttggtcttttcttgttgtcaggatcctctgtagaactttcgcttacatatgtaccagtgtacttgtgtgtattatatttctgttagtattcgaagtctagttgttgattagtttcaaacagacatatgtcgactggtcttgctattgggaaataattgataaccaatttttgtccagtaattgatgcattatattattatctaaagaatcgtccaaaattccgtgacactttaattcttagaatccaaaaaaaaattcccttcacgtattgtatatatttgattattgtcatatttgaattattaatttaactattgaaatatgtgagttacagagaatgagattcattccccatgtggaagctctgcttttattcgaagacttcacttccacctatgtattgttatatacagagaagaccacttcattatatttatagcaatctaaagagcgtatctaactaataaccaaaccctagctaggtaaaccaagaattagttgatagctttgaagtttatgccaatgggttcatgaacgaatcgaaaaacattcaagagaaaatatctgtttttaaattcttttcaaaatcaacttgcacaaaaagaagaaagtttctatgttatttcactgtatcatttcttagaatctcatacaacatatatattttacactataaaatcatatcaaatcaaatcactaagagactatactaattgtttttcatttttagacttctagtaaaatctcactaatagattagctccaaaattctttagacaagtagatatatcatatatacttgcccgtatatgcatctatatatagtttcccctataaagctcaccaccttatttaatgtactacgtagtgggattgggaagcaacttgggtaaacattttccactaatgtaaaaactttcacttattgtattcaaaaagtttttttggttgtatcaatagaaaccggatggttgatagaaattaagaatgaaaatactatggtttatgtaatgtaaatgtgtaatatataattaagtataaacagattcttccaatgcgttatgggtttttgatatatagaaacagtgcaaacctagtttacagatacgatatgaaaatttatagattaagttaagtctaagcgatagaagagttggtaacccatggggctaaaaagttagggtagagactctaaatggttggagtagtatataattttattctattcaattatctattgagacaaaacaagcgaaagggaatatgtgttgtgacatatttggatttttgtgctctttcttatgcttatttttatgattttgacagaatggcatgttacgtactgagatgcgaatgtatgtggaaacgagcttataacgacgtttaacaacgaggaattagtcattattaaactatttccttattgttttacaaaattagttacgaacttatttgccagagttcctgcaattatgataggaaaaagaacaataattagttgcttccgagtttttctactttacgtaaatattaattatattatagctatcgaaattcctttaataaattactaactaagatctatgggagaattattcatcattcgatctctttcttggaaattgtgacagaaaatattccatcttcatgtgattttattttggattgttgttacacaacatgcttcaaatcactcaaggaagtatagacgtgtcaatactttttttttaatttttaaccaagaggtttcggacttaagagttattaagaccccgtattcttattatggaaaccataacaacttagttagtcatttttccggtaagattcgaattaagctgagattttaaagcgcatttaaacgatcgcctaggtagtgaagctgggctatacaaaatactttgctcttgtttatatatacaaaagtattttgctcgttttcatggtttcgtattttcatgtacattatcatttcaaatactactattactaaataatatactacagagttcatatagtcatttgcatatccaagctaaatcatatatatcgaaaactttacccagaaaatgaatcataatatgggctcatctgaccccattaaccaatctttatttttttctctgtgaatagatatctcaacgtcgtaaactagaagctgagaaatgaatggtatgtggtagcatatgtatgattcactcctggaaacattgtctaaacatgtactactaattataacaaaatgacttagggtgtcaatatacctaattgtatatgaaattttgttctcaagcctcaagtgtacatacatatactactcaatacttcctttagatttttccatttttttttagctgaacttttcatacaatttatcccccaaaataaaacaatagaaataaaacccaaaaatcaatcatcagtacattttagacacacaaaacgaaggaacgataaatccaagtacacacatacacattcacatacataccatatgaaatgtgttattttgtctcaccatatgaaatgttactatttatatatatcttccctttacctttgttttggtagagattcatcggtccatcaatcaaattccttttggtggatcagtccctagcctaagctcaagatctaaatcctcaaagcgatcacctttgtgtttgctttcctcgtttcttgtaattatgtcactcttacaagataaacttgaaatgaaaatcgactgctgcgacggactctcatgtcttcgtcttcttttacggatatccaccctaccaatctcttcatcgctaccgtgagcagtaatcggaaaactttggtggatgaccagattcatactcaccgagagatcagtggtgtttccaagactaagttttgctttatgcccgatttttggcacatcactctcagtctttctcttcttttctccttccatagccggaatttcatatagatcacaactcttttgctccacaacagtacttgggcacgaccatggggaagaagagggaatatatttagagttcttggaaggttctacaacgaaagaaggaggagaagaagaagtatgttgctttccaggcaaaccagaagaaaccctagaaggagtcaaatatggtaaagaagaagacgaagaaagatcaataacacaagagtgttgagtcttaaaataattaggtttggtgttaaaaaccaaagtatagcaagaggtttcatgaatattatcgctatctttatgagatggatactctggagacgaagaagatttggggaataagtattggtcgtcggcttgcttaagccgtgctctgtctcttcggtgaacgttcatatggccaccgagggcttgagccgatttaaattctctccggcagaagctacacgtataagatcttggcggccacaaagatccggcggcatcgtcttctgcaaaggccagctcttcccaagatgactctttgttgcttttcttggggatccagaagccaccaggtttctccattgtatatgacaatattgatcagaagttgacgatacaaaccctagaataaacctttcttcttcctttttttcttggttggttagaggaaccctagatgattaatattaggtggtggattacggaagagatcaagaatggtgtaatgaaaataatggaggtcaagatgttttatataaaaagaaattaaaaccaaaacgagtggaggttttttaacgatcaaaggaattatagtttatttaattaattaattgggaaataataataataataataattggaccgtagggattttatgaagaaaaagatgacacgaactttggattttagtaaaagttagcggactgatctaaatcttttatgtttgcttgttccaagtggctacccgcaaatgaacgtaatatttttccttgaatatacagtaatttatagtattgtaattaatgtagtacatatatctgttttaatttttttttgaaaccaattataaatatcctcacggtaaaatggattatatatatatatatatatatatatttgctaaatgaaatatcatttcaagaatttagtttattagaaatattttattaaatgaaatataatagtttattattaaactaaattgtttcatttaaccaaaatattttctatgatgctatttcatccctgatttttgtgattatggatatattgttaactttataacaaaacaagagaattcaagggactgaaacgttttatgacttttaaatggatgactatatacaatggctgatccaaaaaaacaattttgggtaaggcatattcagtgagctctaggcttagcgccatatatgttacatcaaaatttattttgtagagtaaaaagctttttagaacaaaaaaacaacaccttaatttatgtctattttcgttgtaaatgtgtaatatataatacatttaatgaattacaacaaatggtaaaactcatgctgataaaatactgcaaactagttcataatcgaactcaatagaaaatagaaaaaagaatttatacttttgtaaaaaaaaaatgctactttgtttttctgttgtatcggtaaagatgagaacaacactgaccaagcgaggttttgggctttaaccatacaaggcccacatgaatacaaagtatagagtttagttgtccactaaaaacctagttctataaggagattattgccttgagaacaaaatgattttattcccaatgaacaagcaaacaagaagttcaatattttcttgtcgaactttttgtcttcatacctttacaataaagtgattaactcattacaaataaattgtgaggaatactagaaacttggatttattgacatatgtttattgttttagacattttatcttcatttgtaacatcgtgataatgacacatgttctagtttttttttttttttttttttggacaaacagatgttctagttttatctatcaaatttgaggagaaaatattttagtgttacaaaaatatatagaaaggtcttttgtttttcaatgttactgttaaccttaaagtcaagtttcaatcagataaagaactatatgatataatcacagtcatcatacaggcagatgaagataaccattaaatcaagacgatagtcaatcatactcaattggcttcttcaataccaacggattaattaattcctcaatagctaatatatatctttttaatattttgactatacccaaatagtttagtgggcacaatttcgtaaccttctcttatttttttacacctcaaacagtcaaacgtcatcatatatataacaaatcttttgacatcatacgttattttctataataatccaaacacatcccccacctttataaatatattatgatacacttcccattattcaaagattttatagcacaattttgttttttaaaagcaattaattaactactatagtatactttactaacaacatttgaaaaaatatacaaaaattaaaattttatcattatcaaagcagtccagctgcataccattatcaaaattggatgtggataaacttaatttgataaatttctgtataacttaacaaatattaaatatgtgttaatagttatgtcaacttatgttgaagataaatccattggaccggccgtggtttttatattagtttgaatgtagctttcagattcttcctatacccaaatttcacattcaaaggttgcttatctttttaacattcaaactcatttaatatttaaatacactaactaatgacgtgagaaaacttatggatgcagcaacaaatcataagacgccacgtgacaatcttgatcgctctataaaaaaccaaacctgctcttctttggtcgctacagcaaaaataacaataaacaagataaatggagggtctaattccgttagtatacaaagccgtcatgcaaatccgttacggtaacgagtcgcagcaactttcttcttcttactacgttcgtcttcccggtgattcgggtcggtttgtaagatccgatttagatgtatcgggtcctggatctaattcctccaatagggcgtcgtcgtcgacaagcacaactacgtttgctgtttacgcgggagtccagtcacctgtttctcgtcaggttgtcacgtgattcacacgcgctttttgaaggaacctgaagttgcgtgtgagggaagggttcgtgacttttgttttgtgcgttttttttttgtaagttaggcttggaccggtttaataaacctgatgtaataattcggtttggaaaattgatttctctaagcgtagactttaacccaaaagggtggtctcgtggcttttgatttgtcaattgtgtgttttcttttaattgtataaagtttctatgaatatatttagtttattcgagaacaattgtatgaaatgtttagttaatgttttcatggtatataggttgtaaaacaggttaattacgttacaatttcctagttttggtattaatatgcaaaaatgacataatatcaaacttttaagtaaattgatatttttcactaatgttaataatgaaaccaactaacaaaaaaaaaaaagaacaaaccaatttctatttgtttaagactttgacagtacatcacttttagaaataaatgccataattatgttatgtgcacactgcaaaagaaaatgaatacgcacaattgactataaagaaaacgcctttagtggccatacgatttttagcattttatgcggaagaaacaaagtgctatttctccgagttacgtatgtttcttttcttctgcatctagttttttttttgcatattcatcaccttctctcagttttcttctttcaatagaattatccagaaaacttttaagagatggcagctccgattcgattctttgaactgaacactggtgccaagttaccttgcgtcggtctaggaacctacgcaatggtcgcgacagcgatcgaacaggcgattaaggtatcaccttcggatcaaacttcgaccttattattatgccattggatataaaatttaactttgacacttttcttgtcgattattttagattggttacaggcatatcgactgtgcttcgatttacggaaacgagaaagaggtaaatttgctatctacaatatattttaatttatctctctttaaccatagatgtcatttgactggtcatcaaatgtattctctacaagagtgtatatttattatagtttttgagggtcatggtggaacaagaatctcacagtaagtgtagcctctatgcttctaatgaaagagttttttttttggtatgatgcttctaatgaaaaaggtatatgaatgtttagtttgtgggaactaaatgtgttctgctttcttcctattttcgttgttctcacactatgattgatttccatttattagattggtggtgtgttgaagaagctgataggtgatggttttgtgaagcgtgaggagttatttatcacttccaaactctggttggtgttctgtttctaccaagattctctctggtctgcactgcacacacacacacatgttcatgttttttgttttgttctgtaggagcaatgatcatttacctgaagatgtgcctaaggcactggaaaaaacgttacaggacttacagattgactatgttgatttatatctggtacataacttatagcaaatgaatcttgtttacgtgtaattttttccattttgatgtgtttttgcttttgttgaagatacattggcctgcgagcttgaagaaggaatcactaatgccaacacctgagatgctcacaaaacctgatataactagcacatggaaagcaatggaagctctctatgactctggaaaagctcgagcaatcggtgtaagcaatttctcgtcgaagaagcttacagatcttcttaacgtggcacgtgtaaccccggctgttaaccaagttgaatgtcacccagtttggcagcaacaaggtcttcatgagttatgcaaatccaaaggagttcacttatctgtgagtatacttacaaattccaaaatttactctgtttttgcaagtatgaattaacgaagatgccttttcatctgttttggattgatgatagggttactctcctttgggttcccaaagtaagggagaagtcaggctaaaggttcttcaaaacccgattgttaccgaggttgctgagaaacttggaaagaccaccgcccaagtggctctccgttggggactccaaactggtcatagtgttctaccaaagagctcgagcggggctcggctcaaggagaatcttgatgtttttgactggtccataccggaagatctgtttaccaagttctctaacattccccaggcaagttctttcatctttctttttttttctcgatgaatcaaacgacaatttcggtttggtttcttgtcattattgatcttccctcctcttcaccatcttgttttcctcgaccccatcatgttgattatagatcgtcaaataatggattttaccaatccctataaatcttgcaggagaagttttgccgagctactgagtttgcgcatgagacacacggcttctataagaccattgaggaattgtgggacggtgaaatttgagataatgtccctcctttctacttgtttaaccataaaccattaaggacattgaaataaatatgttatctttttatatttaatctttctatgagaaaacactaaacacatgcttgggatttcatgatgtttggcaaatgttgttattctgcattcttcaaacaataaaatgttttcaactagttacaacttcaacatgacatagtcgatagaacctaagactatttccttagttcgcgtcgggaattttctacataccgcaaaaaaatacgtgtatgataaaaagtaaaattcaaaccttatttcaagactagggaattgccttcttctttttgattctataacctacttactgaatccaaggatcttgatcaaattagttatttctcatgaaaacttacattaacatttccttaaataaataaaaacttacattaacaatttaaaacatccattgtgaagggccggaatgaagcattatagtaagtgttcccaattattctccaattttttctcttcaaaatgaattactacaagctctcaaccgtcgattctgcatttcgctcggcgcaatatatatgcgttcacccaaaaacgtgttacttggacgttcacactcgagataatctaaatgaactcatatacactcgagatgttatataaactcatctacaattttgttgttgttgtaaaaccacataatttttcttatcacaaagatttttgaaaaaccaatcacaatgtataatattctactattgctacattatttatgaaatatataaaacttttttcataatatgaaatgaattataaatcatgtacgaattgtcttggttgtttgagagttctgtcttctgtgatacgtgtgaattgtggacacaaaaaagtgtcagtcacactcgagattagcaaagaggaaatctaaatgaacgaatttaactcagatacgtccaccgtccattggtccatgtaatgatcaatatctgacgtgacaatatactaactaagaaagtactagtattacagaaagaagaaatcaatttggccacgaatctcccgcctctgtcgctctctcacttcttctcaccctttaatagctagtgccgagtgcagtgtgcgttgaacaaccaccaccacatctgataatggcaaatgcgatcacatttttcaagctcaacaccggcgctaagttcccttcggtgggtcttggaacatggcaagcttctcctggcctcgtcggtgatgcagtcgccgcggctgttaaggttcgtctttcgtaggttgaacttatttgcttcccatctcttgtagattctttggtttgatgataccatactctgtttcaattgtttttcttaggtttttaatgctttttaactagtttgatgttaaccctaattgcagattggctatcgtcacattgattgtgctcagatctatggcaacgaaaaagaggtaaaacaaaaacagatgtttaaattagctaatctgaagttcaatctttttggtatgagttttgtggatcttgaattgatattacatttgcccttcaattcttgactgtcttgttcctctttaagtgtcttttgatctgctttatttgttatcttgtggctttcctctgttctgttttgttgtaagatactgaaaagtgaatactccttaccatgctcagattggggcagttctgaaaaaattgtttgaagacagagtagtgaaacgcgaggatttgttcatcacctccaaactctggtatctttttttcccacctaatcaaatgcatattatgtgaaaaactgtagctttaattattcttacatatattctcaaattgtgtaggtgtactgatcatgaccctcaagatgtcccggaggcattgaacagaactctcaaggatctgcagcttgaatacgtcgatctttatctggtacacatcacttccttgtaactttttttggaatgaatgtaaaatctattcaaccaaaaaaccttgtttacaatatatcattttttcatcgaagttgcttaaaacagagtatttaaattgcagagcaagtaacacttccttgtaaaactacttcttgtggggaaagattattgtgtaacagtttttttttgtgatcttgttgaagatacactggcctgcacggataaagaaaggttctgttggaataaagccagagaaccttttgcctgtagatattcctagtacatggaaagcgatggaagcactatacgattcgggcaaggcacgagccataggtgtaagcaatttctctaccaagaaactagctgatctcttggagttagctcgtgttcctcctgctgttaatcaggtcgaatgtcatccttcttggcgacaaactaagctacaagaattctgcaaatccaaaggggttcacctaagtgtaagcattactcgtctcaccaatccatttactttctactttatacattcattgaatgattttttttttccaggcatactcgccattaggttctccagggacaacatggctgaagagcgatgttttgaagaacccgatactgaatatggttgcggaaaaactcggaaagagtcctgcgcaagtcgcccttcgttggggactccaaatgggtcacagtgtgcttcccaagagtacaaatgaaggaaggatcaaagagaactttaatgttttcgactggtcaatacccgattacatgttcgctaagtttgctgagattgaacaggtacgttcttaacatttcattgcataaacttagttgatctgcctctgctcttcctcgtcttgatcgtgtattgatagtaatttatttggattaaatgcaggctaggttagtcactggttccttccttgttcatgagacactaagcccttacaagtctattgaagaattatgggatggcgagatatgatttttagctgatctaaataatgggagctaggtttctctctctgatgaactagtcagtatctttttttttttaatgaatgttaaatttattcaaccagaaaaaaccttctttacattatatgcaactttgagtagaacatgaaactgtattgtgcttgtcagtttcttatggatgttatttatttacaaagtttttttttatagaaaaaggatctatttatacaattgcaatgtattatagtcatttcaaatcgaaaatgtgttgtttgcatatgtctgtgaacataccaatattcacattgcattagagctaaaaagtccgaacgagtattcaaatcctaaataatgtataaaatcaatataataaggatttaaccgaaattgaatgtgtcattaagtttttcttttggtgaaatatttcctgaaaaaaaagaaagaatatatttcctgaatttgtcagtaagttgtaacatattctaaatctcacattggggaaaagaaggtattttcaaaaaggatcataattaatctctttgtctaaccgagtttgagatggaacgatgatcagataagcatatcaatttataaacacttttggtgggtttaaatcaacatttacatcaatgagtaagcaattaacttgaagttatgcgattatatatatgagaatgagacacatacataacaaatcatgtatgcatgtaacatgaaacaacatcaaaaaaaaaaaaaaaaaaacaccataagccatcaacaagtaaaaaaaccatctcaaagaaattattattcatacgttgtctcgccatcggtcattgctgcaacggccacctgggccgctatcgtaacagttgcagttgctgcagccttcatggctccaaagaaacctggctttttctttttcgttttagtcgtagttgaaactgcactggactccgattttggagaaccggagttcatgtatggatgatgattttgttgttgatgttgatgaccatcaccttgaggagtgtatggcccaggctgatgattctgatgttgatgttgatgttgatgaccaccaccttgaggagggtatgtctcagggtgacctatagactctgtttttggagaacccgaattc

SEQ ID NO: 343 - DNA, 128150 bp, Arabidopsis thaliana
aagctttgaagaatctaaagaggagatcaaaagagagctgctttttccagactctaaggacaaaagatagattcgatctttgagttttgttgtctgaaacgataaacctctctttagtggtcagatccgaatccagagaaaatgaaagcaaacagagaagagaaaacagaggatctaggatttggacgctttcttgaaaactgacaagaaaccaaacagagaaatggagaaaactcaggtgggtttagagattgaagatgttaaagtgaacaaaatccaatctttttcttcttcttcttctttctcccaaaggacccaaactctcaagtcgaaaagggagagagagatatagagggagagaggggagagagatgaatatgaaacaggaatgatctgagagtgagaggtgagttaaaaagctgttgagctgtgattgtctttcagtatttcccagacaaaaatttctgggcttttcattattttattattcatattaagatctacgagtttttttaatttcttgatcacttaaatctaccaattgggcttcccttcaaaatatactaaacgttattgaaattaaaatatatatataaagaaatcagataatgtaacaattttatgactaaggataaatcaaacggtaaaaatgtgtataaatgagaatggcaacagtgcttaattaacaaaatctatggtgttaaattatgttacaaaacgtttgtgaataacgacacaaataaaatacgatgctatagaaaacaatgttggtgttgatgtataaattatacaattttctgatctaattttcttaggtaagtattccacatcaacatagtacaagtactattagtataattcaattctaattaaaaaggtttcatttcaaagtgagattagttaaatatcaaaaacattcttttttatgtatttctttttcttttcgttgtacctttttaattcaatcaaccaataaacactcgtccttgtatagtctatgatagaccatcacataattcaggaaaagacaagtgtcgtctttgaataggcaagtcacacatgttcagatctcatttgttctcaaggaactttgtttttttttaatacatttttatgctttcgaggaccgttgattgattttttttctattagtatttatttttgttttatcgatgaaattaataatatgactcaactaataggagaggggttttgcggctaaacgttgcctaatgataggccaaagacgtttagagattaaccaatcgcagactcagacaagacacacaatcgaggagcatctcccattggctaacaagatttaaggcggttataagggtacttcggtaatttgctattggtgttgacatttaaccttttgggcacatgagttgtttgtttgtatatcgagatactttctctttttttcctaaggggaaatgattttgtgacaatgaaacgtttaatactatataaatttggatcataatctcgataacaaaaagcattggagaatgtggttaaactagcatgctaggaaacataaaggggcatatcctatcacaaactatacttatctacgaaaatatgaattacaaaataaataaataaaatgaactacaaaatttagtacaatgccaaaatacgtataaactacaaaccctaacaaaattttacaaaaatagttgtactcatctaaatcaatattgatctaaaaggcgttaattttttgcattgacatgtgacagaataaattgcacaagaaatggcaataaatatttttaggcgtactatttgctaaaccgacattaaagaactgtcaaacaaatataattttaatatgcaatgatgattccttgcttagcttcttggttcaacggccacagcaaaaaattcaacatcaaggaagtaattaaatagtatagtaaatgtttagtgatcataattgtgtgtctaagataacaaggtcgtaataatggagtttagcgagagagaggtcgaaccttaattattaattaacgtatgaaatataatcatgatgatattctaacaacattttttttttgttgtgtctgcacattctaacaatatctaaattccaaaaactggtactaaggtttattatgagttatgaccataagaatttacgtagcatatatataagatgattttccgaaatttcaagaataatttctttataggaaatctttagagttaaatcagttttttgttttctttttgtaactcgactaatttaatttatgtatagtttactactataagattaatgtatattcgaaacacattatgaacggcaatcacacaaaacgtaaattaaatacatactgaaatgctaattaatccttcagatgttcctcatagactcgtatcttgggaccacgcttacttttctttgtaaattacactaatggatttcttaaaacaaataaactgtcatgatttatttataaatgggttaggtagcttaagtgatcacgccataacagacacaataattcttgaaagtgttaagaatttttattgttattaatatatcgcagttgagaattcaccatgttgatctaatatgagacgagatgagttttttcctctgtttccatgtttgtagctgtatatatatattgtgtagctagaaacatggtatactacagactgaaatattagtctgatttggatcagttcaagatttacccttttataataaaatatatattttggttacaaaactaagaaatataataaaaacgaatgtcaaattcaaaataaatgtggtttacacagtgccctcaacaaaatgggtggcagaaaatagttgaataattataagacattgtttttatgtatttcgaagattatcagatgcaaaataaaaacttcaataaagtatgttaccaatgctaaaattttagtaaaatttatcaaaagttcacaatggatgaacaaatttaaatttagattgtatatataaatttttggaatattttctatagtaaaaccattagaaattttagacttttctaattatagaaatatttcgtctcaaaatattttatgcataaaatttcaagatgaaaatatatatttctaccaaattcgtctatagttattttagaacgtgccataatttcaatctaaaaaaaataaaaataaatcagtctttttgagtatggtgaattggatccagcttcattaaagtttgaacttgaattgatacatagtctagtagtttaatgcatcaccacttaaattatcatctaaacttcaatccacatattatcaatttttgacatgataaaaatcttcaaattaccattccgtgcgatcctaattcaatggacgacgttaagtagcaaagagccttcacagtatatcgaattttaattaaaaaaaggcgccagatgtttttacatgtaaatttatataaaaaaacaataatataatatgatgctctgtgcaactataattctttaaatatcagagttgtttaaataaaatgtcagagttgtttgtccaccactcacacccaacacacgattatttttctactaaatactaatagggtcaataaaatattaagtaaagttattagacgtttttttaattggagtggtgcaagacaatgactggttttgttatgaatattattaatatcgtggagtttccccaaagggaaagcatcttctatttccgaatgaggatacttttttctcctcaataatttattttgttattaatagatacatgtaagtaaatatacataatgactatatttctttatttatcttaaatacagatctcagacctttttaggtttcttttctatattttggtgttacacaatacttttgctaatggtttagctacaaagcctaaaatcatcttcttgccaccaccacctatgtaatatttacataatgatattttacttcattatttattgttgttggttaattaaagtttagtctattgctccttactactgtagatcttatgaaaccaaagaaaaaaaaaagattttaggcaagaaaattcatactatttgtttctttggtcgccaaaagaattctctatttccaaatcaatatactatatatgtggccaataaggaaattttattcattcgatgttttatgaattttctattacactgatattctattttagaaaaattagataatacaattgataatagttaaaaatacattttatatttaataaactatgggaactatgggacgaaacaaacaaatgggtaacatttatcaagttgaaatttggcatgttaagcctttatcaacctagacacaattctctgtaattaacgacgtcaacttatgatccatactctcatgcttttgacttccaatattaaaaaatagaaatcaaacctatgtatttaaagtaaactaaaaaaatacaaaatagacaatcaattcgttacaagtgttattgaaagagtaataaaaattaatattttaataatctaaaaatggttgtacaaaaatactttgttcttacaatacttatttctagtggttgatatttttcatatcttataaaagtgtatatgtgtttgacaaaaaaaaaaaaaaagtgtatatgtaataaaaattcggtacggtcattcagaaagtgggtactatttgtgacagcaaaacaattgaggtttgtttcatattataaagtaataggattaaaataaatatcatatatatgagaggcaacacaaaaacgacacgacgttgagagtaaataggaagctctggcaaacagtttgacccaccggagcgacagcaaaagaatgcgagcgtgcctgtagggctcccactcataatgcgctccacacgctttgtacattagtggctttgcacaaatcatttgtttctttttaagtttttattactttttataatatagactttatattattataagttggaacccatattttacgtttcaagtatgtgatactggggcaccaagcaaataacaagattctgatagtgtcttttagtcaacgaatttttttgtagtttaatttgtcatttaatttttacttatttttatagaaaatacatggaaacatcttaaatttattatataaacgtaaatgctattccctatatttataaatgatgtattttttataaaaatttcttacaaatgcatcatttacatatttctaaatgatgtattcgtttaaatttattagaaaattaaaagttaactataaatgcatttttttgtgatttacaatttttaataacttaaacgaatagttttcaaaaaattatattaaagttttaattcatcgataacactaataaatattacataaaaacacaaatagattgatatctcggatccttccaaacgttaatataactacgagattggatacacaaacctatatctcctcgtaagtacaagatcttgacgattttgtaataatctcgcagtagacaaatggagatataagaatgtaagacatggagagaaaattataatattgatctggtggactacttacatttttctagtcgtgtttctcttcaaacgatctaacttttaatctttctgtagtttttttatgttcctttagagccggtttatagtgaagagagcttgtagattcacctccagtaccatacagattatgtcatcatccacaacaatgcgctggagcagctcgatcggattgtgctcatgagagattcttccgttgtcgcttaatggcaaaacatcaccaattacaacgcgagaagtatatcataacttttttttttttgtttttttttttatctcaagttttattgtgtttagttggagttatcgtttgatgagatttaggttaattagcatttgaattcattggttgatttgcttagcgaaattttgtagtttaatttgtcatttttacttattttaatggttaaatttaactctaaaattcagtataaatatttcaaatttactatgataagttaaatacggttttcaattttgaaaatatatgtataccatgtttctctgacattgccctataatattaactcattattaattgtcgaagttcatacgtagtacgtattcgatgtacctagtttaaacaacattgcacacagccgctaaccaagtgatggtggaatgtggtaaaaatatttgtttagcaactttaacattcttaatgagctcatttgaattattctaaatttatgagaggacttttgcgctagatctgacagcaaaagtttagttttttgaactttctccatttctaataacttatcttaaacataaaattttactagtcaaagttgttatggattgtattttttttttttttgttgataaaagttgttatgaattgttgtcatctagttatctttaatcacatggtcccttgaattgctaaaacgatgtttattacgccgctaaaacttatatcacaaataagatggattctttaaaaaaaaaagatggattattaaatatgcttgccttaaagttaaggaaattaaatttaaaagttagaaatcctaaaaacacatcaagatatatacaaaggcaaaggaaagctagctacctaacttaacatataatgtagataataaaaaccagtttcatggcagcacaatcgggaagaaaaatacgtaagatgtgagccaaataattgagatgataaaacgtcggtttagaaagaaaagaaaagaaaatcatctcccttctccaaagagggcggctcaaggtcaaggtcaaaagctaatgtgtttcaagaggccagtttagataaccacatagttttgttttcttttcttgtttctttaatttatctaatgcaccccttaatcaatcattttatcattaatcctcgtattatcatgtacttgacacagtcctaaccccacatggctatgggctacctatgtaataaagtattttctagatggtagagtgataaaatatacaaattggtacgacacttctttggctagtacgttgtacatcgacctgcaattaataatacaacgttaaactcgattaaattcttcatgtgaaaatcaaattgttgtgaggttctcaatgtagtactaacactctgtatgttttgttttataaaatgttttggatgaatgtgtggagattaaaaaaatgctttgagttatctctacatttgcttattaaacctcttcgaccaataacaagttaatattacgcaactagctattatacatctgatgttgcataaaaatcggaaaaaataaaaacatatttattaaacgaaattgaggcagtgtaacagaattagcttataatttgcaacctgataagtttgatcgatggaaaaactctgaagtggtgagaaacataaaaactcatatttttaaacccgagtaaggacgatataattaataagagaatgtgtgcacagtaaagttgttggaccaaagaataaactacaactttggaccatataagaggtgtgttagagacaataataaaaaatatgaatggaatttgaatataatgaaaacaaattattataatacaatgctcttttttctccattattcaaacttttgacatgagcaaaaaaaaccgaaccttttgctttgctcaaaaaaatacaatttgttagccaaatccacgcattaaatcaccactcattagtcttcttggacgtggcgtgatgttgatatgtcgccctatttagttgcaggacttagcacttgggaagatccttaggcggcggcaaaatcgactgattgggtcctttgccgttctccaccaagaaagccatctttaatccccacgtcgtgtgtacctccaagtgacaatgcatgaaccaaacccctacattttacaacatattaatccatcagttttattataatagtatttgacttactaccacaagattttatttgtcttttttgatagcatggagattgcaagtctagtcataaagtaataaccaaagagatattgatctatgacctaaatctacatggcgataattaattaacccactaaatcttttgattaactttttcttaaccaaaaattagtgtgcgtaccgggattatctgctctgaatctgatgacgacccatccaccggatggaactccgattgtgttcctctcaaccggatctaccaaattgaagttttttgggtctttcgtggagttgaagttacctaatccacgaccgacttcaaaaaagttaaaaccgtgaagatgtactggatggttctctggcgctatgacgccggtatcttgaaggacaagctgaacagtggcgttatacggtagcttgtagagccttgtgccggtttctgtggccatgttcgtgactgatcctccgctgtagttgaaaacgtgtggtggattcttgggaaagtctgtcgtgaaaactccacttgtgttgaagtaatgagccgggagcaaagcggttttaggcataatgaaggttacattgttgatgctagccacgacacggcttccgtttccggccttgcaagtagggcatgcgtttagcccaaggccgacggtgaagaagaggtggtggtcgatggtggtcgggacaagagcagggtacttcttggagttgagactacgaagagagtttgtgaagttgttggctatggaagtagcgttttgcgggggaggaagggtgaggattgttggggaggaggagagtgttcccgagtaatgaacagttgcggtggcggttacgttgtccaccgcgattggggcgtccatgaaaggagaagcggttacaaggtatttcccggcggattttgaggcggttaggaggacgttggtggtttgaccgggggctataaggacggtgtcggtcttgaacggtttaacatagactgcgtctacttctaccaccgtgaaaatatggccggcgactttgaaaaagagttcttcattaagtgcagcgttgactagtcgtagcagataggttttgccattctctactgacagtttgtaaccttcggatatagaaagaggctttcatgattagcttataatcttttaaaaatcttataaattaaaattggaaattaagagattaccttgagatggacagtttctaactgggcctgggtgtccgttgatcatgtgagagtcagagacattaggggctaatccagacttaagcgcctcattaataatattttcagtatccgatttccaccattcacctacaattattatgaccgttatgtatctagtcatgctaaatttgcatgaaatgtaaaaaacctgtagcaactaaagatagtagtggtgtttagttttacgagctttcaactataaatcacattgcaatgaatgactgaatgaatattacatccattctgatatgaaatttctaacttataattttgactggtcgatccaaatttcaattctattggacaagagaattaaaattttaatgaatccaaactttataattgtggttgaaaatatatactgattgagatacctagaacgatgactttctcattgtcgggtttggggaaaggatagggaacaccgcgtttgggaaggatgaccaatgcaccgtaaacagtggctcggagccagaggatatgagcgtgccaccagagcgttccgcgttggccggtcaaagtgtagttgtatgtgtagacttgaccaggctggatcgggcactgagttatgtaagcaggcccatcagcccatcccgttctcacttgtctcacaccgtgcctgatcgtccaaagttaccaatcaattaacttgtgaatttataaatgatgattcaaatgaagattaagtagaagcttaccagtggatggagacgttgtacttgacgtgattaacgactttgatgagcaacgtgtcatcttctcgtgcgtagattgtgggacctggatatctaccgttgacggtcacggttggcttgcttgagcataatctagtcacgttcttcattacaacctgcgccatttcaaaccaaaatatagtgatcagtaataattatattgcaaagttaaacgaaagggataaatatatatataaggcaaaagacacacaccaatatcataatcataaccataatcattacttgattgtaagttgcaacaaaaaaggaaaaaataacatgcttggttgttcacatgtacgtaaatacattatatcatcccttttacattaaatgattgtaaacgtaggaaattcatgtttgaaaagtgaaaatagcacacgtacataaatctcaagtaatctttgtaagtaaaggctcataatataaagattacataattgcatatgttccactacgaagccacaaacaatatgtatgtttctttacgtaagcagggataaagttaagttgcgactatgttatatgctgcaatcagcataagatctgtaaatggaactgtgaatatataaactcacgttaaacttgtagtggcgaaccatgctctcagatggagctgggaacacagagaagaaggatacaagaaatagaaaccaaaccatatgagaccccatctccctctctatctttctcttctctctctatctctccttcttcttaaactgtgtttttagtctttttctctctgttttcgagatgagcgactggccaacgcaagcttataaagggagaggagaaagagatttggaaaccagagatggaggcgacgtcgttttaggtggtaggtcgacccaaaatccaattctttgtaattaagattcccattcttaccacaaccaatctctctgaccaaacccaagaaaatcatttttcttttcataacatattaaaagtgggcaaaactctgttttgtataataacatgtttttttctaaattaaaaaaaaaaacatgtgtttttctttttaactgtttacaaaaaatgatatcttatgttatatatgcgaatatgtgtgtttgaagtcttttggataaaatttctattttaaaatttttttttactaaaaccggaattgacaacttttagtaaaggatattcaactatttttctagttccaatcttaatttaccttttcaccgcgcctacaattcacacacttttttttgtcgtaacactcacacacttaaattttcaaatttcaattgggatataacaccctggtggacaatgccccaaatcaccagtctcgtttatatatactcaataattgtactgcatatatatagtttgtacttattaaaattattatctgactttgagtatttagtacttgtactttgtgcccaactttgtatataactgtagtcatatggagtcgttaaactgcttacttcctcacttcaagtttgattttactaactcttctatccctggagatggttgagggatcgagttagttccaacagaagaagtcaagtcatgttcccttggatttgaataaaggttagatatacggtgtcactgaaatcagattgttttatttagttagtatatgtaaccttagtattgtgccgatttgcttacacaattgcggtacctaccatgcatacgtaacaagtattgtgccggttttatcttacattattaagtagaagaataaaaaccttaggtaaatattctggatttatagcattttttatacttgtttgatttatcttttcgaaggtggattttaagttcaaattatttttaataatacaaccaactgctaaaggtttatatgttaattttccctactcaacactaattaaaagttaatgtaaatagattaatagatcgtaacattatctacgtacttcatacatcaattagtatttatatatacataattataaaatcatgacatgtattataaacaatctaaatgcttcttaaatatatagcggatcggagatattaagtcgatcccttgctaatttatggtatggtttgcgacggaatgattaatcttctaaagttaaagttgactagtgtatatctaataatcataataaaatattgcatcaaagatttatcatatattacatacatatcaaattactaaatagatctcatatataagcttgatttgtcttatacattcatgagaagttcatgatctttatgttatattctctatggataatgtagacttaaagtgttgtcaaacgcgaaatttgaaatagtaaaaagagataaacttaacatcaagtatgtgcattactttggtgagacgtatacgtctgaactcgaagtagtatttaagacgaccacaaaacttttagacatttattttgatagatggccgaaatgtctattttaagatcgtacatcttaattccttcgggtatacaaaaacaatttctccttctgcttcacttttatttttggcaatgggtattaacaatgacatggtaatataggactcatctaaccacattagattgaatttcaatcgaaaccaaatataattgaacgtattaacactttcaagtttattcttctacattacaaaataaacacaaaactcaaatttccaaattaaattcgaaccaaaactggatcaaactttttaatgtggtcgctttatttggcatgcatgtagatgttcttttagtcatacaaagaatataacaaatttaacagtccaatgaaaactatggtcagaatacgaatgagaccttatagtaaattttttttttccaacaattatagtaaactttttctccaacgactttatagtaaattttaatgatcaatagttttaattgtctacaactcacgcacacacatttttagatataattgtgaatttatccttatagttaaaaacaagaattccgtatataaagattaatgcgttattttggtatattgatagcggatgcaatggtcacatacatattgtaaaaagtgtcttagaagctgtgtgaagtgaggtggagattacaatgcttagaaactaagacagtagaataagttgagaaatggctttcatgtcgttgtaaacaatgacccaacaaagacagcctctttgggtttgtttcaaagctaaggctacatacaaatatgcgtgtcgcttggacgacgccgtttaggccacacaccatttaaacaattttgtatacatttatggtcaaattggtcaattagtatctttgccgtaccgagatgtctcagctagccacttaactcgacagatgatttgctgagcggtcatggttaaaattgggtaaagtgtcaatcaactccaatttgtagttaatttgttattgtcattttctcaacaatccttgaaagtaaccttctttttaagtaacactaaagtccaaaagacgacaacataacaatttgaaaatctggaaatatcgactttaatcatcaaaacgtttttaaaactttcgtatttattatgatgatgtactgtatttctcatcagctttggactaaaaaggtgtagctataatacattaatacttcttcgacaacttcaatggttgaatttagtttgctacttgttagtgtgagctgggctaactaaaacaatttatgggctttcagaactaaaaaactgagctgggcctgacgtaaactaaacgattggaacatacatattcggctagtcgcagttgacagatttttcgtaaattttctcaagattttgcgacaaaaggaaagttttagataccaatagggatcataatctctcgctatttctgatccatttggtttttttttttttttaaactcatagaaaaaggtatgatttaatttggtatccttaacaaaaggcccaagagagtaatttttgccctatgacctcaaataattttggagtcatatgctcacacgggctcttcttgtctccttaacatatcttttttgttagtttcactttcctgcctccttaacatgttccacgggcccatgacttatcttttgtttctgttgtcgcttgagcttgacaaagtgtcgaagtctttgtatatgattgatttcagacggtagattatacattttttttttgcttatttatactaaactactgacaaaaaaaaatgtcgctttttgactttgatttcaaattaatttatctgtgaaggtaaaacataaaaggtttagttaaaagtttatcaaagtgaagcgttatgcgaaaatttcggatgctcatattaattcttcttttgtccatgagttgctcctgatttttagctatatttcaattctcatatgtcattgctattttcctctttctcacttatgtataagaacctttaatatagaagtagtaagaaaattataatcaactcaaaattatgtatacattcatgaccaaagaagatggattaacactttgaactacaaatttctaaaattggcaaaatcaaatcccaacacaagaatcagattgaacccaaaaaaaatatgtaaatctttgaacattttctgtcaatgcaacttcatcacacattattccaactacatctaaaaagaagactcgagctcattacaatgttgttagtaaaagttcataacatttctactaccaaaaggttgagaagccggaacaggccggcttgtcggtgcggtcgaattgccgcttcctcttcgccttcctttacccggtgtcaagtaaaacttgagcattccattctcagccttactaactttcttcttcccactaatgtatccatccacactattccgttgcaaccctcctccagtggttccggaacttctccaactcacactactattgctcctaatcatcttcggatcaaacccgttcctcggttctacattccacgaccccgaaaacgttctatccacaccgcttcttctttcttcttcctcgtatttgttcccgttttttcgatgaagcaacccgaatatgttccaactccatcgagatttcttcgtcctcttcttgttgcattctatagtccctacattttctctaacacccatctcatagttgttctcaacagagcaacaatcgtctctcagtgaattcgaatgtgaaaccaagtctttagcctctctgtcttgagtcagctttagttcatcaatttcagccatgacagaggctgataacttcctagtggagctagaacggtcaaggctcttcctccttcgtgaagatgatgagtctaagtaatactctctggtctgtgcagatccaccaggaacaatctcatcaatcacagcttctgatacttgtggtgacttttccaccggaatgtgagtatctgaccggtgaacatgattccgaaccggagaatcttccactacagataacatcgacggcattcgcatcggagcagcagctcttccaatcaaatatccatcccacgaagcgcgtggctcctcaaaagagtaacgagggtcatcaaccgaaaccctaccagcatcaagcgagaatcttccagcgtcaattgagaatcttggatctgtatcacacgatctccttccgtaaccatactcagcgatttcagattgagtatctctaagttgtctcccgattgccttctccaccggtaaagcagaggatccggctccgagatttccggttctatgcttcttaagcttctgcttttgtctccatttctgcaatttcttgctgaatactgacgccgctgaccagaaactccctgcaatctctttgaagtctctgttcgtcttcttcgccgttgtctgtggattaaactccattgtaaagtcctcaactttcttcgtttcctcttcttcttcttcttcaacgatttcgtcgattacacttctgggttccttgaaagtctcaaactttatgtctttctcgttgtcttgctcactttcaatttcagtttcctcctcgaaaacaggagactttactattgaattgatgcgttcgagatcaatctcactgcaatttactgataaaccctctttggtttgagaattatgctcggcgtcttcgtgaaacagagaccaaagagtgttcctaaccctaacatcacaggatcttctctgtggctcaaacgcacctagagaaaaagcttcagcctttgatgctgaaaacgatttcgtcctccgaagttccgggaagaacgaaccggaggaggaagagggtttgaagattgctttaagagcggcggaagaagacggtggtttcttagaagaagacgcgacggcgttgttgttttttccggtgatgtctagaacagagagacggtcaaagagacaagaagggcaaaatccggtgaaacgctcatccgggtgacgatcacaggaagtagaaggacggtgaggctgcggcggatgtggcggcggagctaaagctacggctgacgctgaagacgctgctactgggttgttgtttgcaggattattcataaccataaccacccgtggctcatatcgggattcgtaaagagagaagagagttacagagaaaatttcgaccgatcgagagagagagagagagagagagtcagacaagagagagagccgtttgggttctcaacggatagtgacaaaggaaagagaaaatagagagggttgattagtgagattataaaagaaaggtgtgaaattagaataaagagaaaatatgaggggtcaggttttgaaaattccttatcgctagttccgttgtataactttagcagtgagtcggtagtacaacactactactactactgcagacagagtaagcaaaaaagtctaggggctctcgcttgttaaatgactgttacgcccctaggttttacttctactatcactacctatgaagttaaaaaccaaagaccatctttgttttgtttcacgaacttgaagggacaagccatttgtttgtctactcaaattttgagttttcacactcttttttttttttttttttttttttttaatttgtaaggtaacgtatttccaaattagctggaaccaaaactcatcatttaagactatttttgtccttacacatttttattcgagtttaaatgtgaataccgaatgtccaaggtcaaaagtgacaccaatctttgtgttttgatgttcgtacgttttgaaccttctttgatcttgttttctacttttatgcatgttttactatttttccatgattcgagttgacatacctatttatgttaaatccatggactaattagtttgatcatacatatatctattctatagtcgatttatggttaaatgcacgctggctggtctagaataagttcgttaactcttatgttctacggaatttacatgactagtatcatgtatgcatgtatgggtcttgtagagaacatggaagctgagtgcaacaatatccttacttggatgataattgtatgtgttagtttatttatgtgtgattgtattaatataatgaataatcataatattgattcttaaatgacattttaaaatatatttcgattttttttttcaatttacgaggaaaaaacatatgaatagtgtttatactttaagggggaaaatgcaaagtcaggtaatagctcgaggatgtttctgccattacttattcactttataatcacatttcgctttcattttttccttttctgtcattctctttatattttctgtctttccactttcattttattttagctttttcttgttccattgctctttttgttttctctagcttttgccttttgagaacacatcaaataatgcatgttaaataagatgttaattgtactcgtgtaaaaacctcttacataaaaaatgccaactttttatatgttttccatgtacaaaatcccatcatcttatttaactttattatataaaattggacacatgaaaaaccaagagtagaatttagttattcagtgtggaggtaaattcacacacgtgaatagtattatctcatcccaacaaaaaaaaatgaatatccaaataaactcaggatttaaattttaaaatgaaagaaaaaaattaattgggaaaatgaagaagggcgtggaatagcaccgacggcgcacgggggagagtgatgaagattgatgagagtcacgtcggtgagtcacgagttacttaaccagactggtgtaaaccacacatatatcgattttgggcttagcttcggcccattttcttgagatagatgactcatgtcttcatatggtcggatatattaggctaaaagtttcataagaaaatgttattttgttctgtctctttcaattgttcccccgtaggttgttgtatatttaaaataggcactctcttcttttttagatgtcgtagaagtagtttttatattggtgaaagatcatgtttctctcttcttttttagatgttgtaggagttttaatggattttggaatcttttatttatttaggaaggaattcaaaacatgcgagggtaatgtgacctctgccatgttatgaaccactcataggtgcattcccactttgaactttttttttagactcacttttgatgatttgaaaatacgtatagccccaaatgaacatatcttgagaaacacgagcaatttctcataaatgcctaatagtttagccgtttaggcatctcatgatctcactgtaaactattaggatagttacacatacacttaaataatagttacacatacatctaatattttgaaaatcctttatattctatgaattatccacaccaaatgacatcatgtgtgactgtataaatacgactacaaatctatgtaacctataccaattacaaatatgtttttctatgtttaatagctataccgtttgtgtgtgatatatatgattagttacattaagatactttaacacaattctagatttctagtgcaatgcagttatcaaatacttctgattttgaattgacaaagcgacttaaaaacgattgattgtaaaacaacttaccacatggcaagcacactcctaaacgcatcgaacaaatccataaactgcatcatacatacaacaaatccaatggctttgtcattaggatcactaccgtagcaccagttggggcatagtgaaatacaaatgcctttttcttatgtcattgtcttaaacagacatgaccatctctctaatttacgactactttttcctttttgggctttgaatgaatcacgctttcaaataattgggctgcttctttctttcccattttagaccaatttcaaagacaaaaaataaaactagcaattgctaaccgaaactccggtatcccggttaacccgttgtaggtggggctgacgtgggtgcaatcactttgtcatatcaacacatcacgtgtctccacgtaggatgcagcagaaactatttactacattgactaaaatacccttcaccaccaaacaccaccagcacacgaaactttcatacgtttctttcatggcggattcgctctctcgctgaaactctctctctctctcgttactccaaccactcctaattattcacatcattattggcatgaaaagttaatctttcctatataacaattattaatggcgacagtaggatccctgaaacctctgcaccattcctcatgttcatcgagtttccctcggaatccgatcgtaaaccggaaagcccttcttggttttgtgtttgattctgcccggaaaaaccagattcgatgtgagaatttacgatattcatcggaaagcgatgggaagagaagaaatgcggcggcgaagaagaggaatcaatccccggaaagatgtgcggcggagggagtactgaccggaggaggggggtcggaggcgattgcggaggtgaggacgatgatgcctgagaggattaaggtagtgatattgacggcgtgcatgatgtgtctatgtaacgccgacagagttgttatgtccgtcgcggtggttccactcgccgataagcttggctggtcgagttctttcttaggggtagttcaggtattttctaatctcctaattttataggtttttctctttcattatctccgcttattacattcttgatccgcgtatcttgaagaaatcaagattacagaaaaattaatcaagatttcaagatttggtttccttatataaatagctaaatatagcttttcacataattgaatcgttcgtaaattccaaaattgtttttcaaaagtgtaaaacacatgaaagaatatccgataatttaaacaaataaaataaaataatgatatataaattagaaaaagagggagtggttgttgaaaaaaagagtaggtgcgttagtttgagcggcaagcgtggagaaggcttgaccttaatgtgaatgtgaaacttattaccaaaccgtttataatgtggccgtgtgggtcacgttaattgtccttttattgagttttgtctggcttcaaagctaaaaattagttacaatctcctgattttggagacattcaattccaatgcaaaggacagaaccattacataggaatataggatatgatcctaaattttgagtttagatcactgataaaccgaaattcagatttaatctcaaaacaagtaaaaaccagactttcttgctacttaaggtgtggatgatctaaaccaatagagaagttctcaattactagattgatttcttctatatatataggttagggcactttgatgagtaccacttaaaatgtttggctaacactatatatatgcttttggtactatgacacttgtttattttgcagtcctccttcctatggggttacattttttcatccgttatcggaggggcattggtggatcggtatggaggaaaaagagtgttggcttggggtgtggcattgtggtccttagccactctactcactccttgggcagctgcacactcgaccttagccttattgtgtgtccgcgccttttttggcctcgctgaaggcgttgcaatgccctccatgaccaccctactctctcggtaattccttttattctacattttgaaaacgttttacgtttttaaactattgggtttgaaagaaccacaacctaagttagatatatggtttcctcaggtggtttccaatggatgaacgagcgagtgcggttggtatatctatggccgggtttcacatgggaaatgttgtgggacttctgttgacgccactcatgttatcttccataggaatctctggtccatttattctttttgcatccttaggtctattgtgggtatccacttggtcaagcggagttacaaacaaccctcaggacagtcctttcatcactaggtcagaactcaggcttatccaggctggaaaaccagttcaaccgtcaaccatttcgccgaaaccaaacccatctttgcgacttcttttgtcgaaattgcctacttgggcgatcatttttgctaatgtgactaacaactgggtgagtttgagtttaatagtatctttatcagagcaatacctcatcttttgttgccataaactcacacggttttcgttagttgttgttcacagggatactttgttcttctctcatggatgcctgtttacttccagacggtatatagggattattccatgttttcattcagatatatatgaacttcaagaaaatatatgatgttttatatctttgtcttgtttgatcataggtgtttaatgtgaatttgaagcaagcagcttggtttagcgctcttccatgggcgacaatggcgatctcaggttactatgcaggagcagcatcggacttcttgataagaactggtcactctgtaacctcagtacgaaagatcatgcaagtgagtattagaagtgccatacttggttaactaaatagccgacccataacattctaacggaaagtccctgcttttgtttgtcagtctattggatttatgggtcccgggctgtctctgctctgcctcaacttcgcaaagtcgccttcttgtgcagcggttttcatgaccattgcattgagcttgagttcctttagccaagctggatttctcctcaatatgcaagtacgttaactctcacccttatataaccaaccattcattctaaacttgattgatcactaacctaaccattttgggataatcttgaatctcacaacatcttttggtttctctttgcggaaacaggacatcgcaccgcaatatgctggtttcctgcacggtaataatgttatcagatggtggatcttttcttcttcttcttttgcatcgattttgtttcttgctgaaaaagttagggtttgtatatctggtgtgcgagacaggtatttcgaattgtgcgggtacgttggctgcgatcgtaagtacaatagggacgggatattttgtgcagtggctcggctcttttcaggcgttcttgacggttacggcctttctttactttgcaaccaccgtgttttggctcctctttgcaaccggagaacgagtcttctagatccaaaacgctctccttggacactttactgtttagagctttgactagaattaaaattaaaattcattctttcttttatttggaagttagagtagatatttctctggcacgtctgtgataagcactatatatacttccgattaaatcataaaatagaaattagtttttatatacagtattgtcagtatcattcaaaaaaatgatttcagtctagagattgaattagttaataatggtggccaagtggccaaaacctagcttctttagagatttcacttactatttttcttaaaaatgacccaaaagatgaatgagttagagatatataataagtacacatcatacgaccacgagaaatgaatcgtttacatgtgaaaaacgacaattctagtaatattatcatgtgtgaactattccattatttgtgaatttatttacagtaaacaatcagacccaaaaaataaaaaattccaattaaagttctccaattggagttgattctgcccttattagagagatctgatctttccccaattccataacccgaaaaatggaagaaatcgccgataaaaccttcttccgatactgtctcctcactcttattttcgccggcccaccaaccgccgtccttctgaaattcctccaagctccttacggtaaacacaaccgtaccggatggggtcccaccgtatctccaccgattgcttggttcgtcatggagagcccaaccttgtggctcactctcctcctcttcccctttggtcgtcacgctctcaaccctaaatctctacttctattctctccttatctcattcattacttccaccgcaccatcatttaccctcttcgcctcttccgcagctccttccccgccggtaaaaacggatttccgatcaccatcgccgccttggctttcacctttaatctcctcaatggttatatccaggtacggttttagctaatttcggtttggttcgtttcgattttccggttttcatctattttgctaatttcggtttgtctgagaacaggcgaggtgggtttcgcattacaaggatgactacgaagacggaaactggttctggtggcggtttgttatcggtatggtggttttcataaccggcatgtatataaatatcacgtcggaccggactttggtacgattgaagaaagagaaccggggaggttatgtgataccgagaggaggctggttcgagttggtaagctgtccgaattattttggagaggcgattgagtggttgggctgggctgttatgacttggtcttgggccggtattggattttttctgtacacgtgttccaatttgtttccgcgtgcacgtgcgagtcacaagtggtacattgccaagttcaaggaagagtatcccaagactcgtaaagctgttattccttttgtgtactgagaattgagaaagttgaaaactagtttatcatatgttatgtgtcaatttgtttccaaactacctttgtcaaaatttccagtaaccggtttaattccaacacggtttagatcttatgttggtatcttcaacaatgcacaacaaactgtgtattctttagacaaattttataaataccaaaggttttgaccagaagaggagtgaaaaatgttcacgtatgtcaaagacaaaactagtgttctaacaaaataagacataacaatacagaaatgaatccaaagacaaaagtcaacttcaaacgcttgttccaatccagaaatcatgttccagaagctaactagacaaaagcaaggttttttaagttgctgttcctccactatagtttatctctctgcttcagatcatggaggatagcctctttaccggggatatcgaaagagcttcaagatcctgcgagtctttgtgttagttagcatttggttgtgtgtctctgaatgattcaaagatggtgttttgataagatttttgacttacaaacaatgtcttgttttgtgcttcaggcgaagctggggttaaccatctccgatttcccggattctgaactatcttcgtcatcgtcatcatcttccttcacactcccgtctgattcctctgcagctagttcacgtgcagctgcaagctccttctcgagctcgtcttgcttttcctgcagtccggacgtgttcagagcctctgcaatcttctgcttgatctgctgctcaagtgcctcgattttctgatatgcttcggtgacaccaggcgttttgctcgcctttgcggtttccactttcagcaactccaccatgctcttgatctctggtgtcctcaccacctcctcaatcttgctggtgatttcttggttcagcttttcaagtttttcttgaaggttttcgtttgcggcatagatctgctcagccgtatccttctgattctgtttaacagcgtcaagctccagacccattgactttaacacacccgccatctctgcttcgacctcccctttagtcttcagaactttttctttcagtgcatcaggtaactcgtcaaaagaagaagctcctgagctcgcgacctcagctttgattgcctcgaccttttctctaatttctgggcggtctacagcttcctggaaccgcttattgatctcctttttcaatgaagtagcttctgatgctgctttggctctggaaaagtccctaagcatgttaagcttagattttaggctctcgtagttaggtgcgtcagtcaaacgggtattgaattcttccttgagcttctcaattttctcgatcagaaccgggtgcataaggtgctcttctgaactcgctttcgagaactcttcgcgcattgccgttagtctctcctccaaacctactgctattgcagcttcagtgtactcgtcatctatctcggatttgagtttctcaatcatctcattaagaacttcactcgaaggctcggcttccgtagacgtctccttggctttcagaatctgctccttcagcttgtcaacctcaccctgcagcttccggctatctgagaacacggcttcccttttcttcatgttgattttcctacttggctctattggttcgccctctatgaacactccaatctttcggtacttagccatcctgtgtttcaggagctcctccccactcatttttccgaattcctacaagttcccaaaaaaaagttagaactcttttagatccacatccagcgttgagaagaacaactatgcctacattcatgttttcattgatagcaatctttatttgctgcgacgtccatgaaggatcggcatgggcccctccaagcggttcctgtacaacatgtgagagttactcagtgatccaaagtgagaaaagaagtgtaagaggaaacagatagattagaggtaggatcagttacaggaatgattccatcagctacattaagcttgaccagctccttggaggtaattctaagcttttcagcagcctgcgtacacgagtttcattcaagtgtaatattagagtctacatgatcacttttaatcgagtagtagagcagtgtacatacctcaggagcagccttagaagtcttccacaagatcgctgcacatgcctctggactgtgaaaggcaaaacaacagacgtgataaatcaatctgtaaaaacatcatctcatcatacctactacattgggaaaaagtttacctggcaacatagaaaactgcgttttcgagcatcagcattttattcgcacagccaatggctagggcaccaccagaaccaccttccccaatgacaatagaaagaattggcactttcaggccgaacatcgtcctcagattgttggcaatcgcttcaccctgttatacagataagaaaaaaaatgttatgatgcagataaaccagtagtacatttcaaacataaaagacatttcttctacctgtccaagttcctcggatttaagatctgcataggctccaggagtgtcgataaatgtcacgattggaaaaccgtgatggtctgcataatacatcatccgaagtgctttcctatatctgttgtagacattacagaaatttgataagagagttgttgactctgaatgtttctatttaactacaaacaggaagctcctcgtgaaaacatacccgtgaggagtaggcataccaaagttccgcattatattttctttggtgtttctacctttctggtgacctatgaacatgtaacgttttccatctatggttccaatacccgtcacaattgcagggtcatcataccccgctcggtctccatgaagctccataaactgaaacaagagcagagagtcccaagaatgtaaaaaaacaagaatttatcgtcaatgcatgacaaaaaagccttactactgagagaccaaaccttgtcagttatgttatgtatatgatcaaggaaagtaggtcggttgggatggcgcgcaatgttcacacgttgtatcggagtaagatgcgtgtaaagatctttcagtgcctgacattaaaatggcgggggtcagtaagaagtctttcccaaacaaaattgtagctatacattaacatcaaatttgaatggtgggtctccctcaactatataaattgaaaaccaacctatactagcatttttacctgtctatacttgttctccaaagtgataatctgctcagtgaaatccaaccccgtttcattcgccatcttcctcacctgcatcacaagaaccaatgttatgagaaacttcacaccatacaactgctaggggaaatcaaactaagatgcaaacagatgataagtattcacattcgtacatcaacaatcttcttctccaattcgactagtggcttctcgaaatccaaagtgacaggcttttgagtatcccccaatggtttgaactcggccaggtaagacaagactcctcctttcacattcgggtcaggatttgcaggccatggatgctcaaatttcttccctttcttgagccgagatgtcaccgccaagtccttcctcctgatggtagtaaacactgctcttcctaaggttttcaatggtaccccattaacaccattgctcgaactacgcaagtaatctgaagcagaagcagaagaagctcctcctaaagctagtgatgaatgcgatattgaagccattttttgcgttgagttcttcaattacttgaatggatccactccaaacagatctttattctataacactgacagaaaccaaaaccaacacaaattagatcaaaagcaatcgtcgatcactgaatccacgagagattaaataaaattgaagaagaacacaaattggtcagatttgttccactgcccatttcgtgtctcagaaataaaacaagcaaatctctgaaacccatcaacaacaaaacaaaacccagctcaaagaattaaactttacctcaaatcacaaagacaaattcgaagatccaagacgaagaagaagagcagagtcagaaggaaatgaaggaggaaggaagagaaagcatcgaagagatcgtcgttttttgaaattgagagaagaaggaacaagtgttatgcgagtgagtgagcgtgagagagcgcgtggattttgtgtggaagtgtttcgatatttcttatgcagattgggaaacaaccagcttcgaatccttccttgccaattgccagaactttccggttggtcgttaaaccataaagtttagacctttgctctctcgcacgtgcccacgtgactcctcctacgtgtgagattaacacctatcacttatttggatatgttccggtggatttggtggggttaggttatatgtgacggtgtcgtttaatggattaatcggacggccgacaaaaaaaaagaaaaactattaaaaaaactccgttgccgggactcgaacccgggtctctcgggtgagagccgagtatcctaaccagctagactacaacggatttgtgttatcgtagagttatttaactatttaacttattacacattcatggctacatttctgagtcttcttccttgcttcttcaagtcaaaattcgaattcctcccttatctccgtcccctgcaatggagctcaaatcttcttccaacagtaagtacttcattgctctgcacccttattgctttgttctcgtttaatttctaacactatcattcattaatatcgcagataacattctagagcagctgagaaatggcttcgctagattcgagcttgtttcttctcctactgcttctgtgtcagattcaatatcttccacttcactccctgcttcattcataagcacaacgaagggaaatagttatgtgttcttcgccagaatcaattcctcgatgtgtgttttctcgtttattgaattcaacaatcgagtctctgataaaaccctttacgctaatctgcgaattgattcttatattcatctctaggaatcggtctcctgcagcgaaaaaggttgagaagtatgctgtggatagagttaaaggggatgggagatgtctgtttcgagcattggtaatgtagtttctgttatttttatgtgttcttgttggggtttcctgaataaaagatgtgatttttcaatgtaaattaggtgaaaggaatggcctttaataagggtattactcttaacccccaacgagagagagatgatgcaggtaactatatatttgatcatatagccttgttttgatttttgttgtgtgtttttgaaatctaagagattgaactgtgttaagcttgctgagattggggaatcaaaactggattttgtttcattctgttagcctttttggtggaaaaatgttttgtggtttctctggtctatacatttgaatgtttatctcttgttcatcatgtttttgtgtggcaaaacttgcctttgtttcacagatgagttacgaatggctgtgaaagaggttatatgcaatgaccccaaggaaagggagaagtacaaagaagctttagtggctatcactgtggatgagtctctgaaacggtgagtcataactcataagaattcattcacactcattaccacttttcagctaaatggcattgtttttccttatcacgttaagcatttttcttcagcttttgccagcggattggaagacacgatttctggggaggagagtccgagctgctagtgagtttcctgcatttaaaactgccatcatagagaaatgatctaatgtcagtgttttgcttcaacaggttctctccaagctatgtaaacagcctatcatcgtctacatacctgagcacgaggtaaacgccctttgaatttgagtcttatgtaagcaagactaggtgtttcttttgttctagtaactgtattcagaacttgagttatttggtattgtttatctagcatggaagaggaggagggtatgggccgggttttataccgattcaagagtatggaagtgaatttcgaggaggctggggaaaggggaagacaaacaagaatgttgttaggcttctttacagtggtagaaaccactatgatttgcttcgttgaccaaattttttttttttgcctctgccgttgacatttattgatatggtcagagaaattgaaattttttacccattagtgtatgtgtatcacataaggagtgctttgggagacaaagttactgaaagttctgtcaatgaccttaaactctaagatggatttattaacattgttggacagctatgaaggttttaccttaactttaaggttttggccaaatcaaaaggcaaagttcggtatttatatggttaatccgacaatgtgtaataattgtttgttctcaacacaatgtgtattatcttcttcgaatttttgtttgtttcattatgaaatttgattttttttgaaacatccacacattatttttttgaaaaaaataacccatagtttaaaaaaaaataattatacatgtatcattaaaataattgttccaaattaatgtaaaatccataaaatatggtatttatcaaaaagaataaaaaagtatattttctgaaaaaggtaattaatttgaagaaaataggatcgtggcttgcttgatgtttcgtcttcgctccgatctccaaactccttcgtccggtcgataaattcgtaccttgctcgattctcctctttgaccaaacgtaagttttcttattgatcgatgtttatcaaatattactcctttaacgacgttctcaaaatcgattaaagtaatgagattgatgaactttgattgctccagtttcattgtagagcctttacctagattagtcttcatataaattgtgtagttatagattgggaattgaaaaaattcagcttagtttcgagtttgatcgcagctaacgtaatttctagggtcaaatttgcgatttttagatgattttttaagtgtgattttgtgtccatcagcttaaaagagttctcttttagcaattcattgctactttctagccatggatgatgttttgggggcttattactcctttagatatgtgtttctttgttttcataaccaaatcaatgatcctggctcttttgattattctgcaggtcctgacgaaataagatggcaaacgtgtctgttgctgcggaatggcagcttctctatgatcgatattataggaagcctgagatataccaaatgaaatggaaacatgtagatttgagtcgtaacaaggtggcgtgtgcttcgtttggtgggccaattgcagttattcgagatgactcgaagattgtccaactatatgctgaatctgctctaagaaagctccgcatctttaactcagcaggtatacttctctctgagacggtttggaagcatcccgggggacgtctgatcggaatgtcctggtcagatgatcagacactaatttgcattgtccaagatggaaccatttatcgttacaacatccacgctgagctcattgagcccaatatgtctatgggccaggagtgctttgagcagaatgtggtggagtgtgtcttctggggaaatggtgttgtctgcttgacagaaggagggcagttgatctgtattttcgatttcaagacaatgaagccttctaagttgcctgatgtgccggggttagcagaagatgatctgcttcagccaatctgcttgactgtgagggaacctaagtacacgatgtctgggattgctgaggtgttggtagcagttggcgatgatatttttgttgtggaggaggacatggttcaaactattaggtttgatgagcctagtgttgatgactctgagatgcagaatgatgattctgggaatttgattggagtggtccagaagatgattgtatcacctaatggaaaatttctaacactcttcactcatgatggccggattgttgttgttgacatggaaacaaaacaaattgctattgactactcttgtgaggtatgcatcattgcctctttagatgcttggttctttgtaatagactgtataataaacattgcttgtcgttctgtagtatggtgacttaactgtgtcttttatcctacttttctagtcagcccttcctccgcagcaaatggcttggtgtggaatggatagtgtgctgctatattgggatgaggatttaatgatggtgggtcctgtaggagacccagttcactatttctatgatgaacctataattcttatcccagaatgcgatggagtgagaatattatctaacacgaatcttgaatttctgcaaagagtacctgattctactgagtcaatctttaagattggaagcacatcacctgcagctttgctatatgatgctttggatcattttgacaggcgaagtgctaaggtgggtttattattgtacacaacagcaaaaagcatatgcatcttaatggtgttctgtggcagatgttgtgcattatgatgtgaatccttcatagtcaagctttagtgtctcagttcttcctgctgttgctaatattgtaacaatatggtgttcttactgaaaaaaaaatggaatgaattgagaataatattttatacttactattcctagatctggggtgatgaagttgatttgctcttctttctgttaggcagatgaaaatttgagattaattcgttcatcactgtcggaggctgttgaatcctgtattgatgccgctggacatgaatttgatgtaactcgtcagagggctctgttacgagcggcaagttatggacaagctttctgcaggttagtcttaaaaaaattgactttcagtaatttaatttctgagactaacgctcggtgagctgcaacagcaattttcagcgtgaacgtgtccaagagacttgtagaacgttacgggttttaaatgcggttcgtgatcctgctattggcatacctcttagcattcagcagtacaaggtttttgcagtttatatgattgtgtctataaagaaacgtttgcagctatccttttcctcatgaaatttatttggtgtgcagttactgacaccagtggttttgattagtcgccttattaatgctaattgtcaccttcttgctctgcggatatctgagtacttagatatgaataaagtaagtcagaggttaccatattcgtccctgtaacgcattcctctatctccaatataaattttcctgtgtagctttagggtgaatataattttctatttttggcgttatataggaagtggtgataatgcattgggcatgtgcaaagataactgcttcaccatcaactccagattctcatcttcttgaaattttacttgataaggttcaaattctagtatatataagtctttgcaagatatatatattgagattgaggaaattcgtggacttagaaggattgatgtcattgaatttcagctccaactatgcaaaggaatatcgtatgctgcagtggccactcatgctgataactgtggccgtcgaaagttagctgcaatgctagttgaacatgaaccacgctccacgaaacaggtttgtctatctaagatgactacctttcgttggagttctttatgcagaagtaaaagacattcatgttttcggggtaataatttgtgtaagaacttagtttcacatgtttcgtgatcactttctgtaattctaggtacctcttttattaagcattggggaggaagacactgctttagtgaaagcaactgagagtggtgacactgacctggtttatctggtcatatttcatatatggcaaaaggtatatgactgttttttagtgatgttaaaactttaactataaatctgtatgttgtgctaacaaacaagaactatctgatttcaacttgtggggttgaccagaggcctcctttggaattctttgcgatgatccaaggaagagttttggcacgtgatctatttgtagcttatgcacggtatgaaaatcttctatctaccttgcttgatatatgcgaaactttgttgcttatgaaaactttcctgttgtaggtgtcataagcatgaatttctgaaggatttcttcttatctacgggccagattcatgtacgtttcatgatcacgtttttcctgtaaacgctgaagttgaccatcaaataatactgttcgtgtacataaactgctgttaagcttggattcttttggttgcttcaggaggtagcttttcttttatggaaagaatcatgggatatggggaaaaacccaatggctagcaaaggatctccattgcacggtccgcgcataaaactaatagagaaggctagaaaccttttctcccaaacaaaggaacacactttcgagtctaaggctgctgaggaacatgcaaaactcctgaagtaataattgcaagccaaaacttgattttcaatgtttctttgctcttcctctcatgatcttttttggttacgtcctttaggatacaacatgagctagaagctagtacgaagcaggctatctttgttgattcaagcatcaatgatactatacgcacatgtattgtcctgggtaataaccgtgctgcaataaaagtgaagacagaattcaaggttctaattggattttaaccccttctgtgcaatggatgactgtaagaacgcgatctcaccactgtactgtttgaattttcaggtcagtgataaaagatggtattggcttaaagcatttgctctcgctacaatcaaagactgggcagcgcttgaaaagttttcgaaggaaaagagaccaccaatgggtaagtttatacagctcctctaatgattacaatgttcccatctgatgttaagacttagagggtaggcacattcatttctagtttttctcttgttttaactgccatatatcgtgaagggtttcgtccatttgtggaggcatgcattgatgcagatgagaaagcggaagctctaaaatacatccccaaactgtctgatcttgtggaaagaggcgaggtatgtcctgcatataaaacatgtacttggataattggattagatatgtataaaatatatcgaaaccttttagtgtgagttttatgttttgtggcatctcaggcttatgctcgtattggaatggcaaaggaagcggctgattgcgcagctcaggcaaatgatggaggagaattgcttgagagattcaggaagacgtttgtacagaatgctattttcgataccttgttaatgcctttccaaggagcctcctagcttaaagtcctcaaagttatagcgagatgaagatttttgtttgattgtaactaaaactcacaagagaagtgtgtaaaattgtacaagtgagataactaaatgatgtgagaaaaagtggagttggttctccaagttgtgtaaaacaccaatagtggcttcttcatttcgttgacaaatcgactcaaatctcttttcttctctttttgtttcataaagtatacaatagtatgtcatacaactacaaaggcactagaagaaccagagaagctactaatggatccaaacaacgacttagaagctccataatgtcttattctataaactccggctaccgcagattccggtaccctccactcaatcgtggcttggctctccgaactcagctttgccggtctcgaccacttgaacttcaaactgaagtcatcgtcatcatacaccggagcccatttccctccctcacgcagcgtctccaccacagcgaatgatccttcagtcatcaaatcatttcgaggacatcctgaccaaaacgttgcgttaacttgttgacctctcctgaacgttgactttggaggtacatcagctttgacgtcaccgaatttgactcctagaggagttgagtctacaaccacaggggatagtaaactgatctgtttgtctaaaaggtcaggaggttgcggaccacgtgggagtgttagaccgttaactaaagctgtggctagtttcttgaactcttggatataagcagtgagtgtgtgtcgtccgtataacgttgaggcgccctgaaaaacacaagtaaagctgttaagttaaacacagtagcgtgacatatagacaaagctgaatcaagaaagatagtgtgttttacaaacctcgtatctttgaacctcgtactcttcgaaagtggcgatgtactgagaataggtgttggtgagacctgcgattacgacatgcatgttgttgctgaattccttggggtccgaagaaatgagaaaagacttgatagcgtcacggagacgtcttccagccattgttgtgaactctggatccaaaaatagattcaaaaactgaacaaaagcaaaccgtaaaaccgaagttttgaataaggaagagagagtcttattgatgtacctccgggaacactgaggatgactaattggccaatgcgaagtatctgaatcggaagaattgaaggctgcacaattcatgcaatgaactcttagtcaaaacagtaagatgtcaaatcttggatcagttataaggaaacagagaatggagctactcaccgcccagtcatatggttctttcatctcaccagtgtcaagtaaaatgggttttggtttttggcattggacctgttctggaccaggagttcttaacacattcctcactagtctccaaaacacattaccctttacataagaaagcacattagagaatgattcacagagatataaaaagaggatgtattgaaaagctttttgcttaattacctgatcatctccttgtttgaaatcaaaagcacctggaccatcagttgttccagcagcaaaaccaaaccccattgcagctggacatgtcttaaccgtctcagagccaccgcctgctttaggaactgtgacatcaagattcgagaaatctagatacgcatgttggtaaccaattttcccctgcagcttctctgtagctttgttaaaaagttccacagccattttgaattgcttttctccaatgatacgtgtactctcaaattcatcagggtagctacaacaaaatgtacaaaagatagaattagatgcagagaaaaaacataagaaatcatgaagcagtaaacgtatatacataccccggaccacggccatagcacaactcgttctgtccattgcaggtactgtgattgaaatcacaaggcagtccagtgtcaatgcaaaaggtaccaagagtatttggactcacatcaccacagtttgattgacagaaggcagagacaaatttacgcttcgaaccgtttcttactcgggttttaacatcaagggacttatccacagaatgtcctctagatgacttataagtagccgcaatatccaaaagtctactctctgaaacaaagtaaaacaaaaccataactttccacatcagtctctctgcaactgcaatgtagagaattgctacattaggtaactcaaggaaaggatatgactcacggtttctactgaaatcagaaacaatggttgatactctccgagggatgtttctagagctaacagaattcttctgtccattctcaaaccaatcctccataaaccgagctgcagcgcctttgttatctccactaatcaacgagttagtccgactcatggaagtcccatgagtagcaaaccagttaaaactaccagtaggtcccaactgagaatcaacaaacttaacaagagtcatttccttatcaacatcatacttatatttactcctctcagctgcaggattgttcagataagaactcggacttcgattcacaccagcatccaaaagatcccctattaacaaatcatcacacaaaatggctcaacaaacacaagaacatcaataaaggagattgacaaagaaaagattgtaacttctttacctttgttaacaaaagcagaaccaggacgtaggctttcgtgtgcttggacaatgctttgctcaatgccgttaacaacaacgtcaaaagattgacgaacaaatccaagagacgtcacaatatatgtgacgtattgaagatatcctcctggtccagcatgtgtgtgaattccacttattgctacattcttctctgtgtaaagctcaccatacctattgaacttttaaaaaattagctatccattctcatggattaatcactgattccactaacactctactcaaagattaaatctttagctaattaaatattcataccttgctttgagacgctcaagaactttgattgtaacgatttgagaagccatacaagcgtcgagattgacaaacacgacgcggttaccttgaggctcagcgacgatgaaggcacgagctcgtaaccggaaatgaataccggaagcgatttgatctgagtttgcgtagcccatcatgttgacatcagcggcaggaccagtgatgtcatagcttccgactccgattaagtatgcataaaccgttcttgaaagaagaagaagaagaagaaagagtataaattgaaacaatggtagtgaaacagccatggttgattgaagtgagcttgagaagggagagtaagagagatacggatcttagagaggagaatcagaatcacacgagaaggagaagtgagagagagagagataatccgccatgaaagattgagaaagagctaaaaagcgtgagtgggggaattgaggaaaattcaaatgtggacgcgagtggttgtcggtagttagtgctcttggcttgttgctaccattaccaaaccaaactcttgttgtgtctactcatcaattcacattaaaccgccccattgcattcacatccaatttctctaacattattatataacgagataaacagagcactgagcaccgatgcaattatctatcgtgcgatttttttcccgtttactttcgtgacaggtgtttttcataattgagaatttcattccttattatttcgttaattgactcttcttaatttagaataagtgtctttgttatttttttattaattaaaaagacaccaaaatatatatatttggtatttaatattacaatataaatttattatcttactccatttaagaatattaaataccaaatgtatatatattttctaaatgaatatagatttaggaattgggttttagagctggaaatatatttcttcaatcagtttttttatgacctgtaaattattattattttcttaaaacgtctaaatttttattaatttgaaaactaattaaatttttcttctttctcttgtaatgtttttatggtaatataacatagaggtcgtaaattgtgttagcagagattgagagaacaagagacatgcatattcatgggatttgtatgaaagacatctcaacactagaaaaaagaaacatacaccaatattgtgcttaatcatacgtgaggtgagatcagtagagtcgacgacgtcttataataaattgttcattatgaagttgtaacttgtaaccaattattccataatgaatcaaaatgatacacaaaactagatatatgttgaatccggacagagcaccaaaaaagtaaaaaaaatccattttgtgtccactcctaaatacatgtactagaccaacagagatgatgttcgttagtatctatagtatcttttccaggtcaactataatcaaatcaacgacaaaattttggaatcgttcatattgaataacttggaaatgaacgaacatgaaaaagattttgttgccgatatgccgcatgtgataggacttaaaagcatccatgtgtaagtgttattttcatatacctgctctctctccttaaacactggaccaaaacgcgcaattatttccctcgtgaatctctttttagcttacgtacttataacaaccaattatatagtgggtgaaaatatcctcaaccgtttcacacgtggcaatacgaagacccggttctatctggatctgacccgacccgataagaaaaactcgaattcttgtcttgtttcttcttgtaatgaaaatttctctcgcacggagaagaagatcgaattgacctgggtttttccttactctctaagaaaaaccactactttggttaattgggaagacagagagattcgtaatccatggataagcctctgctttcaggtaaattcagacgaacatatcatctcctctgtgtatatctcctttgagtcctctgattcataaaattgtcttgtcgaaatgctcatttaggatcagagaaaacgaatgaatccgagaggttggattcataccaatacctgcagagaaatagctcatctgctcgtaacccatctttcgccggagctggcgtcgtcaccgtcgaagaaatccgtaccgcttctgctgtttcttctgatcctccgtctctttatcctcccgttatcaagacccctgtttcgttacccattcgtaagtctcgttccatctttcctgatccttcaaaattttgtattgacacctttagttatttgatcagcttccattgaaagtagcagactttttattcgagtcttgattcgtagtggaagtgatctacatgctgttttctctagattttgatttttgatcttccaaatgtgaaagtttcatcattgattcatttcctataatcttctctctttgcttcttaatggttttatacaaatttctgatttcttcttggcatttaacagctcaagctattggttatccaagtgcatctggagcaggtcatgaattgcaacaaaggtaattctagtgataatggttcctaatttttcccttattgctgttgttagccctcactttcttaacttatgttgaacgttatgtaatttcttacaggcagtttcttgatgagattgaaataagagagctgcttattgatcatattggtcatcgttgctgttggggaagccgtcctgctcgtacatggaagattcatgctgttgaagactgcaatgtttatgtcggaactcttgatactttcattgaggagagggaagctttgacacagactgtgcctttcactggtggtgaattcaatggaaagaaacatggatctgaaccggggttatgggaactggacctgagaccgcagtttcctactctgtttgtcccgtataaagaaactcaagtcctggttcctaattctgagactgttgagaagtgcacaggtatcaaatgtaatgtacatatgaccattaggacaatcagaatgttgtaaatactgatgagacttggtttaactgatccacaggttgcaccggaagaggagatgtagtatgtccaacatgcaatgctgatggagagccaggattttacaaggagaatcagatgatgaagtgttccacttgctatggaagaggcttggttgctcataaagatgggtccgacacaatgtgagttcagatcaagaactctacttatactttgatggttgcaaaatgaaaagtgtggttttaattacagaaaactctcttttctccgcagatgcaccaactgtaacggtaagggaaagcttccttgcccaacttgccaatctcgcgggttaatcaaatgtcagacttgtgacagtactggttctcttctgacaagtagtatcgcagttgtaaaatggtaggttttagaaattcttaagaacatgtggcttgaagtggcaattgaaatatttgattgttgttttcggttttgacaggaagactctgtcgaagcgaaaggtgagtgcaacaagaggagctgggtcagtaccagaagaagtatttgacagagcagaaggagttcagctttgcaacacacaagcttaccagtgcacgccagcttactttgcagactcatatttcctcaacagattctcctcagaagttatctcgttaagagctgaagttccaccgacagcgaatgtagtatgtgagagacacaccatatctgttgtgcctgtgactcgtgtcaccatggaagatcgtgggaaagcgttcagcttttacataatcggttttggtaaggagatatacttgaaagattattacccagcaagattctgttggggtttgtgtccctgtcttgagtggttaaaggtttgaaaaaccagagttgatctttgttcttctctacttgaatgtaaagagacaagatagagtgtagtcaatgtgtttgaatattagtgtggattgagagctttagagagaaaatcaaactggatttctagaccttgcgagctttaaattgttttatggtgcaaaatatgaagtcaataagattaaaataaacgtactcataaagtattactttaacagagcaacccaaaatttgttttgtgatagaagatggagacagatagaagagtaaattagacatgggagagtctcttcacttggctttgttggcaggcttcttggtgatgtccttcttaggtttcaacttgtctgaccttcctgacttcttcttctccttcttgacgttgtacatgtttatcgcctaaatcatattatacgcaacagtttaacacaatcttttcacatacaaacatcagaggtaatagaccaaaccagagaggagagctgagaagtgaattggttttaccttgccaacattgaggatctcatgcgaatgctttgagaatatcttgctgagtacattatttgtctgttctttttctgcgttaacatccccacgccctgatacaaccggtaaatactgcaaatattccacaaatatcatcaacagatatggtcatttagtaatcaaattatcaaaggagggacaagattactaaattaccttgtgatgtttgccctgcttctttggaggtttttctccaggcaactttttatcgaattttccaccactagcggttgaagtagcggctaaacctgctacatctccaagttcatcctttccaattttctttggttgagctttcgttcctgatatgggcaatgatgttgcagcaagttggacatggctgcaaataatgttgacccagttagaccttcagttttcaaaaaccatgaaaaaggtggtatgataattccaaaaagaaatcctatatcgagctaggattgacttcaatttctttccgtcagataacacttagattttagcaactacattagtatgttatctcacgcaaggataacaaatgcaataccgatcaaagaagctgttttaccttggtaaagcaccagctttttcagcagccttcagattctgaagtctattcttttcttgctttccaactctcttcttcttatcatctagtctcttggcaaaaggatctactcctggttctgcaattaaccaaaagctttcataaatagtagaaaaaataatgtaatgcaactccatatccttgtcttcaaactcaaagagattagatttcaacattgtctctaacaacataatctaagatagttgttttccataagacttaccatctgattctttcgcctcaatgatgggaacatcattatcatcgttaacacggtcataaccatggcgacgcttaaactgattagtttgttcatcccatacaactttttccttcttgcgcttctgtatacctaagaaacagaaccaagaacaattccaaacgaaataaacattagtaccttcaaactatagaacacagaggtcgtcgacccatcaaaatctgaacaaaataaagcttccaatccttaaaacaatttcttaaacagcttttacctttcttaagcgcaaactcttcccacttcgtaggaggcttaggccttggaatctgggaaaagaggagaaggttacaagctttagtacaatacaaagataagtgatgagcaaaaatatgaacttgttctagtcttttggataagctcatacaagaaatcactcgtttgcatttgaaactggttaaatccatgtgttgcatgagaatggagatagtggaaaataaaaaggaagatcttacatgtttctctctaggaagtttggttgtaggcggaggcaattggacaataggaccatcatttgtttcagtagaaggaaagttgaaaagtttattggctatttcctgaacaagttttgttccctccgttaggatctccttcacaagctcccccctaaaataattcgaacaaatcatcatcaaggacagaaataaaacaagctctcaacagaaacaagtaactcaagtaagacgatattgtattgatagcgacacagcattgttccctaattacaaaagaatgcaactgaggaagaggttcaactcccaaaactcttaaaacagcactcagagaagttgcttaaagacgcaaccttttcgattgggtcatcgtcttaagatatttaactcttgtacttccgagattgatgcttagagaaactaattgaagaaactcttgtacttaaacagagcttttgttaataaatcactcttacgaaaaaattcatactttacttaacattattcagcaattgaaaagtttacaacaagtatgaagataaacccattccaaatcaactaaatcaggattaaacaaatatataatcaagccgccgccatcgaagaactcaacacaagcttaagataagacgggaaaggacgaaccttgaagaaggagcagatgggaagcggtgattgggattgaaagccaagagatttccgacatcgacctggtatatttgttctgtctccatctcggtgtccatgtcttcccggcgcagtgttttggaattgagagagtggaggaagaatgaaaattttttgttagggttttgcgatattttgagttaaaccttttctctccaacttaaataacggaaatttgctaagaaatcctttcttcctttataactttcaaaaatatatttaactttcgaaatcgaacaatttagtactaaactttttttttaaaaacaaataagtaccacataaaattgcaacgaacaccgttattcgtatttattaactgtcataaatctctaaatttcatagtttttagccttaaattaagaaaatcccaaatttcactaatccaaataaccctacccgagatttgcatattttatttctcaagaccataacgttgttaagaatacattaataccctatcgtattaaaaaaactcacgacaatttcggttctttttgtatgttttagcttcttagcataatgtgaatcaagataagtttggtagccatggaatgtatggattgtcactacagttggaatccaaaaaataacctgacttaaagaatgtaaagaagttcgaacatggaagtgggagtctggcaccaacagtttgaggtcagaaacaagacttaggtctattgaatataaaggtacgtgtgttaacttgagattaatgactaatctattggtgaatatgtgtgtgaggaatataaaacacttaaaaattagtgtttatcaaaagagctaaaacagaaaatcgagtagataatttcttgatcatgaatatcttgatcatgagttatctaacaggggatttatttgataggtggctccatttgaattttctagtaagtatacttgtttccatctagataatgtgaagatgtgtgtgactcatgaaattcattctcatggttgttcaatttgttctctaatacaagatcaacaattttgtgaaaagttttatcatgatctcattctgatattaattaaaaatttaagctgctaagaaaaccagattcagtatagaaatttttaaaaagataaaacataaaaccaagacacaaatacacgatctagtgagtttcggttgattctttcaaatcgtccattaatccccaactacaataatagatggttcaacttcataattagaagaacaaaaacatgtgaatatattagcttctatacgaatcttgattatacaagaacatgatcgaaggtacaaagaagcaaagcagtgatcttatctaattacaccgagttgcacttgtgtatgtctttgttattctactcctactacaattatcattttcgatataaataatttcaatgcagcatgaatacacatctgaattttatgtttttaattaacgcctgatttcaacataattcttcttgtatttgttgcccttcactcttttttggaagaagaatatatttatatcgttataccctccctttcttaaaaaaaaaggaccatatctatcaccaaacctctattcaaaaaaacttcttaaaaaaaaaagacacatacatgttccataaacaagagatttgatatgaaaccgaatcttattgtaattgcaattttgccttaaacatacaatgctagtgtttaattctatatatgactggattactcacaaacaaaatctaattatattatgattaagatctttgcgaagatcatcaagttctaaacgaggaaaaataaatcatcaactttgagtatttcaatgaaccacttatcagaaaattgaagtttaaaaccgattgtcatttctaatttattacatccaaaaatctgtttttacattgaaacatagacaacgatcaacttataaacacatactacgacaatatccatgacgttcaaaacatcactaaccagctaaatctatttgcaatactcttcacatttgtatacctttattttatatgagttttaaatattttgttgtataacaacacatttttgtacctcgtccgacatatttacaaatgatttggtacttgacttaacgcaaatgacaagttcacatgtaagatcaagggagatcgtgtatcggccgtctgattcggatccaacggccatcaaggcacgaagaaggtgcagaagacgaatttcacgctggtgctctttgccgaccggcttgagatccggaaagtgtttggaatgaatccacgtggtagcaggtgataggaggtatgtggttaggggttacgtgtccaatatatttgacggcaaatctaaggtttggcccacatgttacatcttgatcaagtgttaatttgtacgtttttcagtttctagtgtaagaaattagctaaaaattttaaagacaaagataataaacattttaaaacatgtaatgatagcaactaagttgcattgttcatttttctaaataacaaaataataattaaagggtaaacgaacgacatgtgtggccgtgatctagaggtgtacatgggcgagagagtgttagtggatcgggtataaactacaaaccattttgttgtgggataggttagaagttagaacttatgtaagttagaacttatataagttataactttacttttaattgggtaatatatatatagttgctctaatcgtagaaaacaatatacactctctatctctgtgtgaacctatggacgctgagggagattgcctctcttccatcaccggcctatcctgtaaccttttccgttcactttctccgattgagcaaatatgtcactggcttatgaatgattcgtgaacatttatgactagtgttattatctatacccaaagttttaaaatccagatatacagtatatgagatgcttaaacttgaaaatattctattgtaccatatttgggaagtactaataaataaatcaaagaatgtaataaaatcaaccaaaaaaagcatataattagcaaaatccccacaaggccataaacacaaacagacataaatctgtactatataaaaatttacacaaacacagacataaaacgaaacagagagagattagaaaaaaagcttcgacgcctctcagccttaagccgaatctcacggtggctactaatacagaaccccccccccaaaaaaaaccataacatgcctaaccactactaaccctctaattccaaaaacaccaacaaacaaacaaaaaaaaaaacaaccttttttttctctctctctcaaaaaaaaaaaatcaatcctttttttcaatttggcgcttttctagagattgattttgtttctcaggcggcgagatgtcggcggccggtgcaagccctttggccgttgcaccaatcacagcccctaccaccaccacgcgtcgccgtgtcggagattctttagaaaccacctccgaacgaccttccatttcctccgattactgcaataccaacacagtcaacatcgccatatcacctgatatagacgacggagaaacaggtttgcaaggcggcgcgtgttcttcaccttcctcaattggttcctcctctagcggatctcattaccaccacgatcatcactaccatcatcatccaacgattcggtactttctgctccgtaaactacggttaccgtttctcttcgacggtgttggatcaacggctgtcgtaggtcaaggatggtggctctgttcagggagaaacgtgggtcgtcggatcttgggtcttctcatgatcttcgtcgtcgtttctctcttccttagagtctctctcatgagtgggcgcgtcgttgaccacgcgcaccggagagatttgaacgagcttgttgttatgcgggcgttacacgaagattggtcaatggctcaacgtgcaatgacggagaatgtcgtcattgagaagcttcccgtgagttttttcttcattacattttgcaaaattcattttcatgagaaaaaaaaacaatttttttagctatatagattattctggtcggtgcacaattgaggaacagcgaaatgtgaaattgggttcgtcaattgaatcagtgcttgtgacgaaatgtgaaaaagttttgagctttatgatcaaaacccagaaatcatttagtagctaaattttgctctgttttcttaactttatgtctttattgaagagatttttttgggtcaaagattggatttttaacggaaattcgcggtttcttttcctgtctttttctcgggaaaattctaaattctaatagaaaaagtggggtataggggatgtaggatccaacgtgttattctcggaatatgtctaatgattgcgtcactgatagattaaactaacgaatcatagagcctttaccaatcaaaattcgttgcatttttctgatattagttatatggatttgatgagaaatagtcaaatggatttgggcagcctttgtttagtatggattaccactttctatagtttccattgacaatctactatgtagctggagtctttgaactttattataattctactatgcattattggataatcattcgaaaaggtctgagattttgtctctttgtgtcaaatctggtggatggtgaccctttgattcttgttgaatactaaaaggaatggtctttactgttttaaagtcctttgggttatgctacgttttactgtcttttaagttccaaagaatgcatttgttgttgggatgattgcaatttatgaactttgacttagattgtgaacttctgcaaacgtatgaatcattaatctgtttgacttgattttccaatgatttggtggtttacagattccggaaatatggcagaaacctgaaagtggaaattatcgccagtgtgcgtcacgtcctaagaaccgttcaagtaattctagtgtcttgcatttcctgattctttaaacatgagttgcagtttctagttttctgaaatgtgtgtgtgattcagggctgcgtaggaaaaccaacggttatcttttagtacacgcgaatggcggattgaatcagatgagaactggggtgagttcatgtccaagcattttacaaagatttgatctctggtgtttcttaccttcctttattgtgtttccaaatcaaatgcagatatgtgacatggttgctgcagcaaagattatgaatgcgactcttgttcttcctctactcgaccatgaatctttctggactgacccgaggttttatctcatttactctataacgagatattatccaagaaaagaagtggaatttgaagagatattctttgtgatttgcagtactttcaaagatatttttgactggagacacttcatgaacgtattgaaagatgatgttgacattgtcgagtacttacctccccgatatgcagccatgagacctctcctcaaagctcctgtgtcttggtccaaggtctgtaccttgtttctaccattcctaaaaacagattttaggggcttttgtggttaaaagttttgtgcttttacgcaggctagttactacagaagtgagatgttaccgctcttgaaaaaacataaggtgataaagttcacacacactgattcacgcctggccaacaatggcttgccaccatcaatccaaaggctgagatgtcgtgctaattaccaggcattagggtactccaaggagattgaggattttgggaaagttctggttaataggttacgaaacaacagtgaacctttcattgctttgcacttgaggtactgtgatgtttctttttgcatcctgcatttgcatttttggggacacaggtttgtttaaaaatgagaatttgaaatgcagatacgagaaagacatgcttgcctttacaggctgcagccacaatctcacagctggggaagctgaagagctgagaataatgaggtacaatgttaaacattggaaggagaaagagattgacagcagagagagacggatccaaggcggttgcccgatgtctcctcgagaagcagccatatttcttaaggcaatgggatatccatcctcgacgactgtatacatagttgctggtgaaatatatggaggaaacagtatggatgcttttcgagaagagtacccaaacgtctttgctcattcatacttagcaactgaggaagagttagagccctttaagccataccagaaccggttagctgcgctggattacattgtggcacttgaaagcgatgtttttgtatatacatatgatgggaatatggctaaggcagtacaagggcaccgaagatttgaagggtttaagaaaactatcaatccagacaggtttgaatcaatcattattcttctttttgcaactgcctttaactttgtttactgatatgaagtttgtgaatggcaggctaaattttgtaagacttatagatcatttagacgaaggtgtcatgtcatgggatgagttttcatcagaggtgaagagattacataacaacaggattggagcgccatatgcgagactgcccggtgaattccctcggctagaagagaatttctacgcgaacccacaaccagattgcatatgtaacaagtctcagcctgagcaacttttgaaatcaagagagtcagatagatggaggaagagtgcttcaagatagaagaaagaaacacagtgaacacaaatacaacaacattgattcaaaccttttttagccttcttgtacaatataggaaaaagaagaagacagatttcttggaagatcattacaaatgtgtagaatccaattccaccatacagaagcatgaaagatatatagcattttttttccctttgtgtctctcttcagagaagcttctactagaaatccaaatagagatatggttgatcctttgcaacacagcatgatttgtgtttttttggatcaaacattattctttgtatttgttgttattagagtgacttcattgtacatgagagtccggattataacttatgatatacatggtttcttgatcacaaaatcatttgtcccacagagagccaaagggaactttttaacttatgttttgttttcaatttcactgagccatgtgatcgggtcctgaccggaatagagtcaaaccgggtcaacccggttatggattttttcttcaatgatggttaaaaaagtttagaatgtgaaaaacagatatcgttggcttcgtctcttcaacaagatctcaaatccgattttcatcacctgtaagtatctctctccaactgcacatttccggcgaatgacactttcccggaaaaaattgaactttttacttttgattcagctatcaatttttttgatgaaaaaatcgatccttttgtttttcctcttcttctggaaatctggtcacgagatttgggttttatttcttttagtgagatcaatcgatcagcttgcttgaattttactataatcttcgatctttcgatgaaattaaagttaacgattgttggtaatcaaattgatttatctatttagacaaggagttggatgacttcagtttctgaatctagtatcaatttgtcttaagaaagtgaatccaggacatagactgatcaacgaaatctgttttatccgattctgcagatattgaggacaggagattctaacaaacttgagctaaacgtcaagtttcctttactaggtatgcatttgctctatattgtataatctctcaaatttcacattctcttagactaagaattagatatgatggtcttgtttaatagcgtccaaggctgatctactgtcttcttcacatagaatgataactaaactctcataagcatccaaattttgtgtttgagtttcccatcttatgagagaactatgtgtctaagtcttcttagctttcttgctattatggagttgcttgtgtgattctattcctgaggagattgttacttggtttgatggtaataggtgctctgagttttaatgcaatttcaagacaacaactgaaagacaggaaaacagttttgtctttcaatacaccaaatagataactaggacctgtccagatcactgtatagcgtcatagtagtattgcaattggttcttgttgattaatgtgttatactcaagatttggccttgctaccttctttgctttcttctgagaacgtttaggtacaaagctaagctaagagttctttatttttaagaacaccaaatattcttgctattttggagttgcttatgtgattctatttcctgaggtgattgttacttggtttgatggttatgagtggtcttgagttttttttttgcaatttcatgtcaacagtgtaacactggaaaacaattttatctttcaaggcacacaataatgaaaactaggacctgccctgatcactgtaaagctttatagtagtattgcaatcggttcttgtttattaatgtgttagattcaagatgttgccttactaccttctttgctttcttctgagaacttttagatacaaagttaagctaagagttctctatctttcagaacaccaattattcaaaagcttgatcacttgcatatagtaccacaaatgttccatgtttacttaacactgtatgttaccaagagtatatgttaccactcttgccgcataagtcttgattgttttctatcctctccagtttccacagagaaatcatggggttctggacactaatggaaggattgctactatttgcaaacgcactggctatcttaaacgaagaccgttttctagctcccaaaggatggacgctcgcagaactccaccaaacgggcaaaagaaactctctcaaaggccaaatcattggtctcatccacgcctgtcattacatgaggcttcctctcatgctctttaacttaattgtcattgtctttaagcttttctctggttaaaatgatcaaaccccgtttttgaataaactcaatccaaacatttctgcaacttctttagcaattcattttatagtatttaacttcaaaagctcagatttgtatacattattgttatgcttcttacaactacaaacacagtgaaacaaaataaaaacaagttctttgaaaccaaaagcaggaaactttgaatcaaattcattcaacaggaatcatgacctcattggtcctaaacggtggtaacgtccatggaggattatacctagcaagaacgaaatctccggtgatcttaaacccatctttctcaagatgactactcagcttcttcaccttctcactcaccacactctccgacgctataccactaaacttaatcacaccatacttcctccctccttcctccttaatcacaaccctctcatccgttggacgtggtgcctcctccgccttcttatacatcgacggcaacaaaaactgcatcgtcaccaacttcttccttccttctccaccaccttccttagttacaaccggagaagtcatctcaatcttctcactctccttagtaatcaccggagcagtcatcgcaatcttctcaccttccttagtgatcaccggtgcagtcatagcaattttctccggtttctcattctccggtttgccaaacacacctatgtacttagccaaaagctgaaagcctccgtctttatcacctttgaactccgacgcatcgtatgtaacctccgccgcaaccgctggtggatattcacggatctcataaccgtcaccggatttagtcaccgtgtatttaggagtctctacagcgattttaccaaaaaccattcccattatgtaagttttaccaaaaactattctcataggagaagtagtatttatcagtttggttctttcggttactaaacgcaaacgtgtggttagcatttgacaacgtatgtgtataaaaatatttcaatttatttatagaagaagatatgataaactcaaatcgaatttttggctttttttgtttgaaaaatcagagacgcgtcatggttaattatttgctttatgactaaatttacagaagcagtttgacacgtttctggtttttgtggttcagagcattctttcgttacgtggaggttcaggttacacgacaaagatgagagactattctcggtggtctaaaaaacgactttgttttagacaaaacggtgcgtagttgtttttagaaaacggcaggtagtttgcgtctcaaaggatatatctgttaccaaacagaagagtagggttttgtcttcggcggcttatataaataattttctcgagccattgaatcttagaatctgttcgtcgatttgtctgattaagctagggttttgatagattttcttattcgatcttgttttcttttggtttatgttttgataagagagcatcggtgatgaatccatgaaaaaattgttatccttgcactttgattgctagtgaagaaacaaatggggttttcgatgtctgagatgctcattactttttttgtcttctttgctcgattttgcttcgtgttagactgttaggattggatcgatgattgattagttaaaatactgcgttatctttctgcaaatctcctataaggatttgaagacaaatcatgaaaaacctgagatccaatgtttttcaatcaattatccaatgtttttcaatcagttgttttaaatctggattggttgatggatagaatcagatcgatgatgtcatattaaactgcgttatctatcttaaaatctccgaaataggagttgcagacactaaacagaaaacgctgagatctgatattagcctaatttcaattgatagtgtttatgacaatggcttgttgttttgttcttaatgttagtttttggattcttaattaacgagtagtgtccgaaaaaaaataaaaaaaaataaaaaaaattaacgagtagtgttatactgaacatattcataagagtaatgcattaatatgattggcgtgttcgaaagaagaaaaaaaactgcaacagagctcggctgatgcaaattgtgaacttgtatatgattgaaccaaacctgactcaaattaagccctttagttaggcttttgattgccacaagcacacaaggcacaaaagcgcaagccaaaaaaaacaaaagaaagccttgttgaagaaaacaaaaatcaaaaattttgcaaggaatgatcgaacccatgaactggttttcttactctcagcaccttaaccagtagaactaactgcagtttcagaaactgtagtgtaagaatgatttatcaaaccagacagtacaaagtagttaaacccaaattacataaatttctaccaaagttatcaagataaaaaaaaaccatagtttaaattgaaccgaaattttgactaaagttatccagataaagaaaccaacgaaccagccgaaaccagacggtccaaaatagctaatcgcaaaaatcttaaaatcgaacggttccataacaatatatggttttccaattttgtcccttacaaaaaatttggcatcacccgccacaagaaatctcccgggaaaatcgaaataaaccgttccaattccaaagcttctaaaatctcccgctagtcctttaccttcttcttcttcttcttctaatcaacttctctctccctctcctccgcttcttcacattccgatcattagtgttttcggagaaatggcgagatcaaacagatccaagacttcagagcgtataataggcaatggtgaagttactccgattcaagtcgccttcctcgtcgatcgatacctctgcgataatcgcttttcaaaaaccagatcacttttcagatctgaagcttcttctctcatctctaattctccagttcgcgaagtaagcacctagagaaattcccaattttccaattccaaaattcgattcatctatttgtgagagtcttatagttttctgatttcgcaggttccgaatagtttgttacctttgaatgagattttaaacgaatacattcgtctcaagaaggagaagattgtgatggatcaggagaaatcgaaactggatcaagagaaaactcgagttcagaatctattgaatgggatgcaagatgtgatgaatgcttataactcctccaccgccgcagctcctcctcctcctccggtgattacgtcggcagctcccatggataaacaagtagttgcttctacttctaaacagaacaatttcggcgtctcttcttcaggtaattgaatattactactgcttttggtttattctggaactaaattggaattgtcactatcattaagtttgtgttgatcttgattcccacatgctctggtttgtgattgaagctgttatttggttatcattgattatggttttgcaattgtgggttatacacagtagtttttgctgcaatgacatagactttagacttggtcaccaaaatcgccacttggttgatttgttttccagatattcttcattggaaggatggttgtataagttgatgttatcaggaactaatgacatgttcttatctccaggctgcactgtgtacaatacacaaaatgctatgacagtatcattaccaggaaacaaaagagttgggaatttcacaggaccttgtatcactcagtctataaccaaaaagagaaagagtcctgaagtttctgtaggagctccttctgtttctaggaaaggtagttgtactaatgtttattcattatatacttacattgatgtgatgatgatacctttaagtattcattatccttaaaacttattttgtcttcttgtcttatactaggtatgaaaaagatcccacaagctgctaattacttgacatttcaaacaccatctgaaatgcaaacgccattgaacaatggtgtagctactaatgagtcgtctgatcttacatcaagtgtggcaaagtgtttgtttgacaaatcaggcacgtctcctccgagcaactcaacttgtcctaggacaccacaacagaaagtatctcctcagagtgataaagaagtgactcctacaaactgcacaattgttactaaggagagaatcacagtcagtcctctcaaacaaattgcttcttatacagtggagaggagccatacggtttcttctttttcgccagttaagtctaatctgaaaatgtcgagtaaaagagatcatgtgaaaggaaggctcaacttcgatgatactgaagccacaatgcacttagacgcacctgccactgtggatatggtttcaacttcctcatctggctctgaagcagaagctgatttatttgacattgatttttccaatatagatcttctgagtgaagacttttcattttcggagctactattcgattttgatattggttgtgaagaaatgtcaaaccattccctaccacagccatcaaatttccacatagagactgcttcagggtatattcttctctttggcttaataactatctgaaaattctaattatctactatcattttacttattagattcaattctgtatcacaggtcatctcctgaatcaagaaacacgaatctagagcctgaccaggttgtatcagagtatacatcaacagtaacagaaatgattcaagggaaagacatgaacacacaaggttggtttagtccaatcttcacgtaacattttaaatataaaactcctatagctgttttcactgataaactcttactgtttcaatttgcaggatctgactctatgactactgtaaagtccataacaaaatgcctacgaatcttaagtcctggtaatttctctttctcatgcactgtgacataaccataccacagatctcagtatgtatcttttcttcctaacatgacaattttttcttctatctgcagccaagaattgcagacagagagtcacacttgactgattcgatcctccgagttgtccaccacgcttatatgcattttgagagctaatcaacaataacttagaccttttgcttagctcttaactagtttataaatgtaagttaaatacattattaattatttcctcttagtatagtagttctgtagctcaattctctacttgactattgataaaagtagaattaacttgtaatttacagttcatgtctctctatttgatctaccaccaaaacttatctgaatcaaaccaagtacgtacttgtccagcttctccactttttattctgtccacctaatttgggccaccagccaaatgtttctgttgaacaaaacatatcattcaaatacttccagtttctggtcttgtgtaaacaacttttccagttttgaacatgaaactgttgagacagagcaactacttgtcttgtccttttcgatgtttattaagaaacaaaacataacgagtcaaaaagataagaaagaaattgggcagaaaatatgagcaacactcgtacgaggtgattttaacttaacctcatgtgtcctagttatgaaatgtatgtaagaatttttcacattttggaattttagatttaataattgttttaattaatattttaacctcttatacttgaaaaatgatttgcaatgagtctaatcacatcaagtataacaatgaaaacttcttattttttctttagattgtgggttgaaaattcactcaagaaaaaattatttgagttctataaagaatgatgaacttaattttattttattttgatgaacttattcttagtgaaaggtattcaatatttttgtgtgtgtgttaaaaggtatccagtcatactagtaaaatattgaatacgaacaacaaatcatcagagcttcatctcatgaatttgagttagtacacactttatctcctcccttgggaagataatgaattttatacttttaaaaaaatatctgtcatttggatagaagaaaattccaaatataagattcaaatgaaacaaaaaataggtatgtcttgtcattagaaccagacccaccaacttgataaattgttgtgttttttattttccatcaaaattcgttttaccctttttgtttctttctttcaacattttgacgtggaaaatgagattcctatttctttttagttttaatttgtatggctttaagaataaatagatattccttgcttgtttgaaatatctttcttcgccataaaaataaaatttaatctacgttttagatctgttttcttggattgctaacattaaataatacagcttttttgtttgtgaattgatagaatattacaccattaaattcattaaagattttagtggtatgacattcataaggttgtgataaatccacttgtggatgaagtgtttattgaggatgagatttaggacccaaaaaattcaagagaatctgagagtgatagaaaaaattggatatatatgcacatgatgttatagaccttatggtgtaaacacataatagccatatcttgtttctcaaaattgtgtttggcgtaaaatagatcgacattaagttgcagactagcgataatgaaaattacgaaattatgactatacgatcaatttttttgtttgtttgaaaaacacgttaattatcggtaaaggattctagttgcaagaaaatatgggtggtgaagactgaagtgaaaaggataatcatttgagtaaacattttaaagtcttgacaaaaaaaaaaaagtaaatatttcaaagattacttaagtaataattattttatggtatttcaaccagaaacgaagttatggtaaatcacgataagtgaagttaggagtggacattcgggtatccgttcgggtatcgagtcttttttttgggtatcgggtctattcgggtaggaggttgagaaccattcaggtattctaaaaattcgattcggttttggttcgggttcgggtcggttcggttattttagtaaaaatgtaaaaataaccaaaaattacccaatatatttttgggttcgggttgaattcggtttttttactcatatatactcaaatctacccgaaatatccgattacccgtagatatatttgttactttttatataaatacaaccaaatgtaaccaaaatacttaaattacctaaaagaaaactataccatttgttacttttatcccaaatatatccaaatgtatatgaattactaaaaaaatctattttaatcggatttataattttaattttgggtgtttgagatattacaaatatatatataactaatatatttatgttacatttgtattcggatactcacgggtattagattcggttcgggttcggttcgggttttttcgggtagtgaggtcgaggacccattcgggtaattctaaaaatcggattcgggtttggtttggttattttttgggtttttcggttcggatattcggttccggatattatgcctatgcctaggtgaagttattcaattcaagataaagatataattttcttttctacagaattataaaatcaattttcaacaaagccttccacagtttgattaccggtgttttatatacatacaaagaatttcctattacataacttttattggacaaccaattcctacaaagagatgactcaaaacaggagagtacgtaccattttaaaccgtagattttgcctttgtaccatccaaaaatcaaagataagaaaacaaaaccggctgtgattaaaattggtcggaggcgggaatgagtcaaagtttatccaaaacaagaaaatatacattgtaaggacataaatacccctgtatgattccagttttagtaagaatcgaggactcaatcgggttttccgttgtaccatcgaataaaaattctttaaatttttgatataaaattcggtacaagctgagataaataaaactcgttctctctctttttttctttctttctctgtttaatgtgtaatctctaagaatacttttcattattaattataaatttattcttcatcttgtagaacaatatcttcttccttaataataatttttttttttcactttcactctgtttttagcttattaattcctgctccatcactactcactcactcctcctacaatttcgttactcaatttttattatattttttgtaaagaacaccaaatccaccaaaaccttacttccttaaatcccttcaattctattctcatttccatatttatttatatactttggcattgtaaacaaaaagaaacattcattaggcaaaaataatgacgactgacatcgatttagaacaaggaggagcttttggatatcaccggaggtcgttggacggaagtgacgtcagcgtatattattcagacggtgaagatgtgatgtcatgctactcttacttctattcgacgactggaggatcgtatgaatacgaaggagatcagtcgaggaaagtgtcgtcggtgatgagtccctcgtcgtcggagatagatgatgatgatgctacggcgccgccggagaaagattgtcggatatgtcatttgggagtggaaacgagcggtggaggtgcgattgaattagggtgttcttgtaaagacgatttggctgttgctcatagacaatgcgctgagacttggttcaagatcaaaggcgacaagtaattttactacttcttttttaaaaaaatattttcttgaattttcaagttatgggttttgattaacttgatcataattagtcttgttacgattcttcggagatctttttttgtgtgtaaaacttttattgacttattctttaataattaattttcagtttaaggaatttgtcaaacttttttttttgtaaaattggaacatgtgaagcttaaaaaaatgattgtaggtaaaccactcaaaattcactgttataataccttcatttattttatttttatttttttgcttttcagagtaattatgttaatagtttaggaactgtaaattatttacatgagttctaccatcaaaaagcaaaagatgctaaaagcgcttaaataatctgctaaagaattctcagccatttaagcacgtaattttctgcgacaaaaaaagagttgatcataattatgcaccggagagttttgttcactttatacaaaattaacgtatttttttgaaacagaacctgcgagatttgccaatcggtagcccggaacgtcggcggtgcgaacgaaatggttgggtcaacgatggaagagagggagttgagaaacggtgaggaaacagcggcgggagaaggcggaggagcaacggtggtggagaacagatggcaaccacagagagtggtgaatttggtgttagcttgtatggtttttgggttctttatatcatggatctttcatttccatgtttcctcttcttcttgaacccataataatacttacggtattgcaatcaaactacacactttactttaaaggatgcttaaagctttagagacaacatcgtctcattaaagcccaaaacggttcctagtaacaatattgaaataaataaaaccaacttgatgcaacaaggatgattacttggggaataaggaactggacaatgtactacgagtctacgaatagcatttgcctcaacttctctctatcattgatcttcttttctggaaccaataaccaataaactaaatttttgaccccacttacacaagaatcttacttactctaaatactataaaatataaatcatctataaattataagagttttctcggaggattattttgcaactaaataataatataggctttatgattttgccccaaagaaagacactaggtcatcgtatgatatgacattattaaaaaaaaaaaaaaaaaggtgccttgataagagggtttagtagcagccgctgacaattttcttttcctcaaaacagaatgagtgagccaaaattttagaaaagaccggtttttagtgaaaatattctctgatttatatatgtatgttcaggtattcgtagagtagttttactgatgttactcagagggatagaattttcacccggtaagaaacattaaacctagaaagataaaattttcattttgtagttgttgttacaaatatgtcagttttttttttttttttctgatattagcaaaaatctggagtaagaatactattggggctgatatgagcaaaatctagaataagagtttcattgtcagacatacaacctacctgaccatgcatatcattggtggtgctataacctaccttaccatgcatatcattgctggtgctattgatgcttgtggttagatactacaacatccgaagactggagtcttgaccaacggaaatcaaccggctagaatttgctgcatcaactgttgctttgtatacttttctctaagtgcccttgaatgtcctggacagttgttgctagttttttatcgatatgttgcagcattatttatgcgaagagttgacgacccttctcatcagtctcttaaccctccttatcactactctctatttcttactgtcgaagggacaaatgaaggttcttcttattattttttttcatattcctcttcttattcttattctttttcatatttttattctgtatggcaaatcttttagccaacttcttaagattcctaaccgcctatgggcattattagagtcactaattacatatttgggtcatactagagagtctttgaattatttgagtcttattaaaaacaaatgttcttagcattttgaacattcgactatgtgcaaagactgaacaagccactaaccatcaaaactaaccaccacaattactggtgaaataattacagcaatatggaattatatatattcatatggttataacaaaaaattttaaaaaaatccataacattgttggtaaatctcaatatgttaagtaagagattttacatttatcactaactatattgttaacctttcggtttatcatcctaattaggaaaagcttaacctaaacttttaaagctaaaacttaaattctaaagtataaccggctcgaattcaataaatcggttgataaagttgtttgtatggtattctctgagtggtctttcatttctcataccgttctttctatctttttatctatcttctacaccattgctgctaagcgttgaagacctttcttatcaccctccttatcaacactctctatctctgtgggattcttctcttttatcttgtgttctctggattttgtattttgacttgaaggttgggtgttggcttgctattttgcctgctgaatggccagtcttctagccttcctcctctggttcctcctcgcagtttccgttagtattggactcttagctgctcagcaagagggtcatgatgatttccataggaaacaacaagaaccgaatgtaccgaaccgaaacaaaaataaccgaaccgaaccaaaaattgaaaaataaccgaatggatagtaaattatataaccgaaagaactgaaaccaaatagataataactgaaatattttgggtaaccgaaaatatccgaaatataaatatattttcaaaaatattagttatttctatactaaataattaaaaaataatcgaaatatatataaaatagtaaacatattcaaaaataaccaaaaatatccgaaaatatctaaaaataatcgaaaatatctaaaaataaccgaaaatattcaaagcaaaataaccgaatggatattaaattttaaaaccgaaagaaccaaaaccgaaccgaactttcgatataaccgaatggatactaaattttagaaccgaaaaaactgataaccgaatgaatataaccggaaccgaatggataaccgaatgcgactaattatgggtacaaaatttcactttctttgatcatacaatgagtgaggcaaaagaatttggtcaacgaaacaaatcatagaggtttctaccactgtaaagaaggctaacaacattcttgttcgtcttcccttttcccgagactcctcgaaactcagctagtcacctccgcactcttgaatcgttataaaaccaacccataacctcctcctctcccgtgctggaaaaacaacaccgcataactcaagatccgaatacaattgagacttgatctactagaacaaaagaaacaccaattcttgtctacttaatgactcaaaataacaggacctttacccatgtaattcgagttctagcaagttgatgatgatttttatatagtcatgtaatcatgatatattttatatagttgggtatttgttttttttttccacaatatagttgggtatatatattaatatcacagacgacaatcatttgtgggttgccaattccagaaaaccggagtggcacgggctaacaatatccatgactactgttgtaaagtctataacaaaaaatgcttacaaggaaatcttaagccaagaattgtgatattttcttcatcacagcagataaaaactacacactgttgctgtccatcttttcatataattagatcttttcacgcgccattcattgtgttatccgtgtgaactccgttgctgtcaatcttcccgttcacctgagccctcggtctctacaacccgcaccaacaaaaaacattttaagaccaaactattggatttgttcagattaagaaggagaacaaacacagatgcagatgcgtacccaatcagcagggtcaacaccgtttccattcaacagcttgtggttctcttcttttgttctgtcttttgagattactgggagcaacacagcagtccgatctggtaattctgtggtattgacgtttgaggaagatatgagaaaccatgtctccgcaaaaataagacaaatagtgttaagcttcagtgaagaaggttatgagatcaaacctggtaatttcttgtctagacagaacaccaccaaattcacagtatacctaaacagtggaagaatcaacacaacaagtcaatatatctctctgtattcagtgaaaatgtttattgggtcagtttttgtgtgatagtaaaacataccatgcaacaactacatcgacactgtaatgtttacgagaggcaatgatcaagaggctctgcacaattgcagtgagccacccaaacagctttatgaacctgagatatgggataaacaaaagaatgatgcagagatgtgatttacagagaagcctttaagatgttgccaaaagaagttttaccttttagtgccatatttctggtaagtacggacaaagactagagtgaatatcatgtgcgatgagaaaatcaggtctccgcatccatacatcaccccatgagctgatgagatcaaagtcatcacatgagaacataaacaaacaaagaaatgcctgtaaacacaatctaggactggggaaagagaaatatgtagtagactcacggttaatctcgagaacctcaagagcgcttttgggccatggcaacctagaaactttagagccctatagaaaaaagtgcgcaaaattaagcttaaccgattagacagatgagacattgtgtatgtacgtatctcagttgatttacctcacggcagtgatagttagggccaggaagctgagttgaatagaaagttataacacggagaaactggcaggcctgaaaacagaaacatcaataaacttcaatattaacaagacaaagtaatctcaacaagcttaaattatagttctagcgataactattaaggcaggaacttacaactaagaatgctagaactctgcaccatatcaaaacggtgtatatctttttggttttcagaatgaatggatggaaagtccactgcaagagagaagcacaaggagtgttaatatcgaaatgtactaatgtaatggctgatctgatacaaaaactgtcacagtaagatttagctattactaagaacatataaccagaaagagagccaaatcgtacataaatcttagaatactgaggaaactatcaagaatcgaaagactcaccaggaaaaacgaaagaaacacactagtgaacacggtttcacttatgtagcttctctcttgaccaagctcctatacaatggaaaaaccaaagcaatagtaagacatcaattctaatccgatgaatagtgaactcaggacagagcatatagctaagctgataatatatctaagagacaaaccggaagaagaaagaagccaagatcctgaagtgtcggtcccgggcgatgaatataatgaactcctttagcagctaaaccatgaatgtactgcacataagaaactcaagatgggagatgctacattgttgaactcaaaacgaaacccaacacacatgtttcagctgagaaagcaaaggcacaaactttctcataaaagttactatgtataacaattaacaaaacaatcataattacaagtatcctaagttttccatttcagccatcattaaacactcatcataagaaatatcgatccaattattctgaaatctacaaaagctctcgaatctaacatatcaaagttctcagtaatgaatcaaagtatagagttttaagatggtgaaacctgacagataagaccagcgagaagatatttccagttctcagcaagaagaccaatctccgtcgatatctcagagcaaaatctcttccatagctatcaaacaaaagagcccaaatcagtcaaaaatctgaaaaacccaggattcgacttaggattaagagaaaaaaccaacgaaccttggaagattcacgacgaatataaagtgtcatcttattattcttgtttgttgatgatgttgttcttcttgtattgtgacaatcagttccataagtatacttcacaccccaacaaattgggtcaacatcatcaaaacactcaaccaaaatcgtacgtaccctttattaaattatatactctctcgagcttctcaccggaaaaaaaaagattggatttttagccgaacccaaattcgacggtcaacgatcgagatggtcgtgaatccaagatctgagaataagaaataacgagaacgagagagacgtaacgaaagaaagttaacaaagagagatcgaagaagaaagtttaaagaagattatcaaaagttttgaagtagagagaaaagcgaaatttttctttagaagaatctgagaaatgaaggcatagattaaaaaggcctagagttcaacacggagaaacggttgaattgaaaattattatatataaaaacaaaaaaagtataattcaaaccacgaaacgaaaattagaatttatacgaggaaaaaaaaagtttctttatacgaataaaatgtttagctaattagactaaattctccaatattaattatcagaatttatatattacaggttgatagctgttatatagtgagctatatgatttttataccaaaattagagagtagtgactggtagaaattgtaggagtagaatatttctgtaaaatttgggtgtatttagctgttaattattcatttttgctattaatttaagtattgatgaaagcttaatggatgtgtaacaattatcagttgttaaattagtatatgaatcaacttaacaaactgtaaaatacatgagtataaatgaaatcattcatggtggtctaatggtagatacattcgattcaatactatttcaaatatggttagccattctatatgatttaaatggtaaagaaacaaaaaagaaactcagctattaaagtaaattttgttttgcctttttaagaagtaactatgttagatcaagtaatgaaaattgttgaaggcaaaatgtgagccgtgcaaaacaaatttggctagagagactaatgaaagaaaagtcataaaagtctccttaggaaaatatcaaaaatattgaaagtcaaatctttcaatgattcaatcaacccattaaattttggtgttccagttaccatcacttgttttcaaggattgctagcattttggccatttttggtccgacaagcctcacaactttggcttttatcttcttctcattattttttcttacatttctttgctactccaaaaaaaaactcccaataactgtcgattgatatgtccatcacagtaagtctttcatacgttttcttaacctttttaaaaattcatttatcttaaaatagccttttgattaagcagacttgtattctagaattctcaaagagaactttagaacaagtgtactcatttattaaattattgtcagaaaataagtatgatgttactatcagcattcaatcctattacatgaattgattcatatcaaacaagtttaatgcacgttaaaatcattttcactcatttcgaacctttttttttcttttacaaaaagttcatagtaagaagaagtttctatgtaagttttctttttcaggaaagattctagaatatcatattatcagtcccagcctgtgttttgttttaaaagagtctttttcattttttaaatggtatgcaaatttggagaaaaaaaatttatcttctaagagaaaaacctttactttataattttatatgatcaatttatccgaaataggaaacaagtggtatattcaaaattctgataaagagcttttttgttcagtaagtaaaactaaaaagtagtcagtggtcacgagatgaaacccaccaaccgttattgacgctttaatttaaaatttcgaaggtaatgtcggggtaaccagagttaagtaagtggccaatttgcaaatcttaacaaaacttaattaaggtttaactatatctaattgagaaagaagaaaaaaacactacacgtggaggaatatgatttggagaagcatgtgagtacgtagggtaatgcagcgaagcatgtctgtcaaatacggtttcttcctcacatgcctctctattccttttatcatcaaatactaaaatctaaaatagttttgattcaaccgaaaaaacgtctcgaaatgagtttttctgaaaataatttcagttcgatttttttcaaaggactataggaaaaaccataagcactatattattcataaatgcatttcactattttgtacattacccaaattctaaacgattaattatgccatgtaattcttaattacaattatattaaagcccagcccaaaccagatccaacactgtctaagcccaactctctctgcctctagacccgaccgattggagaaaccggtgggttcgttgcgtacttcgccggtgtttctctctttaacagacaatctccgatcacaaccacttcttcttcttcttcctcctgacaccaactctgatgactagttactgctaacgaaataaagaacgcttccaagagagagatcgatgagccaaactcaacagagtggagttcatcgccgtggctcaccattttgaaagctggctcgtctctttcctgtgagaatcaaatcaaattgttgaaaaatgactcaaaccatcgatacccgaaagctgcttgaagtgaacaagttagtttacctgatcaaacaattgaaagcttgacaaagtttgagtctttgtatgattataagacaggacacggagtttgcaaccgatgtcccaaccaccgcagtcacattctccaccggttttccaccggttaatcaacgggagaggagaattgttaccgtctttaggcaatgtgtgaactccacttgggagtattattgtagttgtgtttcttgtctgaactattgctgcaagctcttcattagtcgagtcaacaccgaacaaaacagtttctgatttgtggattgatgaatctgaagtaaaagtagtaacagtcttcatttcgccgatgattgtatgtacaaatggatgttcgttcttgtggcggcttaaccagtttccggtcttgttctttacttcgttgacggtgtacaatgtgtaagaccgtgtagaagaatctgaactcttcatggtagctgcgagaacattattgctgttgtctccaacaacgaactgaaacagattgataccttttctcaatgtgaattgtaaaagagcgtgaactcttgagctgctttgcttcttttccttggttggtggtcttgtgttggaaggttttgaagccacttgtaatgatggtacattatttttttcggtcttgggtttcaatataggacctgatctagttctgttgtgaccattagactttgttctggtcgagtgagtggtgtaaactgagttggtgaatgtcaaaggacctgatttagctgaagcatgagatgtgcttgacaatgacgatgagctttctttggaactgaaacttctactcatctgactaaaactgaagctaaaccgcctgttaggtgaaggatctctttcctttttggatgacattgtgggaatgttttgatccaacaagcatggtttctcttggtttctttccatcacactcaccggacttgaacactcgccttctacatcatgccttctgtcttgacattcaactgttctaaatttctctgatcctggagagatacacgagctaagctcagaggcatgacttagttctttctgcttcatactcagaagttgatgctctcgttttcccttttgatccactctcatcactgtatcagcatccgttgcatctgaaaatgcttgtgatctaactgagaaactctgattcctcatttgttgagacttcgaatctacctccaatcttttgacaacaccggtcgataaatctagctccaacgaacttgcagctgtttccgcgtaactacaacacgcttctttggttccatctgcattagtatccttccatttctcaaactgtttccaatccaaaaccccaaaactcagcgcctttccgcggaaatcttctttcgttcttcgaagataccttggcggatccaacatatcatgcttcaccagctcatctttaccttgacacaagggatgtctatcttcatgaaccttagaggctctttgttgcctcaccatagtggtagaataattaccagcaacctcaaagcaatgactctatactgcattcagggactaaaccaaatcttagtttcttcatccacctttacactaaccactctgcaataacaaagacataaagtttaagcataaaaatatcactagagaattcattggaattacacaattcagtacttcatactcaattcttagcaaaagctaaacagtctcttgaagaattgaggctctagaggatatcagtagatcacagatctaactaaaacttaggagaatcagaaacctttgcaaggaaatcagcaaattttagcaatgggatcaccaaagaagaaagagaaaggaaaacgaaattgtaactttcccttttctttttgtcactccaaaccaaaccagagagaggaaaaagtgggaattagggaccacttacggagaaactcaggcagatcggagaaagcagtgagaggaaaacgaaaaggttggagcgtggtggcgcgaaatcaaaaggtagaagacgaagggagatgaagaaacagtgtttgaaggattctgaccgaagcaaagtacttaaaactgccactgaagtccaaacacttgagttttctgttactactggatttaattctttattaattattccactctctcttccgttaaatatccatttttactctaatttaataaattaaaatatttaaaacatttcttatagaaataataattttagtgcaagttttctctagtttactgaatttggtaattgtatcttcttcctcttacatttagttagaggatttgagtaccttgtcgtggtgaaatctattggatgtgattatcaaatcggggtggtccaaaggtagtgccgcatgaggtaatgagtaagaaagctgacagtgatttcataggaaaatttggtccggctaagatataactgtttcgctatctattttttttttgtgtgtgtgttttgaatcattattgaagtactgtttcggctgaagaacaaaaaaatgtatatagctacatgcccttaattgcaactgaattgatgttttctctttataggtgccttgacattaagatctagattcaaaaccaattattcaaatatttatacactttacattaataaagtgaaatttgaaatgcataaaaaaagcaaagtgtagttttgaaatagttttcactcatcacaaaagtttaaagtggattatacttgagttggaatatccgtataaacaaaggttagatgatggaaagtggactatacccattaaagatcgttctcctcaccttcaacgttgctatgcttcgtgcatccaagtcttcaaactcataatcttaagttttttttttttttttttttttggttgtttgttttttgtgtgttcgcggttaaacttgtgaaatagagaacgtggcctagtcggtgcccgccataagcatagacgcatagttgtttgtttcttggcaattggcatgggcaacattacactcttccatcatgtgttaaggcttctctcgtggaagaacgcaaacttgacgtaaagcatataataataaattggataagtttaaaaatgttctgttgaatcgaggggatcggattagtatttagctcttgtaacatgggctagctcacctttatcactgaaaattttatgtcactttttgttgacataatcaaaaaatttcgtatatcgactaatcatatgatcgattgttccctagtctaaaaacaaattaaccactagatagcctagaatagattgatgattatttgaaaacaagcttggggaaataactaatttacttgttaagtgaatcaaaataaaattactggtttttattagcatattttatttaatatttttattattgcttgcaatagcttgtgataaaatttatataaaaaagcaaagaaaatattctaacgtagacaaaaaaacatattaaaccataagatactttacttttagttagctagcttagcttatgatatgtgcatcaatgtatttatatatacgtttaaaaacgaattttgattacaaatatacggccaaaaatagtttattgatggacatggtgtagcttttcgaaagaaaaatccgacaatcaaatcttgagtttgcttcataacatgaacatagcatataatttagtaggaccagtctcttcctctcaagacgaaacactttttataggcaaagactagcgagtctcctatttccactacgacaacgacatcccaattctctttttacaccaaattaaaggagatgttgtcgagcaaaaacgttgtcgtagtagaggcttggaacaccaccaccacaacgcaaacgcaaacgccacatagaccgtcactgttacacccaacattctattggggttacaactgccaagtgctcttctcaggctggcctggttctgaccgtgggatgtatgcactcgcacttatcttcgtcttctttctggcgttcttagctgagtggcttgctcggtgctctgacgcgtcatccatcaaacagggtgccgataagcttgctaaagttgcatttcgcacggctatgtataccgtcaagtccggctttagctacctagtgattctggctgttgtttccttcaacggtggtgttttcctagccgcgattttcgggcatgctcttgggttcgctgttttccgtgggcgggcgtttaggaatagggatattcaataacttgtgagtgtaaccaaccaaaccctatgagaatggaatgttttttggttattgatttgatatgtgtgtgtgtgcattcgaatataattaagagagttgttttgtaacattttgtgaaaattgagttgactgaaaaagtcaacctaaaaattgtaaaatcaattttatattaaagaacaataaaaaaaaaatctggaacggataaaataatttgctcggcttcctcagctccaatggcggcgacgatgatcggaattaacctctcctgcttcaaatcaacatcgttcttctcaccggacctcaattctctccaatcaaagctctctctcctatctctcaaaccctctccaacacagccacggaaatcaacagtcatccgtatgggcggtggtccgagaactttccccggcggtgtatcaaaatggcaatggaaaaggatgcaagcgaagaaacagaaacagcttctcaaagcaaggttatgcagagaacgtcagatctacgagatgcgaaaacgcgccgagctaaaagcggcggtggctgagctagaacgaccatgggaaccgattcataaaccaccgaatctattctcagtttgtgctgatgagcaagttaaagtactcgcggatcggtttcagaaacctggtggatttgatttatggactgatagagatggtcctcaattgtttgagagtgttgatgatttgccttctgctaggttttttcctaaaggtgttgttcatagtgttaaaccttatggtagattatcatctagctctgttgttgatgatggtgatgagagtgaggttaaagatgaagaaattgggaagaagttacgtggtcgtagggtgaggaagagaggtgatgatggaggtaagaggaggactgaaaatcgtggtaatggtgggagattgagaaatggagggtcttcttcttctcaggtgtatgatatgactttgcagaatgatgggagatatgaaattggatcttaggtatgagttcttctttgttgtgtttggatcattgatgtctctgaacataatgtgtatgtaatctggaatagtttgattgtgattatgcaaagttttcagttttagggaagcaagtctctgtgttcaagtataggttttggttgatggattattgattggtataagcattgtctataaactggttaacccaccaaagtccttaaaggttggtccttttacctctacatcacaattcttacttccctcttcactagatatacctttcatcttcattttcttcattgtatcggcacaaaaaggcgtcatggatttattagagtaagaaacacgtaaaccatcattggtgacatcaaactgcatgttatcttccgatgtcaatacatttccggatgatgaagcagaataaggcgatgatgatatacataaatccgaattcctctgttctgaatcatctctcctctgttttttcttagtcctacttccttcactttcctcttcttcttcgctcaatgagtttatgatttgtttgactttgatcatgagggtttgacgtttcagccgaacgcattcacggttattggaacggtgatcatcaacaatctcctccacagttaatcccttatttcttgattctgtaacaagtttcgtaaatccccgaataggaacgctcccgctgctacttcctcttttccccatctcaaagtttttcagattagggtttctcggaaacaggggaaggtgtgttcttattacaaaattggggaggtgtagcaggctagccgtgagcagctgaaatcctaactctacttgaatggcgcagacaaatttatgaagccttaattgctcactcacttgggccttggatatcataatgggcctttgattcataatcatcatctaaagcacactatttatggttatggttatggacctatggttcaaattcttgccaattttttttactaatgaagtttatttattccgttattcttgatcagcattggtgatcatttaatacactaaataaaggaaatctatatgataatgaaatggcttaagtctattggatgtcaaaaagtttgcacttgataatggcatgatctccacaattcgctttcttgccacttctttgtgtggtacgttatcgctaaatcaattattagatgattggacttcatgtcaagataaatttatgtcaattttcttccagccactctggtgaatggtgattaatgttcaacttttaagaccactgggtctgctctaattggttatccattttaccgacgttcatttttgtcatctttagatctttatggtaacattttctgactcatcaaccattgcatggtgcttcatttgatttacagccatattgttaagcatatgtgtatcctatatatgacccacttctactgtttttagcagtgcataacaatgggagactgtattataactttctatgcgtggagcaaagcacgtgaaatagaaggatgcttagtggaggttagtattttcaatcaagtactttgtctaatttatcttgttgccatgacaaacgtgggaaagtagtcattctagcttctgtaatttgagctctttatttctcgcctttggccaagaaatcaaccagcatgtggtacatgtgctttattatattctgtgagctctttcttaaaaggagaactctaagccaattttttctttcttaaaaagtaacctcactgaagtggaggtcctactttcaggcaaatcaagtttattttggttaaggtggtgaaaaagagaccattcattggagaatgtggttttgatgagtcaatattcaaaattgatttacttttaagatgtccaccatttacattgtcatacttgctaaactgcgccaagtcttgctagaagattctatctctcttttcactatttgtttatgttggtattgcttgttggtgattcagttaatagtggttagcactatgggacaaggtttatctacttacctcagccataggccatagccataaagtcccatttggggttgactcttaggaattacaatcaattgtttaaattctgttggagaaagattgtaattataacaatctaagcattctatcctagtggagtaggtggagttaagattcagggttaaacaaacaaggtaatattgtcttagaataaagttcgttgtgacaagatgcagaacattgagagttttgattcccaataagaaaagtaaattgagtgggtagttttgagttgaattcatgtttttcattttggtctgtcagaaaaaggataagatttaggttagcgggataaaatcttttagtagaagaatgtaatgagggaatttttctttgttgtttttgcctgaaaaggtgaaaagaatacaaaaaccatcctgtaaagtttgttgaaggacaagttcaggataagattttgatttggagattcactttgggtttggatttaatgaaaattagaagtttaaagtaagttttatagaccaagttgttggacaagcaatcgaattgggagctatgttatgtcttgattatgcttacgagttcttttatgttacctatattttcacctatgtgaatacggccgttgtgttgactcatcatcctcaacatgaatgtggaaaaaattaaggaaaattagaaaatgaaaactgcttgaggctgaaaataaggcaatgtgaaaaacactgtacaagatatgactcaacacagtgagcttacgcctatatatagaggaccaagtgttcttcttctctaacacacacacactgacacacacactccttaagatcatctctctcgtgtagtgtattttgtcaataaaagttgaacagatggagcataagaatattggtgcagaagtacttcaagatacgtacgatgatcaacagaaatgggttcttgattcttctcttgatagcagaggacgtgttcctcttcgggctcgaactggcgcttggagagctgcactcttcatcatcggtacatagcccttattgagattgtatatactttataccatagaattataacactgaaagaagtgtactataatatcccaaaatattaaatctttgtgaagtcttttgtttcgtcttctctgcacagcgatcgagttcagcgagagattgagttacttcgggttagctacaaacttggtcgtctacctaacaacaattctaaaccaagatctcaagatggctataagaaatgtgaactactggtcaggtgtcactactttgatgcctcttcttggaggctttatagccgatgcatatctaggccgttatgctactgtcttggttgcaaccaccatttatcttatggtaacatatgttcttacctctgatatatcctaatccaatttatttaaagattccataaacaaccttaaactgtgtcttgatggttaaacagggtttggtccttttaacaatgtcctggttcataccaggcttaaaaccttgtcaccaagaagtgtgcgttgaacctagaaaagcacacgaagtagccttcttcattgccatttacttgatctccatagggactggaggtcataagccttcccttgaaagctttggtgctgaccaattcgacgatgaccatgttgaagaaagaaagatgaaaatgtctttctttaactggtggaacgttagtctatgtgctggtattctaacggccgtgactgctgttgcctatatcgaagaccgggttggttggggcgttgctggcatcatactaactgtagtcatggctatatcactcatcatcttcttcattggaaaaccattctatcgttaccggacaccttctggtagccctttgacaccaatcttgcaagtctttgttgccgccattgccaaaagaaatctaccttatccttctgatccttctctgcttcatgaagtgtccaagacagagtttactagtggccggcttctctgtcacacagagcatcttaagtgagtagaaccaaactcaaaagtcttccatttgttaatttcaaccattctaaactgtttccttgtagatttcttgacaaggcagcaattatcgaagacaaaaatcctctggccctcgagaaacagagtccatggagacttctaacgttgacaaaagtcgaggaaacgaagctgatcatcaacgtgattccaatatggttctccacgttggcctttggcatatgtgcaacacaagcttcgacgtttttcatcaaacaagcaataaccatggacagacacatcggtggcttcacagttcctccagcttccatgtttacacttaccgccctcacattgatcatctcactcactgtctatgagaaactcctcgttcccttgctaagaagcatcacacggaatcaaagaggcatcaacattctccaaagaatcgggaccggtatgattttctccctcatcaccatgatcattgcagctctagttgagaaacaacgattggaccgtaccaacaacaacaaacccatgagtgtgatatggctagctcctcagttcatggtcattggctttgcggacgctttcacactagttggactccaagagtacttttaccaccaagtccctgactccatgagaagcttaggtatagcgttttacctaagcgtgataggtgcggctagcttccttaacaatctcctgatcacagccgttgatactctcgcggagaatttctcggggaagagttggttcggaaaggacctaaacagcagccgcttggaccggttctactggtttcttgctggtgttatcgctgccaatatatgtgtctttgtgattgtggcaaagagatgtccttacaaaagtgtgcagccaagccaagggctctcctgattcgtccatatccgtcgacgtctaaataaacaagacatgcaatgctaagtatatgtcgttaagtctaacattaaaaatcattagtaatcaatgttggtgttagatttttttctttggttaaaagataaatttagagttgaagatttaaatttcttatgaaaaagtgccaacatactttgttcaatatttgtattcgcattacgcttactagtaacccaaaatatatttccatttagaaatttgtcggaacaaattgtcattaacaaaaaaaattgaaagaagaaaagtcttggaaaaaaaaagacaacttgagaaactgttacgcatattccgggtatctcagtatctgagctgttttaccaaaatacccttctccttctccaagcaagatttagggtttctcaaagagttttccttttccctctctctcccatgtcgatgtctccgatctccatcgtaattcagtttccttcaattgatgtgaccttcgattccaaactcgcaaacccagaaacgggttactcatagaaacagtgatagagagatatgaatgttgacgctagagtcggtgttgcggtcgatggagctcagagtgctcttaacactgcaaccactgttcatagtagcgtcgtcatgacgcagattaagccgcaggcaaagctaggaaccttccagaatctcctcgctggtggtattgccggcgccattagcaagacatgtaccgctcctcttgctcgcctcaccatcttgtttcaggtctggttcgagatttgagcttacccttttcgttattcaatgtgcttatcacagagaacttgtaaaaattgaatcttttgagcttgttgcttggttttggaggttttagattaggaattgatctgagggtttaagaacatttagtgagcttatgaagtgctgagggtttatcacacacactgtgacccagtagcaaagtttgagactttatttacgtatgtaatcaagtcacaataatgcgtgaggttgtcttgaaagcgtttgttaaaaaggttgttgtttctttcagttgcaagggatgcaatcagaaggtgcagtgttaagccgtccaaacttacggcgtgaagcttcccgtattatcaacgaggaaggatatagagccttttggaaaggaaatttggttactgtagtacacaggattccttatactgcagtaaacttctatgcatatgagaagtacaatctagtgagttgcattctagtcttgttctaatttgtgtaaccgtttatcatgatctgtcacttagcctcccaatgctcttttactttgcagtttttcaattcaaatccagtcgtacagagttttataggaaatacgagtggcaatccgatagtgcattttgttagtggtggcttggctggaattacagctgctacagctacatatcccctcgatcttgtcaggactcgtcttgctgcacaggtaattgttttgtttttttgttttcttcttgaatatgatgattgaaagctttattattcacttgatctaacagtttctttgtcttttcctggcttaccattgcattatatttgatgcttcccagaggaatgcaatttactaccagggtattgagcatactttccgtaccatatgcagagaagagggaattttgggtctatataaaggacttggtgctacattattggtatgcttagtttgctttcccatgttctcttgtgcaaactatgttgattgttaacttcttcgtacattgtaatgcagggtgttggaccaagtcttgctatcaatttcgccgcgtacgagtctatgaaattgttttggcattctcataggtaagggtcatctataattggaaattttctgttacttttgcactcgcctattgagtatatatttctgttcagatgttaactcatcatacatatcttactattttctttgaacttcttcaggccaaatgattcggatttggttgtttctcttgtttctggaggtctagctggagctgtttcttcaacaggtttacttttccacctgaccttatctgcattgtagttttgagctttttcctagaaaatatacatatctgcttcttattatatgcgtcagatgataaactttttgatgcccataactatgtagctacatacccattggatcttgtgagaagaagaatgcaagtggaaggagctggtggaagagcaagagtatacaacactggactctttggaacattcaaacacatattcaagtcagaaggcttcaaagggatatacagaggaatattgcctgaatattacaaagtagttcctggcgttggcatcgtcttcatgacatacgatgctttgcggagactcttaacttctctccccgattgacaactcccactcatatacttagaggaattttagctgcttatagagttagtagaagaaagaaacaacatgtttatttcacacttggtcatcttttcaaacactttggtagtaaattttacttttcttactgccgtagagaaaattttacagtgtataggttagttccacctggggtgttaaaaacattcataggcatcatatttaacactgtaccacgtgagcatatcttcaaacacgacacatttgttttgttctttctctgtttctacactcctatgatacttatgtaagtttttgtttgcttcattatttgtcacaatgatgagatttcaaaacagagtcttggaatgagaacatttttgttacatcaaaaaaagattagcactcaagaaattcttgaaaaaaatcatcaatctttctaacaaaataatgttttacaaagatctagaactaacgacccacaaagaaatatctcatcaagaactctcaaaatctcaatctttctcatgtgacttcacaatctctgaacatgatgaaaatgattcataagttaccccaaaaggccaattcaactagaggtcctgagcaagaagatactgagttcttgagcagagttagcatcagggttaatgagatgaaacgactccgagtcagagctaccaacaacatgctcataattcgctctcatatacataacctcatcagtatccgattcatcagacccacccaacccggatccagatggcaacacacccgctccaacagtcatagactccaatctcttcaacatcatcctcgtctcttcattagcacttctccgtacagcaaaccctagcttccttccgttacaaaacatcgtccaaacgggtacggatctcagcaagcaagacttcaattcgggtcgggtcgggcattctaaagcgacacgaacaagacccgaacccatctcgtgaactaactggctcgtagctattgaaagctcgaggagaaggattggtttaacagagagacggtcgtgttgaacacagaaccacacgtgtccctttcttctaccgaatatcgtaccaatcaccatcgtcttcgacggtctctgcggcaccgtgacggcggatatgctgtagtcgacggcggaagtagcctcggaggaagaggcggaggaagaagctgaatcttgaacgtcgatatcgtctcttagggaagtactgagacgtttcttggaagctccggtggatgttgttgatacggtggttggattcgtcggagttgagatacatggaagaagaaatcgacggagagagtcaattttcgtcatccttctttgttctctctctctctctgtttttttcttgaaaggtgaatctgagagtttgcagagaaaatctgaagtctctctgtttcttgtgtttgctttttatagagaaaggcgggagaacaagggaatatccgttgtgagctttgactgggtttgactgtattttacacgtggaatttttttggttggacacgtggaaagtgaatcttggattctttgtatttttctgaaaaagattctattgcgatggtgaaatgttcaccggtgaatcggaataactcatttggtacatttagtatttgaatgacttttgttttgttgttgtgattttaacaactgtacagttttctgcatcacattaactgcttaacgttttcaagtgaaagagaaaaaaaaaaaaagagttatgttgtgcagatttcaagaaattggtcaatagtaataatttttgtgtttcactttgaaaaaagacaatatagatatgcccatctttcattaaactgtcgttttaaagttatagtacccattttctttttttgttttaagaaaactattgtttacatttccaatttttttgaaactaaagttctactttaccccttatttaaaggttacaacttacaacaactaataaattttggatttaaatcatcaccatttaattagtgagagtttgagactatgttttaagaaaattaatttgaatatgataggtggtgaaaatgttattcaagaaattggccaatagtagtattcatgattttatcattttcttactaagaaaagcattgtcttttattaagaaaaacatctcatattgttattaatatgcatactcactcatatagtcatatgagtcaacaagtaggttattaaaagatatatatagttcacatttctcttatacaaaggtaagtgaaaacatttatttaaatcttaagaacttctcagcatttgaatccaaaacaaatgctcataagatcatggaacaatgtaacctgcaaacaaaacataagaaaaagttagtgaagtgatcatatcaagttcatgttatattaagctcatgagatttacaagaatattggaatacatacgtccacatcgcttgccagcagggcggtttcggatgttacagcgtttaggaacgccgattgcgattccaggattgattccggctttctttgctaaaggagagagcatgacagcacaaagacaacgaggattggttctaatgagagcaccaactttggcacagcaaaccggtggaaccttacccctcgggttctttgtagcaggcaaacacgggcttaggctagccgcggcttgattaattggcatgcgaccacactcacctgccgcctcaacggaagcaagtgagatcagaagactcatcaaagccactgcaacaaacttacaacacttcatgcttcttcttatattctccttcttgttttgttttgttgagtgtcttacttagtgcgttgatgattcttatatactagtaactagtaagatgttttagtggggtggttgtgttttggtgacgtgtacggttataccgtttaattttttcccccattctgtaatcatttgatttatgcttactttgatttagatttcaccatctgttgtgtgtttagtcgtttgatttcttgcgtgtttgtttttgtttctctctttacttttctttcataaaacaggctccaacaactttttgcactctctttgtttcagaacacttttggttttcattgtttcaatatagacactataaggattcaacattcgagctgaaaattcttattattagatataacaacggaaatgtagtaaaacagatagaaatgagtaggctacaacaacatatggtttcatcaaataagacacacaaaaaagagtttttggttgttttcactgacaaccgctcaatcttgcccaatccacaaactgcattccgccgtagatgttattggccaaccgtacaccaactgtgaaggccatagccgccggagggaatttcttggcaaaaggtgatgcttcgaccactctttctagaccattgatgatttgataacgagtattcgaagaaacactcaagaatacacctgcaattaatcaaccattgttatggagattaagatttagtacagtgaaagtaaataaggtagagaaactagctagtataagtatgtatgtaccccagagagctgcactcttgattagcggtggtaccgggatgttctcttctgatttatttatgtttctgagagaagagagtgacaaaagaaaacagtaagtcaaatccaagaactacatgaccctttcgattttagctaccagaaagagatgtgtgttaccgtttggcagtcatgataagatttgcaatgccttgacctacaatgccacatccaaatccaactgcaccatacattataccctgaaaagatgtaacaaagattgttcagcaacagcaaaagttatagagaaattgagacacagagactgtgaaattcaattaccttgtagaagtatgtagcaagtctctgttgagcggaaaatctacatcctggcctttcagcttcaaaaacactgtataagatcaacatctcaaagtttattaaccaagttacacaaaatgagagatgtaagtactatatgagaattgagtaatcttcttgaggaaatttacctgctaggaagcgcattatatgcaaaaaccatgcgtcctaagaagccaggtgatgcggaaggttgtccaaaacgaacataaggcgccaacataccgaccagagcaatgttaaccacagttccaactaaaagatcagcaacatacaactcaaactccgcccagaaatctttccctctcttttgaacttcagcaacagtggcacagcaagaatcaatgactatctgaaattgacatatcaaatgctcactatttcttcaatgcaagaagaaactgttttctaaatgaaaactatggagggagtgccttacctcagcccctattttgaagaggaaagatggatcagccaacattctgttacgaagcatagcccatgatcttatagcaaacccaagaagccctgctgagctctaaatccgaagaaaccgaaaatcaaaactcttctctaacactattatttccagaagaataatagacaaaagcaatgaaacatgtacctgcaaatccaagtacctaaggagaagcactttgcggatcccatagttcttagcagcttccaacatatcagatggaagagtagctcctctagcttcagtctccttcatgacctcttcaaatttcaatatcggtccaaactctttttcttcgtagtcttcaccttcaccatcaccttctcctccatttccacctcctccaccacccccattaccatcactaccattaaaaccatctccaacattaccatcaatatccaaattctcaagctgatcagttcctaagtttctaacattgtctttccctaagatactattatcaccttctcctttaatttgttcagtagccgcaaaaccaccagattgtggctcaatgggagattgagacatattaaccacgaaaagcctcgacctttgcctacctgaaccacctctaatccgcaaaacaggcactttcattgccttggctaaatctctaaatacaaagtctcgattacaaatcccaaaagaagagatctcgtttctcactttcacaacacttgagaactgaagattcattgcacatcctgccatttttcctcttctgtaaacagggcaatttcgacaaatatcaaatcaaatccagcaagctataagaagcttcttccaaaaaaagcttttgcaaatacaacaaaaccccaagaatgtatcaaaaggaataaacttgtggaaactacacaaaatcagagaataatgagatcaacagataacggaaatttcaaagattgaaactttagccgatgatgatgaaaccctaacctagaatctggtctgaaagaggaggaatggtccctaagaaggagaaggagagacggacggcgacagtggtgactgcaagagtgattagggccactggcgcttatttttcttcggcttcactgtatatatttcttttcagtctcttgcacgtgtggtaacatctgcatacgtgtgggaaactgaaacccttaaggttctgtccttattgcataattttgagatacgaataaagtacaatacataaataagtcaaagacttaagtaagagataaatattattcttgacgaaccaaaattaagaatatcatttattagaaagatttaaggagattttaagattttaaaatatgcatcataaatactctacaattagtttaaaaacatagtcatagatttatttatacataaataatgtatccaagaatcatcataacatatatttttgcataaagtcaagtaaaaaacataggattaagatcaaaatagaacaagaaaatgttacaagttacaacatccatcacacagatcatttccccaacgtccctccagattaaccccaaaagaataagaatatatgatgttgctgtacaaaaacatatacatttttctcttttagatttttttttttttttcataaaagaacacaagaaacaagagaacccaacccaagtgaatggatttatgattgtctgttcatcatagctaacgatgatccttgcatctgaccagctgaacttcttctatgtgactgcagatgttttaatcttctgctgaggaaatcaatatatgtcctgagacgatacctgactgagtttgtgagagacagtggcggattcagaatcagcattggtgcttctactaaaaggaataccagcaaacgcactgctttcgaatattggtttccggcgttctctgtatctcccataacctccttaacctgcagaaaaagccacaggcaccatatatgagaatgagtatagacaagttgattgttttgttttcattgtttttggattgttcatcaatattctttgtgaaaagacaaaggaaacttactcctccaagttttccaagatcaagtgctgcttcaaatatcgtctccattgcatctggcatttttgtatttcctacaaacatgtagatgaaaaccttttaagatctttaatacctcaaaaacaaatgtttattttttcccaagagaaaaaaaaacataccaggttcaatactcttggcaagttcttcagcaagctcaatctcctgtataaattgcctctgaatctgagaggatatctcctccgatccatcatggctgagatcagtgactttattagaactgtgagtatcgtgtttcaggctgctacttcttagtttgttaatgtcttggcttgggcttccttccaaacctgaaattgcctgagtatgacatatgtgcagtgcctgtttccaaattgccagaatcgccaattggatcgagaaagcttctagatgtttgtcagattcaatctatacaaagaatcatgaaaataatctactcagaaactcatgatggccagtgatgtcacgatgataatatgtgactatctacaaacagtgaaaagtttcgttaccctttcataaactagttctgcaattgttgctgcatattttctcagagacctgattcttgtcaggctgtgagttgatggctgttcaaaagcatcaccaagatccagagacccatgagaagtgctcggggcagaatactgactgtcaaggctcccaaactgaccaatgctgttgctagtagcaccaattattggcatgggagccgttgaacttatgcttctgttgaataactctacaggaggagactgagacttgaatggaaaattataaggcttcgaagaacttgatgaagatgatggcatatctactggtggtccagatacgagaacgaagtcttgatccatggagtcttgagaatcatctactgcagaactgacatatgtgagaaacagaacaagaaagctttatcattctctacggtggataaaatggtaaagattcaattacctcttcctggagcaataagtgatctagaatcagtcaatcctgtcggttccctgcggtttctcctatctgaatttatttgagtttcaaatctaaatctatcgttttccactttttggttgaaactactatatccagaagtaagttctgtatgttttaaaggactagattccacctccttcctctcaattctcgtatcgactttaattccagaggacgacttcattgaggatgtcttttttaaatatgaagggctcccctcaggtccactagaatcatcatctagaaggaacggcaaacagtcttcttgagaactttcttccatgtttctcgagggactgcttccagacgaaagaaaaccgtccattgttcttaaccccaatctactcctgtagcacagatagtttaatcagtacaaatttctgcataaaatagagaaaagcattagcccccacaattgtcacatctacctggagaaatcatatgactgcctgtccgaaaggaaagggtgattaaagaactcttcaaatgtcaaacgttccactgcaaaagacaatatattcaagaatgatttgtaatcgtatttggatacacacagagtaggaccatgctctctcgaataaaatacgcggtgaactgtaggagatgactagagtttagtataaaccgctattcaaatcacaattccaagttctggaaaactccgcaactcccgttgatatgagttactcggaaagttaggacagactgaaatggcaacagtacaatttgtgtttttaattgtgctaatcaaacaaaaaactctgaacacggtacaaattataaaatgcttgaatcgccaatccaacgtggccacaattcaatataatttcacatttttagatcaacacacatgccaatagaacctggggcatatggtttcatgcaaaagaatagtagtctccactacttcaagcagaattagtgctgacctggattacggcgcagtaacttctgacacaggtctatgcagtccaagcttaaatctctacagtcccctggaaaatgtaattcggttgatcttataatgttttggagcaactgtaaacacacgatggagaacgtattagtttaatgcaccagaatacaaacacatacataatatagaagtcaatgagacagaacacaaaacctgaatttggctgtttcctgtaaaaggggttctgcctgtcacaagttgaaataaaatagcaccaacactccagagatctgcctgtgtattcagctaggattgtaaggagataatgtcaagagaagggcctaggtagcttagtaagagaaaggtctgacctttgcatcatacttctggagttgcatgatctctggggccatatacaatggtgaaccacataaagtctctgcgagccccctaggttgcaacgatctgcgtcaagaaaagagcgatgttcaaaatgggggaggcgtataataagtataatcccccaagaaaacaatgaaattacctagaaattcgacaatatacattcaaaagcagcttgagcccatttgaaaccttctctaattcattcatattacactctttgatctagtaacaaggggtgctgatgacaataccttgcaaatccaaaatcagcaatcttcagatctgcatcattttcatttgtggatagaagaagattctgtttcaaaaacgaaagaaccttaagaattaaatttcaacaaagatggaatctccaagacttggacaaggaaaccccaacatatccaaaaacatgttttattggaaactaacagagcacccttctacagcatcctttcatcattctgaaagttgtatcatttaacagtgagatcaactaacacactaatctgattaacaataaaaaacacctggtgcacagaagatcattgaaatgaaaggaatgagaatcagacacacctgaggctttaaatctcggtgaataatattattgtcacgaagaacttgtaagccggccgctgttacataaaataaaacccgtcagagattacaaaacatgtttctggcaaccaagaaaaacaacaaaacagagagtaagtaagtgccactagaatttacctaactgctgcatgaaatgcttagcagtagcttcagggacaatcccatgtctttggacatacacagacaagtcacctcctttgcagtactccaacaccaaatgtactttcccaggagactgcatcacattgcccaaatcagaacaacatcaaactagacccaaattttgttccacaattgaagcttaattccatgtatatgatccaaaattcaccggcaaaatcatggcattatgacacaaaattggcattgggatgagcaaatgagaaacatatatagtaacaaagctaacctcaattcaaaattctcagctaaaaaatgagaaccgaccaaaaaaatcgaaacttcaaatcaaaaaaagaaaccttgatcatgtcgatcagacggatgatgttaggatgattgatcctcctcaagataaaaatctcagacatgagactttcctgcagcttcttgttaagcctgtccatggcgatctctttgatagcaacctcagtaccgtcaacgcggtgcctcgcttcccaaacaacagagaacgaacccgacccgatttgacgacccaccaagtagtctccaacgacccgacccgtgaactgagccattatttactccgagaaaccggcgccgagaatctagaggatcgtaaaggtcggagcttttggaaattgagctgagaaagaggaatcttttggggaatttcacgacccgtcgggttgaaaaggattcgattggcttaattcggataatgaagagagagatagagagaggttagtgaaattaaaatgattattcttaagaatcttcgtataatttggcttatatgataagatcgggatattaatttaataattaagactaactaatctcattgtctaaatacctagttttgagaagcatataatctacttaacttacatatcaattacgcataaacatgataattaatgtgtgttcttttcttttaaccaacgattcttgcttggtacaccatgcaaaccacggatccgtcaaatgccaatttcaactcaaaccgaataatatttcaatgtccaattttcttaacacagttaagacaaattaatacatttgatttttgtttaagatgtcagtgtcactatagcgtatgtatccactatctatgaaaattaatagcatgtaatgaatttttgttaagacaaatttttaacgtttttttttgtgttattttaataatgtatatataatgaatgtaacataatgttaaaataatcatataattaacttctgtttatatatatatatatatactaatgaatgtatcgaggttgatgatgtggatttaaacggtggggggctgggaccgggacgtcggggagactttcgaggatatccttaatctttttgacatctatgaagtttgtgacgcactgtgtcgctccggcggctagacacgctaacttgtggtcatttccggcagtgatcccgaggatgaagacctctgcattgatttggcggatggtctgaatagtgtctacatcatcggtaatgataacgcttgtcatcatcgatgatgggtgatcttgcgttttacaagcgttttagtaagttaaattctaactaataacagactaatatttttatcaatctagtacttaggatcatcaagaatacacaatttcatttaatctaagctaacacaagagtttgattttggttttctaacacaagcaaacttaactaaaaagcaaagcgcaagcaaaacataaggaaatactaagtaacaaacatgagccaaacgctagtctggatacgcaacgctgcattcaatgctagaatcatcaatggaagtccacctgcattagaaaccacttgcgtcttgacctactttaaccaaaaataagttaatgattaatattttcagtcattacaagtttaagatttattattatatatcaataaaaataaaatgaaaacgctagaaaatcaagttttgtagaacaaacaacaaaaactagaatattcaatttttatgaacagaaaagtataattattagagtatattacatcaccgggtattcgggttggaaaagaattcgattgggcttattcggatacctcgtcgagttaaaaatgtgacttgtctgatcgtccttgtcaaatgattattgatgttagtttaaatattaaggttcctcgaattatgtgtttggcatgcaagccataaatatacgaatcataacacttgcaaaatttcagcttaaaccaaaaatatttcactgttcatataatctgttgaactttcgtcaaagtaattcacataaaccaaaaaaaaaaaaaaaaaagatttcactgtccgattttctaaacaatgaagacaacatatatactgaattttcaaacatgtcactgtggcgtatatatccaataaatttgtagacatttcataattatatatataccagactataaatacttccacataattatcaaagtcttcaaaacaaggctaaattatccaaaactgatatgatcatatgtgcatgcacttctttctcatgtttgattctggtcaagaccgtgtgaaatatgtcacatagattgaacggttaaaccaattggaattcaacttcaactgaccgagtcaatcgatatattcttagacaaacattgatatagctttttttttattttatcaacgacaaagatatagctatctatatttattagtataagatttgtcatagttggcattatcaaagaaagcaagcatcatacggaatgtattatccggccgtaatgaaaactttgaatatagaaacattttaattaatagatgaagttttaccggcccgtaatgaaaacctttgaagtttgaatatagaaacatatgaataataaaagtcttaagtcaatacaagcttgacacacgttatttgtctgcagccaaccctcggcaacaaactatatatacacaatcgaaggtagctaaacgtaacgattttgcataagatggatacttggatagtaattatcattgctattgcttcttttgttggtgttttgatatttcttgcggccttgactggagccgggggcaaaggtgggggtggtggtgacggcggaggaggaggaggaggcggagaaggaggtgatggtggaggaggagaggatggcggaggtgaagatgtggaaataggtgatggagcaaatgggggtggctttggcggtgatggaggtggtggaggttttggtggtggtggtggtggcggtggggatggaggtggaggcggaggaggaggaggaggaggcggaggcggaggaggttgctgagcttcggtgtttcacatcttttagaatggttctcgtttggaaaattcctagaatttattttatgtgaaaattcttagttttctgaagcattttgaattttagtagtctatatattatttgttgattatttatgtatataatttgtagttcttgtatgaagttggtttggtatcctatttcacaataacgctatatatgtgacaattattatcatccatctgaatataccatggcaataacataataccaatgatgtagtttggatgaatgttttagagccatactagaacatccatgcaaattattggttactttgaccgaaaagaaattcacataatttatgcctacgtaacatcttacttaacgatgagactaagtcacaaattgaacaacaagaataaatccaaatatgtaaagaagtactgttagaaaacttagaattcttgtactctggttattatccggtcctatccataaaaatgactgcacaagacatgagtcacagaactccgtcaagtatttcctattaggagatgcgtaattattttgattattttggaatttgcatttgctaatagttccatccacgatggttttatgttccaggaaaaaaaaaaatagttgaaagaatttgtttcttacattttcgtcaaaaaaatattgatcagatctgatatctctgtataccactgatatgtcatcacacaatttttagaaaaccaaatttaccactaatattgattattaccaaactcaccattgtaattagtgttttttttcgggtatggattcaccaaataactcttgcaagttgtaactatactttagcgccgaaattagaagaaagaaaacaaaagtcacgacatgagatttgtaatgggaaacccaaatattgcactagagacaactcccattgttagcttcgatgcaatcgtaaacattctccagcccttactcggagtcgagttttgactcgccccagccattggtacctgacccggattcatattatacccgttcatgtaattgaaattattgtaattatagggatgataattaaaataaggttgttgttgacccatcggcccatacgcatacgggtaaccaaaatgtggttgttgccactgcgtgggcggtgacggttgtccaccttgttgcttgagtcctctgctcttagtaccagacgcatcggtctggtcagaaggtgacgtgttacacacggctaggatacactccatatggatatcgaatctacataactcacacctatacctccaagattggcacgggccgtgacaaaccatacacgtgctagctcccgaggggcgaaactctaagtgatgggcagggtgaaggacatgcctcacgtgttgaggcagctgcgtgcagagaggatgcacgtcaaactcacatatcttgcatctgtagaacaacccttctaccgactcgtcgcatatgtcacacgcgcggtcgttttggcgtgtggactgttgttttcgaacgacgaggctgagctcatgctggggatgaatgaaagttggaagggtaaggggacatgtggcacaatactcatggagatcatagttgcatggttcgcatcgatatgtcttgcctgagccgtaggttttgcagccgtcgcagatgaaatcaccaatgctgttaaactctgtcaatggatgaatatgcgtgaaatgctgaacggtgtgccgttttagtgtccttggagccatctttaccgttcttgattcagagagagagacagagagttgtgtttggtgttggaaatataatgacaaaaagaaagtatagtgacatttcttccgaatatcagaatgagagttgtatatatgattactcttctgatttgtgacagagtgtcacaccgttattagttgactttcgacgagttgactgacttaagaggtgggaaagtctctatccttattatatttaatgttcatttttaatcattcaatatagatatgtactaatgttttaatatttaaatttatgtagaattggttttaccggtttttaattgttagttgagttacacttgaccacttttttattttttatttacatattcttatcttatctatatggtttattctaaatctaaaaatactaataacaaacgaaagtacattttgatcaaggttataaagacaactattattcttttaacatttgtttctataactagttttagactgaaaatatattatatttacaaacatgtcaagcatgataatgctttgattgaagtttggctaattggatattacaacgacaacatggttgaatataaaatgctgtctggaataatatacgatatcacgattctccgtcataattgcttggaatagttctaatctttttttaggcgccgcaagttcccaaagaaaaataaaaaaacgaagcaaatcctatagtttatacagttcttttattacttttttgacttcatacattttgtttcaatgaatgatgatcatatggattctccttacatttctactcaaaatcaaagtggaactttttactatggattctactacatatcactagtttactttcttataaaggttcacgttattacactaaaattcaaccgacataaatgtagttttacaaatttcacaaaataaaataatagtataacgttataccatttttgttgtaggaaattagaaagaaacgcatattttctacgaaatttttaccatttttattgtaggagaacgttgcatttcttgtagtttaactaatactctgcaaaagttatttattccagaaaaaccatggaactcagtccttgaagatcatttcaaaaaaagagagagaaacagtggctcaaaaaagaggccacattatatgtagttagaacaggcttatagggtacgtcgtcagtcaactagcctgatgtcagcgaaactgctataccgcgttgtatgagtttctaacgactgagttaagttattattcgtcggagcacaagtgaccaataatttatgtttttgtaaccacaagtgaacaaagttattatgacttgaaattgtcaaacaaatttattaattttgtaaccacaactgaacgtccattcttacttgtttgccaaatgaagattggaatggtcaaaacaacagtttctttttataccaccattcattctctcaaagcctaaccactctcaacgaaaaacaaacaaacaacgagatgtcttcgtcgagtgtagaacaacaagtagtccaacatttttcccatacccatccactaacgaaggttgacgaatatggcgagttcacatgcggtggctgtaaaacctacggctttgggaagacctatcgatgtgccccgtgcgactatgttcttcatgaccattgtgccacctgtccctttaccctcataagctttatgcatccacaacatgagctccggctatttgtcaatggatcagaaaatatgtgcaacatctgccacagattggtcgagggggtttattaccactgcgagacttgtggtttcgatgtccatccactctgcacacaacatcatcagcacgtgagctacgtgcctcatcctgctcatctcttagagctgagtcagtgtggagcgagcaacacgtgcatggtttgccgaggcgcaatcttgtcctggcggtacaagtgcggtccatgcatgctggatgttcacgtggaatgcgttaattcgtctgcaccagctgctacagaaccgcaaatggatttgaacacttctcaggatcctcagccttataatgatgaatgcggaggcatacacaattatgaacatacaaataaaggtcaagtgtcaggtccaagtaaaagaagaagagtgtttagatttttcaaggatgttacagttgaagttgtcagcagtatcatcacagaaatgctttgaattctttattgttatgctattatgtttttttttttttgaatatctggaagttcaaatctgaaagcgttatatcgaagcaggagttaattcatctcttttgaagaagagatcctctcaacgggcatcgaatccagcacttacagctgggagatttatgctattatgtttcatttctctattgtatgtttgctttttttttttttattcaatacaataaatatacaaaaattttaagaggtgagcaaccaacctaactgacacgaaccaaaactaaattcccaaaaccaaattcatcatcaatcaaaataataaaattcatcaatccaaaaaaaaaaaatcatcaatcctctgtttaatctaaaaaaacttggatagcatgtcctcaggtatggaccaacaataaacatccaaatgatgtttcatcatgtcgtcatctatagcaaaaggaacacgatttagtcgttgcaacatgtcaatgtcgttgttgaacgctgataactacaaagtaaacatgatttagccattagcaaaatgaacataacagaacaattatggtgttggaggctcttctctctaactcttacatatttaatttattgttttcgaacccggcttgttcaccccggatttcgttgttgctgtggcacattccattataaactatgtattatttacctaagttatataaaaccaggaagtttagcaaaaaaaaaaaaaaaaaaacagaaccacgataattgttaatacaatatcaccatttttgatatgcattgcaagtcgggaaacaagacctcgaactctatggaatcagtcaaggtatttgttctgtccaatgaatttgttcctaaaagagcagccaatgtattagccggttctctttaattcttaacattttcactagctttaaattggcttatgacttcaatgacatgtttaatttactaattatatcttatataaattcattgagtagcataaaatatcaagttgtgttactaattctaagaagcaaaaccgtcgatatactagacctagttatatatgatccattatttggccatttccttttgtctcgatcaacttattgatatattgatagtagctaattgttcctttttcttgctgagtttggacctcctggcatcaacaatgacccccccaacaggcagcaaattttattcaaaactgagtgaaactaatggtggggggaaataataataataatcgtaagacttcttaattactccgaaaaaaacccttgaacccaatctttgatcattaaaaaatagattagtggctcaaaaataagtcacattgactagtcaactagcatatgtcaactaaactgctctaccacattctagtactttctagtttctgacgaatgagttaaagttattatacgtagagcgcaagtaaacaaaagtttatacttttgtaaccacaagtgaacaaaaattattatttatctgaaattgtctaaccaaattttatattttgtaacgaaaactaatcaaaacttcttggttgtttcccaaacaatcctacaaaaatacttgggaatggtctataaaattcctaaatcctaacctttctaaagaaaaaaaaaaaaaaaaaaacgagatataagtacctctaacacgagatgtctttgtcgaggccagaacagcaagtagtccaacattttacccatatccattcattaacgaaggtcgacggatatggtgagttcacatgcgatggctgcaaaacctacggctttgggaagacctaccgttgcacccggtgtgactacaatcttcacgatcattgtgccacgtgcccctctaccctcgccacctttattcatccacagcaccagctccggctagtctttaagggaccagaacagacgcaccaaaacagacgtatgtgcgacatctgcgacgaatcagccgagggactctattaccagtgtaagccttgtggcttcgacgttcacccactctgcacgcagctacctcagcacgtgagacacgtgcctcacccggcccatctcttagagttgagtctagggggagcgagcaactcgtgcatggtttgttgcggtgcgatcaagtcttggcggtacaagtgcggtcaatgcagggtagatgttcacatggaatgcgttgattcatctacctcggtagcagaaacgggaattcagcaaaggggttttggacagcaatttgagtttcctcaatatcaccagccttattacaatcacggatacaattacggatatataaatcaaggtcaggttcaagagtcgggtccgagtattgggagaaggatgtataaggttttgatggctctgacggttggggttgcttgcaatatcatcgctgggccggccgcccaggtcattatgggaggcttttgaaatggcacgtctccaacgtcacaccattatatatgtatttttctctaaataatgtttatgtttactttctttccatggttcatacaataattaacaaaatgtatgtgttactatcttcaatatacacaaattactatgataactggcatccaaacttcgtagtaattaaataagcatcagggacatcaatatctaatgtcttttctgaataaaatattgaaaacgtacgtaggagtaccactggagagagtttatatgagtaaatgtgcctctccgtaagaaacaagttgcattactaataaatctatgacaattatctgtcacatccaatgacaagtcgcatatctcacccgtctcagagttcttcaagattctcacaaggactcgtctcatgaacaaatgacatgcctctcaccaacctaccatttagcatttaaacacacatcttccattttagataacccgagcccatgagcaaaacaaacaatttcgacctacctgtgggcatgggtgcgacggcccgaagttttttttttccttctgaatatggaccaactgaaaaaaccgaaattcctttgatcctcctgtgtatatgagttctctttggaagatcactttgacccatttggagacctcagcgtagtgcaacttgtgcaggagttttacttaattccaaattgagtgcaactaacggtgagaaaaaataaaataatcgtaaatttcttaattactcggaaaaccttgaacctaatctttgatcattaaaaaatagaacagtggcttaaaaaagaagtcaactagcctatgtcaactaaactgctctaccacattgtagtagtttctgacgactgagttaaagttattattcgtaggagcgcaagtgaacaaatgtttatatttttgtaaccacaagtgaacaaaagtttatatttttgtaaccacaagtgaacaaaagttattattgatctgaaatggtctaacgacaatttctattttgtaaccactagacactagtaatcaaaatgttcttacttatcttccaaacaatgctcgggaatggtctataaagttctctaaatcctaacctttctcaagaaaacaacaaaaaaacaaccaagatgtcttcatcgaggccagaacagctagtagtccaacattttacccatatccatccattaacgaaggttgacggatatggtgagttcacatgcgatggctgcaaaacctacggctttgggaagacctaccgttgcacccggtgtgactacaatcttcacgatcattgtgccacgtgcccctctaccctcgccacctttatgcatccgcagcacgagctccggctagtctttagaggaccagagcatacgcaccagaacaaacgtatgtgcgacatatgcgatgaatcagccgaggggctctattaccaatgtgagccttgtggctttgatgttcacccactgtgcacgcagcttcctcagcacgtaagacacgtccctcacccggcccatctcttagagctgagtcagtggggagctagcagcatctgcatggtttgccgcggtgcaatccgatcttggcggtacaaatgcggtccatgcgggttagatgttcacatggaatgcattagttcatctgcgtcggtagcagcaacgaagatacagcaaaggtgttttgggtcaccacaaccgcaattttaccattctgagtattactaccaccatgcttattacaatcacggatatacaaatcaaggtcaggttcacggatatgcaaatcaaggtcaggttcaagaaccgggtcggagtaaaggaagaaaaatgtttagtattttgatggatttaactgttggggtcgtttgcaacatcattgctgggccagctgtcgaagtccttaacgggtgcttttgatggctctaacggttgggatctaacgccacgccgttatctttgctttctttctcgttagatgatgcaatatttgttttgttaaaaatgtactggttaccatctttaattatacgaaacttaccatactaacttcgtaataatggatcatcaattcagtataattagaacattaatgtcttttcacgtggaactgctggagggagtttataagtaaaatgttgtacctttgtaatgaaacaacgtgcattactaatgacaaatctatgacaatcaaatcagctgagtctcatatctcaccgtcccagagttcttcaagactcttatatggactcgtctcatgaacaaatgacatgcctcgcaccaacctaccctgcaacattgaaacacacgtcttcaatattcgataacccaagtgtgtgagcaaaacaaagaacgctctttgacctatatggactacaatgtgcggaaaatcacttgcctgtccaatctcagaaaacttggataacatgtcttcgggtatggaccagttgaaaacatcgaaattctgtttgatcctgtcttcatgggtgctttttggaagaacactttgacccatttggagaccccagcgtaatgcaacctgtgcaggagtcttgccgagcttctcagcaacaccaccaagaatagggttcttcaaaacatcgctcgttagccacgttgttcctggagaacccaaaggagagtacccctaaaaaaatatcaagtcatgtttaatttccgagatcttttgttagttttttcataaaggatatagacatgtttgctctacatactgagagatgaacgcctttagatttgcagaaatccctgagcacgttttgttgccatgaagggtgacactccacctggttaacagcgggaggaacacgagccaccaccaagagatctgcgagtttctttgaggagaaattacttacaccaatagcacgggccttgcctgaatcaaagagtgattccattgctttccatgtgctaggaatatcagttggcaaaatgttctctggtttaaagccagtagatcctttcttgaggctaacaggccagtgaatcttcaaaagaatcaaaacaactattagtcaatcgaaatggttccacaaatcggtataagaaatcaagtaaaaggagtttagatgtttgaacaatatatcacactagccttgagacttttaaaaattgcagtgataatattggtagttaaaaccacatcaataagtctgaagtaccaaaatggattgatattatgctgaagagaaaagcacatagacaaacaaaacaacgttttcaaatatattacttacgagatacagatcgacgtagtcaagctgcagatcctgtagagttctattaagtgcctcaggcacttcttgaggatcatgataagtacacctttcatatgaacaagtaaccaggttagaagctacatagacttgacaactgattaaaaaaaaactattaaagcatttaaaccatagtgatgcagaataccatagtttggatgtgatgaacatttcctcacgcttaacaactccaccatcaaacaatttcttcaggactaacccaatctacacaaggaagaagacatgaagttttttccagtcactaaataattcacattgtcaagtaaccacaataatatatagagagaggttagcctctaattgcttaattcaaaacaacacagaacatatcaatagaacaacagtcttaagcaatcacattgtgatacaaaacacaacgcataagcaagaacataactttttactttaagtcccaataaaaatcaagtagcatgacagaagtatcaaaattgaacttaagaacaacactttccttgaatcaattcagcttaacgtacaaaaacttatacaaagaccagaaccacaatctcaaaagatgagtttttggattacctctttttcattgccatagatttgagcacaatcaatgtgacgataaccaatctgcattaagtagtagaatagaatcaatttagctatacgtcactaacaagttacaataaatcgcaaatcaaaagacggaaccttcacagcagcgtcgacagcgtttccgacgagaccaggatcggcctgccacgttcctagaccgacggatggtatcttcgctccggtgttgagttcaaagaatctaatttcctctgccattgtcaaagcaaagagatttatcacctgaaatcaacactgagactgatcctctgattagccgacactgagacttcactgaggcttaacgtgatgttgtggtatatacgagtttgggtgataatggactttggttaagcccatatttgggccttaaataggctttcacaacatttacggtaacacattcataacagaggactagcttagtttataaaaaagttgcatttatatttcattaaatatttaatttaacactatatggtaatactagttgaaaacttgaagacacgtccgaattgaaaaaccagtcatgaagaacatatcaactctaaattcatgtataatatcaacaatttgtaacagaaaaattatatcacaagtgacatattcttccctatgatcattcaactccaacaaagtcaactaaaataataactatttgtatcaattttattgcatattttggatacacttcctttgataagagaatacagatcaaaaaaccttttggcttccccacaaaccaacctcaaggatgtcaataccgcaaacgattcaacatttcacgcataatcatctcttaactcaagtcaacggtattggcacatacacttgtgatggttgcaaattgtacggtgaaggcaggacctaccggtgcagcgactgcgactatgatctccatgaatattgcgccacgtgtccttcgattctcttaaactcatgtcacggtcctgatcatgagcttagcctgttcaacggtcacatgaccgaacgctcgtgctatgtttgccgagtttctatccaagggatgttctacaaatgtaggcaatgcagttttgaagctcacccgctttgcacatacgctccaatgcatgcctcgtctccggatttattggttacgaagcagagaagcctgcatggccatgcgggacagccatcgccaccacaccagtatggtcaaggaatcccatatggctatccacatatgggtcagcctgagccataccctcctcaaggtggtggttatcaacctcagaatcagaattattatccatacatgaattcgggttctccaaaaacagagtctataggtcaccctgagacataccctcctcaaggtggtggtcatcaacatcaacatcaacatcagaatcatcagcctgggccatacactcctcaaggtgatggtcatcaacatcaacaacaaaatcatcatccatacatgaactccggttctccaaaatcggagtccagtgcagtttcaactacgactaaaacgaaaaagaaaaagccaggtttctttggagccatgaaggctgcagcaactgcaactgttacgatagcggcccaggtggccgttgcagcaatgaccgatggcgagacaacgtatgaataataatttctttgagatggtttttttacttgttgatggcttatggtgtttttttttttttttttttgatgttgtttcatgttacatgcatacatgatttgttatgtatgtgtctcattctcatatatataatcgcataacttcaagttaattgcttactcattgatgtaaatgttgatttaaacccaccaaaagtgtttataaattgatatgcttatctgatcatcgttccatctcaaactcggttagacaaagagattaattatgatcctttttgaaaataccttcttttccccaatgtgagatttagaatatgttacaacttactgacaaattcaggaaatatattctttcttttttttcaggaaatatttcaccaaaagaaaaacttaatgacacattcaatttcggttaaatccttattatattgattttatacattatttaggatttgaatactcgttcggactttttagctctaatgcaatgtgaatattggtatgttcacagacatatgcaaacaacacattttcgatttgaaatgactataatacattgcaattgtataaatagatcctttttctataaaaaaaaactttgtaaataaataacatccataagaaactgacaagcacaatacagtttcatgttctactcaaagttgcatataatgtaaagaaggttttttctggttgaataaatttaacattcattaaaaaaaaaaagatactgactagttcatcagagagagaaacctagctcccattatttagatcagctaaaaatcatatctcgccatcccataattcttcaatagacttgtaagggcttagtgtctcatgaacaaggaaggaaccagtgactaacctagcctgcatttaatccaaataaattactatcaatacacgatcaagacgaggaagagcagaggcagatcaactaagtttatgcaatgaaatgttaagaacgtacctgttcaatctcagcaaacttagcgaacatgtaatcgggtattgaccagtcgaaaacattaaagttctctttgatccttccttcatttgtactcttgggaagcacactgtgacccatttggagtccccaacgaagggcgacttgcgcaggactctttccgagtttttccgcaaccatattcagtatcgggttcttcaaaacatcgctcttcagccatgttgtccctggagaacctaatggcgagtatgcctggaaaaaaaaaatcattcaatgaatgtataaagtagaaagtaaatggattggtgagacgagtaatgcttacacttaggtgaacccctttggatttgcagaattcttgtagcttagtttgtcgccaagaaggatgacattcgacctgattaacagcaggaggaacacgagctaactccaagagatcagctagtttcttggtagagaaattgcttacacctatggctcgtgccttgcccgaatcgtatagtgcttccatcgctttccatgtactaggaatatctacaggcaaaaggttctctggctttattccaacagaacctttctttatccgtgcaggccagtgtatcttcaacaagatcacaaaaaaaaactgttacacaataatctttccccacaagaagtagttttacaaggaagtgttacttgctctgcaatttaaatactctgttttaagcaacttcgatgaaaaaatgatatattgtaaacaaggttttttggttgaatagattttacattcattccaaaaaaagttacaaggaagtgatgtgtaccagataaagatcgacgtattcaagctgcagatccttgagagttctgttcaatgcctccgggacatcttgagggtcatgatcagtacacctacacaatttgagaatatatgtaagaataattaaagctacagtttttcacataatatgcatttgattaggtgggaaaaaaagataccagagtttggaggtgatgaacaaatcctcgcgtttcactactctgtcttcaaacaattttttcagaactgccccaatctgagcatggtaaggagtattcacttttcagtatcttacaacaaaacagaacagaggaaagccacaagataacaaataaagcagatcaaaagacacttaaagaggaacaagacagtcaagaattgaagggcaaatgtaatatcaattcaagatccacaaaactcataccaaaaagattgaacttcagattagctaatttaaacatctgtttttgttttacctctttttcgttgccatagatctgagcacaatcaatgtgacgatagccaatctgcaattagggttaacatcaaactagttaaaaagcattaaaaacctaagaaaaacaattgaaacagagtatggtatcatcaaaccaaagaatctacaagagatgggaagcaaataagttcaacctacgaaagacgaaccttaacagccgcggcgactgcatcaccgacgaggccaggagaagcttgccatgttccaagacccaccgaagggaacttagcgccggtgttgagcttgaaaaatgtgatcgcatttgccattatcagatgtggtggtggttgttcaacgcacactgcactcggcactagctattaaagggtgagaagaagtgagagagcgacagaggcgggagattcgtggccaaattgatttcttctttctgtaatactagtactttcttagttagtatattgtcacgtcagatattgatcattacatggaccaatggacggtggacgtatctgagttaaattcgttcatttagatttcctctttgctaatctcgagtgtgactgacacttttttgtgtccacaattcacacgtatcacagaagacagaactctcaaacaaccaagacaattcgtacatgatttataattcatttcatattatgaaaaaagttttatatatttcataaataatgtagcaatagtagaatattatacattgtgattggtttttcaaaaatctttgtgataagaaaaattatgtggttttacaacaacaacaaaattgtagatgagtttatataacatctcgagtgtatatgagttcatttagattatctcgagtgtgaacgtccaagtaacacgtttttgggtgaacgcatatatattgcgccgagcgaaatgcagaatcgacggttgagagcttgtagtaattcattttgaagagaaaaaattggagaataattgggaacacttactataatgcttcattccggcccttcacaatggatgttttaaattgttaatgtaagtttttatttatttaaggaaatgttaatgtaagttttcatgagaaataactaatttgatcaagatccttggattcagtaagtaggttatagaatcaaaaagaagaaggcaattccctagtcttgaaataaggtttgaattttactttttatcatacacgtatttttttgcggtatgtagaaaattcccgacgcgaactaaggaaatagtcttaggttctatcgactatgtcatgttgaagttgtaactagttgaaaacattttattgtttgaagaatgcagaataacaacatttgccaaacatcatgaaatcccaagcatgtgtttagtgttttctcatagaaagattaaatataaaaagataacatatttatttcaatgtccttaatggtttatggttaaacaagtagaaaggagggacattatctcaaatttcaccgtcccacaattcctcaatggtcttatagaagccgtgtgtctcatgcgcaaactcagtagctcggcaaaacttctcctgcaagatttatagggattggtaaaatccattatttgacgatctataatcaacatgatggggtcgaggaaaacaagatggtgaagaggagggaagatcaataatgacaagaaaccaaaccgaaattgtcgtttgattcatcgagaaaaaaaaagaaagatgaaagaacttgcctggggaatgttagagaacttggtaaacagatcttccggtatggaccagtcaaaaacatcaagattctccttgagccgagccccgctcgagctctttggtagaacactatgaccagtttggagtccccaacggagagccacttgggcggtggtctttccaagtttctcagcaacctcggtaacaatcgggttttgaagaacctttagcctgacttctcccttactttgggaacccaaaggagagtaaccctatcatcaatccaaaacagatgaaaaggcatcttcgttaattcatacttgcaaaaacagagtaaattttggaatttgtaagtatactcacagataagtgaactcctttggatttgcataactcatgaagaccttgttgctgccaaactgggtgacattcaacttggttaacagccggggttacacgtgccacgttaagaagatctgtaagcttcttcgacgagaaattgcttacaccgattgctcgagcttttccagagtcatagagagcttccattgctttccatgtgctagttatatcaggttttgtgagcatctcaggtgttggcattagtgattccttcttcaagctcgcaggccaatgtatcttcaacaaaagcaaaaacacatcaaaatggaaaaaattacacgtaaacaagattcatttgctataagttatgtaccagatataaatcaacatagtcaatctgtaagtcctgtaacgttttttccagtgccttaggcacatcttcaggtaaatgatcattgctcctacagaacaaaacaaaaaacatgaacatgtgtgtgtgtgtgcagtgcagaccagagagaatcttggtagaaacagaacaccaaccagagtttggaagtgataaataactcctcacgcttcacaaaaccatcacctatcagcttcttcaacacaccaccaatctaataaatggaaatcaatcatagtgtgagaacaacgaaaataggaagaaagcagaacacatttagttcccacaaactaaacattcatatacctttttcattagaagcatcataccaaaaaaaaaactctttcattagaagcatagaggctacacttactgtgagattcttgttccaccatgaccctcaaaaactataataaatatacactcttgtagagaatacatttgatgaccagtcaaatgacatctatggttaaagagagataaattaaaatatattgtagatagcaaatttacctctttctcgtttccgtaaatcgaagcacagtcgatatgcctgtaaccaatctaaaataatcgacaagaaaagtgtcaaagttaaattttatatccaatggcataataataaggtcgaagtttgatccgaaggtgataccttaatcgcctgttcgatcgctgtcgcgaccattgcgtaggttcctagaccgacgcaaggtaacttggcaccagtgttcagttcaaagaatcgaatcggagctgccatctcttaaaagttttctggataattctattgaaagaagaaaactgagagaaggtgatgaatatgcaaaaaaaaaactagatgcagaagaaaagaaacatacgtaactcggagaaatagcactttgtttcttccgcataaaatgctaaaaatcgtatggccactaaaggcgttttctttatagtcaattgtgcgtattcattttcttttgcagtgtgcacataacataattatggcatttatttctaaaagtgatgtactgtcaaagtcttaaacaaatagaaattggtttgttcttttttttttttgttagttggtttcattattaacattagtgaaaaatatcaatttacttaaaagtttgatattatgtcatttttgcatattaataccaaaactaggaaattgtaacgtaattaacctgttttacaacctatataccatgaaaacattaactaaacatttcatacaattgttctcgaataaactaaatatattcatagaaactttatacaattaaaagaaaacacacaattgacaaatcaaaagccacgagaccacccttttgggttaaagtctacgcttagagaaatcaattttccaaaccgaattattacatcaggtttattaaaccggtccaagcctaacttacaaaaaaaaaacgcacaaaacaaaagtcacgaacccttccctcacacgcaacttcaggttccttcaaaaagcgcgtgtgaatcacgtgacaacctgacgagaaacaggtgactggactcccgcgtaaacagcaaacgtagttgtgcttgtcgacgacgacgccctattggaggaattagatccaggacccgatacatctaaatcggatcttacaaaccgacccgaatcaccgggaagacgaacgtagtaagaagaagaaagttgctgcgactcgttaccgtaacggatttgcatgacggctttgtatactaacggaattagaccctccatttatcttgtttattgttatttttgctgtagcgaccaaagaagagcaggtttggttttttatagagcgatcaagattgtcacgtggcgtcttatgatttgttgctgcatccataagttttctcacgtcattagttagtgtatttaaatattaaatgagtttgaatgttaaaaagataagcaacctttgaatgtgaaatttgggtataggaagaatctgaaagctacattcaaactaatataaaaaccacggccggtccaatggatttatcttcaacataagttgacataactattaacacatatttaatatttgttaagttatacagaaatttatcaaattaagtttatccacatccaattttgataatggtatgcagctggactgctttgataatgataaaattttaatttttgtatattttttcaaatgttgttagtaaagtatactatagtagttaattaattgcttttaaaaaacaaaattgtgctataaaatctttgaataatgggaagtgtatcataatatatttataaaggtgggggatgtgtttggattattatagaaaataacgtatgatgtcaaaagatttgttatatatatgatgacgtttgactgtttgaggtgtaaaaaaataagagaaggttacgaaattgtgcccactaaactatttgggtatagtcaaaatattaaaaagatatatattagctattgaggaattaattaatccgttggtattgaagaagccaattgagtatgattgactatcgtcttgatttaatggttatcttcatctgcctgtatgatgactgtgattatatcatatagttctttatctgattgaaacttgactttaaggttaacagtaacattgaaaaacaaaagacctttctatatatttttgtaacactaaaatattttctcctcaaatttgatagataaaactagaacatctgtttgtccaaaaaaaaaaaaaaaaaaaaactagaacatgtgtcattatcacgatgttacaaatgaaaataaaatgtctaaaacaataaacatcatgtcaataaatccaagtttctagtatccctcacaatttatttgtaatgagttaatcactttattgtaaaggtatgaagacaaaaagttcgacaagaaaatattgaacttcttgtttgcttgttcattgggaataaaatcattttgttctcaaggcaataatctccttatagaactaggtttttagtggacaactaaactctatactttgtattcatgtgggccttgtatggttaaagcccaaaacctcgcttggtcagtgttgttctcatctttaccgatacaacagaaaaacaaagtagcattttttttttacaaaagtataaattcttttttctattttctattgagttcgattatgaactagtttgcagtattttatcagcatgagttttaccatttgttgtaattcattaaatgtattatatattacacatttacaacgaaaatagacataaattaaggtgttgtttttttgttctaaaaagctttttactctacaaaataaattttgatgtaacatatatggcgctaagcctagagctcactgaatatgccttacccaaaattgtttttttggatcagccattgtatatagtcatccatttaaaagtcataaaacgtttcagtcccttgaattctcttgttttgttataaagttaacaatatatccataatcacaaaaatcagggatgaaatagcatcatagaaaatattttggttaaatgaaacaatttagtttaataataaactattatatttcatttaataaaatatttctaataaactaaattcttgaaatgatatttcatttagcaaatatatatatatatatatatataatccattttaccgtgaggatatttataattggtttcaaaaaaaaattaaaacagatatatgtactacattaattacaatactataaattactgtatattcaaggaaaaatattacgttcatttgcgggtagccacttggaacaagcaaacataaaagatttagatcagtccgctaacttttactaaaatccaaagttcgtgtcatctttttcttcataaaatccctacggtccaattattattattattattatttcccaattaattaattaaataaactataattcctttgatcgttaaaaaacctccactcgttttggttttaatttctttttatataaaacatcttgacctccattattttcattacaccattcttgatctcttccgtaatccaccacctaatattaatcatctagggttcctctaaccaaccaagaaaaaaaggaagaagaaaggtttattctagggtttgtatcgtcaacttctgatcaatattgtcatatacaatggagaaacctggtggcttctggatccccaagaaaagcaacaaagagtcatcttgggaagagctggcctttgcagaagacgatgccgccggatctttgtggccgccaagatcttatacgtgtagcttctgccggagagaatttaaatcggctcaagccctcggtggccatatgaacgttcaccgaagagacagagcacggcttaagcaagccgacgaccaatacttattccccaaatcttcttcgtctccagagtatccatctcataaagatagcgataatattcatgaaacctcttgctatactttggtttttaacaccaaacctaattattttaagactcaacactcttgtgttattgatctttcttcgtcttcttctttaccatatttgactccttctagggtttcttctggtttgcctggaaagcaacatacttcttcttctcctccttctttcgttgtagaaccttccaagaactctaaatatattccctcttcttccccatggtcgtgcccaagtactgttgtggagcaaaagagttgtgatctatatgaaattccggctatggaaggagaaaagaagagaaagactgagagtgatgtgccaaaaatcgggcataaagcaaaacttagtcttggaaacaccactgatctctcggtgagtatgaatctggtcatccaccaaagttttccgattactgctcacggtagcgatgaagagattggtagggtggatatccgtaaaagaagacgaagacatgagagtccgtcgcagcagtcgattttcatttcaagtttatcttgtaagagtgacataattacaagaaacgaggaaagcaaacacaaaggtgatcgctttgaggatttagatcttgagcttaggctagggactgatccaccaaaaggaatttgattgatggaccgatgaatctctaccaaaacaaaggtaaagggaagatatatataaatagtaacatttcatatggtgagacaaaataacacatttcatatggtatgtatgtgaatgtgtatgtgtgtacttggatttatcgttccttcgttttgtgtgtctaaaatgtactgatgattgatttttgggttttatttctattgttttattttgggggataaattgtatgaaaagttcagctaaaaaaaaatggaaaaatctaaaggaagtattgagtagtatatgtatgtacacttgaggcttgagaacaaaatttcatatacaattaggtatattgacaccctaagtcattttgttataattagtagtacatgtttagacaatgtttccaggagtgaatcatacatatgctaccacataccattcatttctcagcttctagtttacgacgttgagatatctattcacagagaaaaaaataaagattggttaatggggtcagatgagcccatattatgattcattttctgggtaaagttttcgatatatatgatttagcttggatatgcaaatgactatatgaactctgtagtatattatttagtaatagtagtatttgaaatgataatgtacatgaaaatacgaaaccatgaaaacgagcaaaatacttttgtatatataaacaagagcaaagtattttgtatagcccagcttcactacctaggcgatcgtttaaatgcgctttaaaatctcagcttaattcgaatcttaccggaaaaatgactaactaagttgttatggtttccataataagaatacggggtcttaataactcttaagtccgaaacctcttggttaaaaattaaaaaaaaagtattgacacgtctatacttccttgagtgatttgaagcatgttgtgtaacaacaatccaaaataaaatcacatgaagatggaatattttctgtcacaatttccaagaaagagatcgaatgatgaataattctcccatagatcttagttagtaatttattaaaggaatttcgatagctataatataattaatatttacgtaaagtagaaaaactcggaagcaactaattattgttctttttcctatcataattgcaggaactctggcaaataagttcgtaactaattttgtaaaacaataaggaaatagtttaataatgactaattcctcgttgttaaacgtcgttataagctcgtttccacatacattcgcatctcagtacgtaacatgccattctgtcaaaatcataaaaataagcataagaaagagcacaaaaatccaaatatgtcacaacacatattccctttcgcttgttttgtctcaatagataattgaatagaataaaattatatactactccaaccatttagagtctctaccctaactttttagccccatgggttaccaactcttctatcgcttagacttaacttaatctataaattttcatatcgtatctgtaaactaggtttgcactgtttctatatatcaaaaacccataacgcattggaagaatctgtttatacttaattatatattacacatttacattacataaaccatagtattttcattcttaatttctatcaaccatccggtttctattgatacaaccaaaaaaactttttgaatacaataagtgaaagtttttacattagtggaaaatgtttacccaagttgcttcccaatcccactacgtagtacattaaataaggtggtgagctttataggggaaactatatatagatgcatatacgggcaagtatatatgatatatctacttgtctaaagaattttggagctaatctattagtgagattttactagaagtctaaaaatgaaaaacaattagtatagtctcttagtgatttgatttgatatgattttatagtgtaaaatatatatgttgtatgagattctaagaaatgatacagtgaaataacatagaaactttcttctttttgtgcaagttgattttgaaaagaatttaaaaacagatattttctcttgaatgtttttcgattcgttcatgaacccattggcataaacttcaaagctatcaactaattcttggtttacctagctagggtttggttattagttagatacgctctttagattgctataaatataatgaagtggtcttctctgtatataacaatacataggtggaagtgaagtcttcgaataaaagcagagcttccacatggggaatgaatctcattctctgtaactcacatatttcaatagttaaattaataattcaaatatgacaataatcaaatatatacaatacgtgaagggaatttttttttggattctaagaattaaagtgtcacggaattttggacgattctttagataataatataatgcatcaattactggacaaaaattggttatcaattatttcccaatagcaagaccagtcgacatatgtctgtttgaaactaatcaacaactagacttcgaatactaacagaaatataatacacacaagtacactggtacatatgtaagcgaaagttctacagaggatcctgacaacaagaaaagaccaaaaattcttggttggtccgctttaccagtctggtttcttttattttattctcagttttaaagatgtgagtgaggttatgtaagtgatgttttgtcaacgactcaaaagagtaaaatatacctttgattcaagtttgttactctcttagtcttatggttaagatttttggacatttccttcactccaccatgcttggcccaataacatacgtatgtgcaacagcttagggtccataacttttttaaaaaaatttggtggtcaacaaaggtccattactctagtcatacagtatctgatagtcatcctatatgcttcaaagttaaaaccattcctatgttttagaagatttgttttctcgaaaccatatatttcatcaacgaaaataaaggagtaggaatattcgtcgaatataaactttctcaatttgtatcgcaatatatgtaaactttagctgcaaaaatataaaaataaaaataaaaataaatgtcaatcttatttccactaaaccctattcgtacagtcgtaacatatttgtacaaaataaagttccacagaccataaacatcaaaaaaaaaaaaatggccatcttcgatccgtttaagctccaccataagccgccgtcgatttttccggcaacaactgtaaaaccaagccatgttctttccctcgtcgctaagttcttcttcaccatatgcatcttcatctccgttgctatgatctccttctacataatcttcttcggttgctccgattgccaccacatcaccggcctccgtcgcttaggtcctgaaaatgtaaacttaactaccaactcctcagcctcctcctcgactatccgccggccgaatcagtcctcggaggctactgatatctcccacatagctttcgggataggtggctccattcaaacgtggagagatcgcagccgctactccgagctctggtggcgtcccaacgtcacacgcggcttcatatggcttgacgaagaaccgcctcttaatatgacatggctctcaacttctccaccgtaccaagtctcggcggatacctcccggttcagttacacttgctggtacaaactatttctacttctataacatcattatttcaacgagatgatcttagtcaagttaagtcaagggtcaatgtttaaccattgtgaaaatgtatttggatgaatacctaaccatacaaaacctataattttattcattcgatttccactttttgttttaaggtatggttcaagatcagctatacgaatggcgagaattatcaaagagacttttgagctagggttaacggacgtgagatggttcataatgggtgacgacgacaccgttttctttgtggataatcttataacggttctaaataagtatgatcacaatcaaatgtattacatcggaggaaattccgagagtgtggaacaagacattgttcactcttacgccatggcttacggtggtggaggaatagcaattagctatccattggccgtcgagcttgtaaagttactcgatggttgtattgatcgttacgcatcgttatatggatctgatcaaaagattgaagcttgtttaagcgagattggagttcccctgaccaaggaactagggttccatcaggtatattcacattttcctttttgtttttctcatgattactggaaattcacttattttgacctaatcaataaatggaaatttactattaattggtttctagtttttagctgcaaatactgaatttccttttatttgaaattttgaatattcagttttaaatttcaaatcgttcaaaatttttatcccttgccagatttaagattaaaataattatcaaaaaaaaaaaaaaatgtttagacgcttcaatgctcagatttcggtgtcctgtttttatcaacgatttacttcttactatgtgaaattttaaatttttagtcttggtgtaactatataactaactaagtgacatttctaattataagatcgggatttaattatttttctttgcatggtaaaatccaggttgacatacgtggcaatccatacggtttactagctgcccatccggtggctcctctggttacgctccaccatctcgactatgttgatccaatatttccggggacgactcaaatagacgccttaagaagactcgtatcggcctataagacggatccaagccggatcatccagcacagcttctgccatgaccagacccgtaattggtatgtgtccgtttcatggggctataccatccaaatttatccaactttggtcaccgctaaagagcttgagacgccatttcttacgttcaagtcgtggcggacttcgagctctgagcctttctcgtttgatacccgacccatcagtgaagatccgtgcgagagaccccttgtctatttcttggaccgggtttatgaggtcggttcgggtcagacgcttacgacgtatcggaaacatgttgaagtgggcgagagtacacaatgtaattcgcctgattattctcgtgccaacccggtcgagttcatcgacgtttcaactactacgttgacgccggatctttggaaaatggttagtaaaatatccgctatcttcgtgaacatatatagacataaattcggtgtattcgtgacaaaagaaacatagaaagcgtcctttcgtggtatattgtacattcggtgtatacttttaatctagtatacttttaaattcggtgtatttgatttttgatatcttttttatttgattgggtttacaggcgccacgtagacaatgttgtgaaattgtcaacagtgaagaagactcagaaagcgtaatcaatgtcaagatacggcattttaatcctttggaaagtgtaactcctcagtcaaagcatccgaacgacgaatggaccgactccgttttatctacagagactatatagttttatctcaagaggaaatgaactattcatttatgtaaatatcagcaaaccgaatatcaaaatttttataatgtcaaaattatacagactgttagttgtttagcatttcattttgaagagtatagtcttatctagtcatgtaaacattttccctagatatatttattcgtattgcttatagattgggcttggggtctagctagacgatatatcttgaaattgatggtgtaggagacaagttcggattcttcatatccaaaaatcttttacatgtttttttaaaaagatgaattactatcgtacaaatgtatcggtcaaaggcaaacttatcaaacgcgaatagcagaaccgcaaccgcaataaacgctaatgtagaaaatgttccattgcccccaaagaaaaaataaacgacaaacagactcaactagataaacccaattagtcgaaattagtttcaaaacgtttatttttctccctacttttcatgctttcggatcttttgtgtgttttgttactctgttccgctttgttgaactgtatgatcaccttcgtactatcttataagaccatgtacatgggtgatatttttagagtatcacaagtccaaaaattatttttatattagtaaagcaattagaatatgcttgatcagtatcagcccactgatatttgtgataccagtatcatctgacgtggcttcttctgattggtcacatttaacaaaagcaaaaaatattatatatatttattaaacaaatattataaataatactaaaaaaatttttaatgatactttgtgagtattacctatgaacatgctctaacagttttatatatatattataaaaaaataaaaaataaaatgctagagctttgtttttctcccaaaaagactgtaataaaaaacctttattataacaaagaatcaatccattgaactacttgtgtacaatgatgttgaatacttcaaagctgtgctatgagaagttcattccaagtatccgggatcccgggtaagcaccaatgcaagcaatcgttgaacgttggagctgaagtcacgttactcgcctttttcggtttgagtttacaccctgcgatatgagcttcatctcttagtttagaaagtgcagttatgtcaagaatcttgacccttgtcccattcacagcactctcaactattgtatcgagcgatccaccttcgcctgtgattttgcttcctctagacaaagggatagtattgttacacttttcatgcctaggggaaatcgtcgtaaagaaagctttcaaccgtggatgcaatggaagttgtgcatcaagccacttcaccaggctgtgtattgtaaaaattttagcgttttcaacgttcttgaaatatccgccttcgacacgtgttccatttacgtgcatcacccaatgatttttttctatcttatctctgctccaatggtgaccggtgtttagaaccaatacatggaaacggtgaaggtagtttcttatgaatgctggtggacggtcaagatgcattgcaataagatgaggtggatctgtattgttcatcggtaccaaatctgttaaactagctgaccaataagacaaaaccgttgtgtttgtggtcggaaacctataagcccaaccaccaggacgaggagctcctttaggtatcacaagaccatactccgatcccacgttttgaacctccggactctctttacctccagtggccatacacatcagggattgaaattgttcccttcccaaggagtctcctataaatgctatagtcttgttctgcattcttctcaagaagttgactctgttaaactctggtatgttgcaaccttctggctgccaccggtaaccctcaaatgagaagtcgggtctgcccattaccctgcaggaaaatatgtttgataaccattgtttacattcaaaaccagaatacaatggccgcttcttgtcttcaacccattccccctttgccaagttacaagtttttacttcaatcagagaaatgcgaggctggttttttgcggaaaccaggagtgttgtcaccaaaagaatgaggatgatcaaggaaagtgatacactccctttgagtatgtaactttttccaccatacatcttagattgagtgctacagataacaccaattctcaaacaaagaaagatgcttgctctgttgttgaagttcaagatccggaaatgattgatgatgattgaatcttcaacgagtgagctttgatgtgtagatcttgacagcaagcaattagaatccaccactaaatttggatctctcaaatctgaagtgtagatatgaatttaaatagtagtcatagtcatagtttttaaattgtagtcatagtcatagtttttaaatagtagccatagttttaaattgttgccttagaattgtagtcatagtcatagtttttaaagtatagtcatatttttaaattgtagtcatagtcatagttttttaatagtagtcatcattaatggtagttcttagcataatcttcacatagttcttatgaatatttttataattgattttgaaaattttgaagttaagaatttggttaagagattgaaattttggcaatatgcaatggtggactcttaacttggacttcttaaaaagaaaaaaattagaaaatttttttagaaacattataatttttaaaaatttaataattattacaactcataaaaattaaaacatatatgacataaattttttaacaaatatgacaaacaattagatttaacacttaatttatctaacaattaagattgattgaattaaaacattatatttaatacctaatttatctaaaaattaacctaagaaatattagatttggctcttatataggagtcattcttaacaattaattgaattataacattaaatttaagacctactttatctaagaactaacctaagaaactatcaataatgatggtctcatagttttaaattgtagccttagaatattcaggcccacctcttgatatagcaatgtctttctctcttttgtttttttttgttaatcatgtagtaatgtctattgcaagttaaaaaaaaaaaatggaaggtaatgactaaggatgagagaagacaaatactgaggtttaaatttgaaacaaacgtattcatagaaatcagggcataaacagtattttattatcaacccaaatctgatttattaatttccattgtgtagtttgatggagtttctgttaagtagacttgatcaagttctatgaaaaaatcaaagtcttaaacttaatgcatttgatagctcatgaaaaagtatgtcttgttgcttcaaaacacactattgtaacaacttagcttttcacgaccctcccacaataaagacctgatagacaaggttatgtcgatttaaagattgcacagttttctttttggtttatggttaatacgagtacaaaaaaattttagattgtacagagaattatttgacatttgggtcgaatgatatagtaaaaccaaaacgaagtgtaaacggaatactagatcggtactttaaattaagagataaaaactttagctagatctctataaagagataataaaaaaaacaaatatacattaaaaactttagttagatctctatggcaaaaacgtctgatctccatttcaacttcttcctagcaccacatcgacgcgtcgggcaacactcttctactccaactacgacaagcgctaagagtctgagagagagaagactttgttagcatacggacaatctcatgcatgcaaaactctagtagaccaaaaggacaagaatattcacacggtaaaaaagtcagatctctacttcaacttcttcctagcaccaaataactcttcttctcgaaccacaacaagattgagaaataagactttgttaacatatacggatactaatctcatgcaaaactccagtagaccaaaagccaaagggagaatattcacatggttgactcaaaaaatcaacgattatctaagtcaggagcttccacgattagagtggacccttttctagaagttttgaccatgtgtgcatttgctacgtggggcacaatctgcaccattattcaagataaaactcataaaaagtaaaatgttgtaaccctacactattaaattccattgtacaatgagatggcaaaagaaataattctcatggtttcatgatttgtaaacaatgctgctaaaaggttaacaattctatacatatgatttttaaatcatcttacttaaaattaaactagttgaattatatagtttaagcatataaatagaaaagtaaagtatataatcatttaaagaaaatcattttttctctctacaataattcatttgtaagagatttttattcattagcaaaaaaatgtaaggagttatttcaagactttgtgaaccaataaggcttttgtgtccacaaatatgcccaaattagattcttacatttgattggtagtacgtgtcttccaatatctctttcacatttataactttaggaaatgttgaaactcgctgtatttggttggcttattagacgactgtgtgacttaatttagacgactgtgagtctctgacaatcacaaatatcatagaggaagtagtgtagccaaaagccaaaactaaaagtcaatattagggctaattactcaaatactcctcggaaacgtgacagcttatgctgatgccaattctgatgccattcttaaagatcaaattcataagcataattaatcataatgactataaatcttaattaattaatttttaagttttgtctcaaataaacaaactgtcactgttattagttaccgtcgaatcttccatcatcaccgataaatactttgatatatactagtagtgcctaaaacatcttcttttttatggttacagcataaatgagcctgatagatgacagatttaaatattgatattttgagtatagaaatggagtattttaaaaccaaacagagagttaattaagcattaatcttggaagttgtaacacatatcacctaccttcataatctttctcaatcacgagtatatccccacacaaggaaaaataaaagagctagtgacgacttttccactctcttcacaccataaatcgtctctctttctctcttcacaactaaaaacaaagcaaaagaaagaacaacacagagcagagaaaaaaaagaggtagccatgttcttgaagctt

SEQ ID NO: 344 - DNA, 115359 bp, Arabidopsis thaliana
gaattcttgtttttaactataaggataaattcacaattatatctaaaaatgtgtgtgcgtgagttgtagacaattaaaactattgatcattaaaatttactataaagtcgttggagaaaaagtttactataattgttggaaaaaaaaaatttactataaggtctcattcgtattctgaccatagttttcattggactgttaaatttgttatattctttgtatgactaaaagaacatctacatgcatgccaaataaagcgaccacattaaaaagtttgatccagttttggttcgaatttaatttggaaatttgagttttgtgtttattttgtaatgtagaagaataaacttgaaagtgttaatacgttcaattatatttggtttcgattgaaattcaatctaatgtggttagatgagtcctatattaccatgtcattgttaatacccattgccaaaaataaaagtgaagcagaaggagaaattgtttttgtatacccgaaggaattaagatgtacgatcttaaaatagacatttcggccatctatcaaaataaatgtctaaaagttttgtggtcgtcttaaatactacttcgagttcagacgtatacgtctcaccaaagtaatgcacatacttgatgttaagtttatctctttttactatttcaaatttcgcgtttgacaacactttaagtctacattatccatagagaatataacataaagatcatgaacttctcatgaatgtataagacaaatcaagcttatatatgagatctatttagtaatttgatatgtatgtaatatatgataaatctttgatgcaatattttattatgattattagatatacactagtcaactttaactttagaagattaatcattccgtcgcaaaccataccataaattagcaagggatcgacttaatatctccgatccgctatatatttaagaagcatttagattgtttataatacatgtcatgattttataattatgtatatataaatactaattgatgtatgaagtacgtagataatgttacgatctattaatctatttacattaacttttaattagtgttgagtagggaaaattaacatataaacctttagcagttggttgtattattaaaaataatttgaacttaaaatccaccttcgaaaagataaatcaaacaagtataaaaaatgctataaatccagaatatttacctaaggtttttattcttctacttaataatgtaagataaaaccggcacaatacttgttacgtatgcatggtaggtaccgcaattgtgtaagcaaatcggcacaatactaaggttacatatactaactaaataaaacaatctgatttcagtgacaccgtatatctaacctttattcaaatccaagggaacatgacttgacttcttctgttggaactaactcgatccctcaaccatctccagggatagaagagttagtaaaatcaaacttgaagtgaggaagtaagcagtttaacgactccatatgactacagttatatacaaagttgggcacaaagtacaagtactaaatactcaaagtcagataataattttaataagtacaaactatatatatgcagtacaattattgagtatatataaacgagactggtgatttggggcattgtccaccagggtgttatatcccaattgaaatttgaaaatttaagtgtgtgagtgttacgacaaaaaaaagtgtgtgaattgtaggcgcggtgaaaaggtaaattaagattggaactagaaaaatagttgaatatcctttactaaaagttgtcaattccggttttagtaaaaaaaaattttaaaatagaaattttatccaaaagacttcaaacacacatattcgcatatataacataagatatcattttttgtaaacagttaaaaagaaaaacacatgtttttttttttaatttagaaaaaaacatgttattatacaaaacagagttttgcccacttttaatatgttatgaaaagaaaaatgattttcttgggtttggtcagagagattggttgtggtaagaatgggaatcttaattacaaagaattggattttgggtcgacctaccacctaaaacgacgtcgcctccatctctggtttccaaatctctttctcctctccctttataagcttgcgttggccagtcgctcatctcgaaaacagagagaaaaagactaaaaacacagtttaagaagaaggagagatagagagagaagagaaagatagagagggagatggggtctcatatggtttggtttctatttcttgtatccttcttctctgtgttcccagctccatctgagagcatggttcgccactacaagtttaacgtgagtttatatattcacagttccatttacagatcttatgctgattgcagcatataacatagtcgcaacttaactttatccctgcttacgtaaagaaacatacatattgtttgtggcttcgtagtggaacatatgcaattatgtaatctttatattatgagcctttacttacaaagattacttgagatttatgtacgtgtgctattttcacttttcaaacatgaatttcctacgtttacaatcatttaatgtaaaagggatgatataatgtatttacgtacatgtgaacaaccaagcatgttattttttccttttttgttgcaacttacaatcaagtaatgattatggttatgattatgatattggtgtgtgtcttttgccttatatatatatttatccctttcgtttaactttgcaatataattattactgatcactatattttggtttgaaatggcgcaggttgtaatgaagaacgtgactagattatgctcaagcaagccaaccgtgaccgtcaacggtagatatccaggtcccacaatctacgcacgagaagatgacacgttgctcatcaaagtcgttaatcacgtcaagtacaacgtctccatccactggtaagcttctacttaatcttcatttgaatcatcatttataaattcacaagttaattgattggtaactttggacgatcaggcacggtgtgagacaagtgagaacgggatgggctgatgggcctgcttacataactcagtgcccgatccagcctggtcaagtctacacatacaactacactttgaccggccaacgcggaacgctctggtggcacgctcatatcctctggctccgagccactgtttacggtgcattggtcatccttcccaaacgcggtgttccctatcctttccccaaacccgacaatgagaaagtcatcgttctaggtatctcaatcagtatatattttcaaccacaattataaagtttggattcattaaaattttaattctcttgtccaatagaattgaaatttggatcgaccagtcaaaattataagttagaaatttcatatcagaatggatgtaatattcattcagtcattcattgcaatgtgatttatagttgaaagctcgtaaaactaaacaccactactatctttagttgctacaggttttttacatttcatgcaaatttagcatgactagatacataacggtcataataattgtaggtgaatggtggaaatcggatactgaaaatattattaatgaggcgcttaagtctggattagcccctaatgtctctgactctcacatgatcaacggacacccaggcccagttagaaactgtccatctcaaggtaatctcttaatttccaattttaatttataagatttttaaaagattataagctaatcatgaaagcctctttctatatccgaaggttacaaactgtcagtagagaatggcaaaacctatctgctacgactagtcaacgctgcacttaatgaagaactctttttcaaagtcgccggccatattttcacggtggtagaagtagacgcagtctatgttaaaccgttcaagaccgacaccgtccttatagcccccggtcaaaccaccaacgtcctcctaaccgcctcaaaatccgccgggaaataccttgtaaccgcttctcctttcatggacgccccaatcgcggtggacaacgtaaccgccaccgcaactgttcattactcgggaacactctcctcctccccaacaatcctcacccttcctcccccgcaaaacgctacttccatagccaacaacttcacaaactctcttcgtagtctcaactccaagaagtaccctgctcttgtcccgaccaccatcgaccaccacctcttcttcaccgtcggccttgggctaaacgcatgccctacttgcaaggccggaaacggaagccgtgtcgtggctagcatcaacaatgtaaccttcattatgcctaaaaccgctttgctcccggctcattacttcaacacaagtggagttttcacgacagactttcccaagaatccaccacacgttttcaactacagcggaggatcagtcacgaacatggccacagaaaccggcacaaggctctacaagctaccgtataacgccactgttcagcttgtccttcaagataccggcgtcatagcgccagagaaccatccagtacatcttcacggttttaacttttttgaagtcggtcgtggattaggtaacttcaactccacgaaagacccaaaaaacttcaatttggtagatccggttgagaggaacacaatcggagttccatccggtggatgggtcgtcatcagattcagagcagataatcccggtacgcacactaatttttggttaagaaaaagttaatcaaaagatttagtgggttaattaattatcgccatgtagatttaggtcatagatcaatatctctttggttattactttatgactagacttgcaatctccatgctatcaaaaaagacaaataaaatcttgtggtagtaagtcaaatactattataataaaactgatggattaatatgttgtaaaatgtaggggtttggttcatgcattgtcacttggaggtacacacgacgtggggattaaagatggctttcttggtggagaacggcaaaggacccaatcagtcgattttgccgccgcctaaggatcttcccaagtgctaagtcctgcaactaaatagggcgacatatcaacatcacgccacgtccaagaagactaatgagtggtgatttaatgcgtggatttggctaacaaattgtatttttttgagcaaagcaaaaggttcggttttttttgctcatgtcaaaagtttgaataatggagaaaaaagagcattgtattataataatttgttttcattatattcaaattccattcatattttttattattgtctctaacacacctcttatatggtccaaagttgtagtttattctttggtccaacaactttactgtgcacacattctcttattaattatatcgtccttactcgggtttaaaaatatgagtttttatgtttctcaccacttcagagtttttccatcgatcaaacttatcaggttgcaaattataagctaattctgttacactgcctcaatttcgtttaataaatatgtttttattttttccgatttttatgcaacatcagatgtataatagctagttgcgtaatattaacttgttattggtcgaagaggtttaataagcaaatgtagagataactcaaagcatttttttaatctccacacattcatccaaaacattttataaaacaaaacatacagagtgttagtactacattgagaacctcacaacaatttgattttcacatgaagaatttaatcgagtttaacgttgtattattaattgcaggtcgatgtacaacgtactagccaaagaagtgtcgtaccaatttgtatattttatcactctaccatctagaaaatactttattacataggtagcccatagccatgtggggttaggactgtgtcaagtacatgataatacgaggattaatgataaaatgattgattaaggggtgcattagataaattaaagaaacaagaaaagaaaacaaaactatgtggttatctaaactggcctcttgaaacacattagcttttgaccttgaccttgagccgccctctttggagaagggagatgattttcttttcttttctttctaaaccgacgttttatcatctcaattatttggctcacatcttacgtatttttcttcccgattgtgctgccatgaaactggtttttattatctacattatatgttaagttaggtagctagctttcctttgcctttgtatatatcttgatgtgtttttaggatttctaacttttaaatttaatttccttaactttaaggcaagcatatttaataatccatcttttttttttaaagaatccatcttatttgtgatataagttttagcggcgtaataaacatcgttttagcaattcaagggaccatgtgattaaagataactagatgacaacaattcataacaacttttatcaacaaaaaaaaaaaaaatacaatccataacaactttgactagtaaaattttatgtttaagataagttattagaaatggagaaagttcaaaaaactaaacttttgctgtcagatctagcgcaaaagtcctctcataaatttagaataattcaaatgagctcattaagaatgttaaagttgctaaacaaatatttttaccacattccaccatcacttggttagcggctgtgtgcaatgttgtttaaactaggtacatcgaatacgtactacgtatgaacttcgacaattaataatgagttaatattatagggcaatgtcagagaaacatggtatacatatattttcaaaattgaaaaccgtatttaacttatcatagtaaatttgaaatatttatactgaattttagagttaaatttaaccattaaaataagtaaaaatgacaaattaaactacaaaatttcgctaagcaaatcaaccaatgaattcaaatgctaattaacctaaatctcatcaaacgataactccaactaaacacaataaaacttgagataaaaaaaaaaacaaaaaaaaaaaagttatgatatacttctcgcgttgtaattggtgatgttttgccattaagcgacaacggaagaatctctcatgagcacaatccgatcgagctgctccagcgcattgttgtggatgatgacataatctgtatggtactggaggtgaatctacaagctctcttcactataaaccggctctaaaggaacataaaaaaactacagaaagattaaaagttagatcgtttgaagagaaacacgactagaaaaatgtaagtagtccaccagatcaatattataattttctctccatgtcttacattcttatatctccatttgtctactgcgagattattacaaaatcgtcaagatcttgtacttacgaggagatataggtttgtgtatccaatctcgtagttatattaacgtttggaaggatccgagatatcaatctatttgtgtttttatgtaatatttattagtgttatcgatgaattaaaactttaatataattttttgaaaactattcgtttaagttattaaaaattgtaaatcacaaaaaaatgcatttatagttaacttttaattttctaataaatttaaacgaatacatcatttagaaatatgtaaatgatgcatttgtaagaaatttttataaaaaatacatcatttataaatatagggaatagcatttacgtttatataataaatttaagatgtttccatgtattttctataaaaataagtaaaaattaaatgacaaattaaactacaaaaaaattcgttgactaaaagacactatcagaatcttgttatttgcttggtgccccagtatcacatacttgaaacgtaaaatatgggttccaacttataataatataaagtctatattataaaaagtaataaaaacttaaaaagaaacaaatgatttgtgcaaagccactaatgtacaaagcgtgtggagcgcattatgagtgggagccctacaggcacgctcgcattcttttgctgtcgctccggtgggtcaaactgtttgccagagcttcctatttactctcaacgtcgtgtcgtttttgtgttgcctctcatatatatgatatttattttaatcctattactttataatatgaaacaaacctcaattgttttgctgtcacaaatagtacccactttctgaatgaccgtaccgaatttttattacatatacactttttttttttttttgtcaaacacatatacacttttataagatatgaaaaatatcaaccactagaaataagtattgtaagaacaaagtatttttgtacaaccatttttagattattaaaatattaatttttattactctttcaataacacttgtaacgaattgattgtctattttgtatttttttagtttactttaaatacataggtttgatttctattttttaatattggaagtcaaaagcatgagagtatggatcataagttgacgtcgttaattacagagaattgtgtctaggttgataaaggcttaacatgccaaatttcaacttgataaatgttacccatttgtttgtttcgtcccatagttcccatagtttattaaatataaaatgtatttttaactattatcaattgtattatctaatttttctaaaatagaatatcagtgtaatagaaaattcataaaacatcgaatgaataaaatttccttattggccacatatatagtatattgatttggaaatagagaattcttttggcgaccaaagaaacaaatagtatgaattttcttgcctaaaatcttttttttttctttggtttcataagatctacagtagtaaggagcaatagactaaactttaattaaccaacaacaataaataatgaagtaaaatatcattatgtaaatattacataggtggtggtggcaagaagatgattttaggctttgtagctaaaccattagcaaaagtattgtgtaacaccaaaatatagaaaagaaacctaaaaaggtctgagatctgtatttaagataaataaagaaatatagtcattatgtatatttacttacatgtatctattaataacaaaataaattattgaggagaaaaaagtatcctcattcggaaatagaagatgctttccctttggggaaactccacgatattaataatattcataacaaaaccagtcattgtcttgcaccactccaattaaaaaaacgtctaataactttacttaatattttattgaccctattagtatttagtagaaaaataatcgtgtgttgggtgtgagtggtggacaaacaactctgacattttatttaaacaactctgatatttaaagaattatagttgcacagagcatcatattatattattgtttttttatataaatttacatgtaaaaacatctggcgcctttttttaattaaaattcgatatactgtgaaggctctttgctacttaacgtcgtccattgaattaggatcgcacggaatggtaatttgaagatttttatcatgtcaaaaattgataatatgtggattgaagtttagatgataatttaagtggtgatgcattaaactactagactatgtatcaattcaagttcaaactttaatgaagctggatccaattcaccatactcaaaaagactgatttatttttattttttttagattgaaattatggcacgttctaaaataactatagacgaatttggtagaaatatatattttcatcttgaaattttatgcataaaatattttgagacgaaatatttctataattagaaaagtctaaaatttctaatggttttactatagaaaatattccaaaaatttatatatacaatctaaatttaaatttgttcatccattgtgaacttttgataaattttactaaaattttagcattggtaacatactttattgaagtttttattttgcatctgataatcttcgaaatacataaaaacaatgtcttataattattcaactattttctgccacccattttgttgagggcactgtgtaaaccacatttattttgaatttgacattcgtttttattatatttcttagttttgtaaccaaaatatatattttattataaaagggtaaatcttgaactgatccaaatcagactaatatttcagtctgtagtataccatgtttctagctacacaatatatatatacagctacaaacatggaaacagaggaaaaaactcatctcgtctcatattagatcaacatggtgaattctcaactgcgatatattaataacaataaaaattcttaacactttcaagaattattgtgtctgttatggcgtgatcacttaagctacctaacccatttataaataaatcatgacagtttatttgttttaagaaatccattagtgtaatttacaaagaaaagtaagcgtggtcccaagatacgagtctatgaggaacatctgaaggattaattagcatttcagtatgtatttaatttacgttttgtgtgattgccgttcataatgtgtttcgaatatacattaatcttatagtagtaaactatacataaattaaattagtcgagttacaaaaagaaaacaaaaaactgatttaactctaaagatttcctataaagaaattattcttgaaatttcggaaaatcatcttatatatatgctacgtaaattcttatggtcataactcataataaaccttagtaccagtttttggaatttagatattgttagaatgtgcagacacaacaaaaaaaaaatgttgttagaatatcatcatgattatatttcatacgttaattaataattaaggttcgacctctctctcgctaaactccattattacgaccttgttatcttagacacacaattatgatcactaaacatttactatactatttaattacttccttgatgttgaattttttgctgtggccgttgaaccaagaagctaagcaaggaatcatcattgcatattaaaattatatttgtttgacagttctttaatgtcggtttagcaaatagtacgcctaaaaatatttattgccatttcttgtgcaatttattctgtcacatgtcaatgcaaaaaattaacgccttttagatcaatattgatttagatgagtacaactatttttgtaaaattttgttagggtttgtagtttatacgtattttggcattgtactaaattttgtagttcattttatttatttattttgtaattcatattttcgtagataagtatagtttgtgataggatatgcccctttatgtttcctagcatgctagtttaaccacattctccaatgctttttgttatcgagattatgatccaaatttatatagtattaaacgtttcattgtcacaaaatcatttccccttaggaaaaaaagagaaagtatctcgatatacaaacaaacaactcatgtgcccaaaaggttaaatgtcaacaccaatagcaaattaccgaagtacccttataaccgccttaaatcttgttagccaatgggagatgctcctcgattgtgtgtcttgtctgagtctgcgattggttaatctctaaacgtctttggcctatcattaggcaacgtttagccgcaaaacccctctcctattagttgagtcatattattaatttcatcgataaaacaaaaataaatactaatagaaaaaaaatcaatcaacggtcctcgaaagcataaaaatgtattaaaaaaaaacaaagttccttgagaacaaatgagatctgaacatgtgtgacttgcctattcaaagacgacacttgtcttttcctgaattatgtgatggtctatcatagactatacaaggacgagtgtttattggttgattgaattaaaaaggtacaacgaaaagaaaaagaaatacataaaaaagaatgtttttgatatttaactaatctcactttgaaatgaaacctttttaattagaattgaattatactaatagtacttgtactatgttgatgtggaatacttacctaagaaaattagatcagaaaattgtataatttatacatcaacaccaacattgttttctatagcatcgtattttatttgtgtcgttattcacaaacgttttgtaacataatttaacaccatagattttgttaattaagcactgttgccattctcatttatacacatttttaccgtttgatttatccttagtcataaaattgttacattatctgatttctttatatatatattttaatttcaataacgtttagtatattttgaagggaagcccaattggtagatttaagtgatcaagaaattaaaaaaactcgtagatcttaatatgaataataaaataatgaaaagcccagaaatttttgtctgggaaatactgaaagacaatcacagctcaacagctttttaactcacctctcactctcagatcattcctgtttcatattcatctctctcccctctctccctctatatctctctctcccttttcgacttgagagtttgggtcctttgggagaaagaagaagaagaagaaaaagattggattttgttcactttaacatcttcaatctctaaacccacctgagttttctccatttctctgtttggtttcttgtcagttttcaagaaagcgtccaaatcctagatcctctgttttctcttctctgtttgctttcattttctctggattcggatctgaccactaaagagaggtttatcgtttcagacaacaaaactcaaagatcgaatctatcttttgtccttagagtctggaaaaagcagctctcttttgatctcctctttagattcttcaaagctttagatgcttatctctctttctctctcagattccatttgaataaatgccattttgacagatcaaatatctcccacttttctctctctctctctctctctctctctctctgtttgagctccaccattatcgaaaactctgtttttttctttctttcttgattcgatcaacaatcgttgaaaacatgaacagaggaatcgaagttatgtcaccagcaacatatctagagacatcaaactggttgtttcaagaaaacagaggaaccaaatggacagctgaagaaaacaagaaattcgaaaacgctttagccttttacgacaaagatactcccgacagatggtccagagtcgctgccatgcttcccggtaaaacagtcggagatgtgatcaaacaatacagagagcttgaggaagacgttagcgacatcgaagctggtcttataccaatccctggttacgcctctgattcattcacacttgattggggtggctacgacggagcaagcggtaacaatgggtttaacatgaacggttactacttttccgccgccggaggaaagagaggatccgccgcacgaacggcggagcatgagaggaagaaaggtgttccatggacagaagaagaacacaggtaaacttaaatcatctctctacgttaacgtcaatgcttttcttctctagatttggacccctttacactttcttttataaaaatacgtacgtcttttttcttggaaacgtgtttatgtatacgtataaagatacgcatatcgtataaatatatatacgtatgtaatttataaaattaaaactatacagtcatccaccaaaacaattgtatctttagtgcgtgtctatatgacctacgtatgggttagacagagaggcagacacacacacattattttgtagagtagatactttacatgtttatgttaatctcaaaaaaattatttaccctttttttatgtatcgagttaataaatctattagtaaactatatacagagcagataaaatttgtttcttctaggctcttgatgtgtggaatgggtttcattggtgtcttggtgcggttatttgttttgcacgcatggacattgtactgggacatggaacattagtataaacatgagtttttattttggctataaaatctagtttagttgtttgtatatgtgttaagagtcgatttggtttatttaggttttggtatggttaatgaatgtgcagacaatttctgatgggtttgaagaaatatggaaaaggagattggagaaacatagctcgtaactttgtgaccacaagaacgccaacgcaagtcgcaagtcacgctcaaaagtatttcatacggcaagtcaatggtggcaaagacaaacgccgttcaagcatccatgatatcacaaccgtcaacatccccgactctcctgacgctgcagccgcggataacgcaaccgcaaacgcaccttgctcgccaccttccgtaggaggaaaccagcgggagacatcggagtgggaaggtcaaacactatacgatgaaacagcagctgcgttttataatcaaaacgcgttttcagaaacgctacttggaatgtcttcgacgccctacatggcaaaacttcaggagcagagttttctgaacgcatcgcaattcgaatcgtacaatgcgtatctccaaatgtagctcacaaggtgaagatctcggagaagttacgagttatataatcattaataatttttgttttttctcttaatcggcgtgcatatacaaaaaacaaaattagctgctatttttttattacgagatacttatttgttgttttgtttaccatctttttccgtggttgattcaacgagttttcagcaaattaattaggttttgttattttaattacttgagtgatttatttttgtgatttggaactcttttgagctcaaattgcttattaatctatgctgtgtctgtcatataggctttcattacagtatttttccttgttggtggatatttataattaataaattatgattttaaatctttgttagatattttgccactttccattttctctttttatctcattgtgtgccaaattttagttttaataatggttgaactctctcaagtttcagtgtcaaaattgaggctaacaatatgtaggatgtctaaatgtaaaatgttaattacaaaaaataaaagtaaaaatcagttttaaattggttgttctggtatagaatgaattatctatttatgaataagcagccaaaagtatgtaaagtgccaagtgggttttccactaatcaaagattatttaacttgttgtggtgacaaatgtgtaatcgaaacctggctttgtggtgataatgacgctttctcacttagcatacatctaaaccctttttcttatgtaattagaatttagttttcaattacttttattttcccaactgttttatttaataggactgtctgaagttcgaagttgacaagagaatgagaatctacagagagtctaaagaaagaccataaataaaaagccacaatgattgatatgcttttgttcctcaaccaagttggcaattttaaatcctcatcttgggaaattaacattttttttttttttttttttttgttcatcttttgtattgtatcttctttccaaccatacacagtacaattagattcagaagaaaataactttttattccaacctttggatagatactaaaataataatgtgattttcataagagcaacattttaacactcatcaaaggggttcgaacataggcaaagataatgatggtatttagaggtatcaggctttaaaatgactttctgattatttaactagaataatagtttgcagttactttttttaagatttaggaaactttcaaaattttagtgaatttgttctttaacttgatgttcggtgggttccattttgatgccttgtgactgtgagtaatacgagaagtatctccatgtaattgcaaatttgaatttgaaggaagaccgttgattcccaattattcttgtaaatctattttggactaaattctttattttccataaaattcgatttgtttttctaaatcttgtcctccaatttaagtcataacttactttatttgtttctaaaagtcattgaaggttttaatggttcagttttaaagtgagctgatgtcccagtcccatttagtctttggtttattaatgtgtgtgcaaacatggtttagttgcctgaagatgatttgaggatttggtcaaaaacattgagagaattcctttttaatttctcttctatgtttttccgaagccacaaacgcaataacctcatctaacctcatacatgtataattgaaacattgggcacacaacacaagtactacacagaagcgattatccttcgatcattttcttgtgttgcaccatctttcttgttacacactgtgtacctataggttacaatgaaatataacaagagattgaacatgcaaaacactgttataacccaataatagttatccacccggctcttgtttattgtgtcttgaaaccatttgcctccgcttacactgcccaccaaactaacaagagcaatgttgctcatgatcccgaccccgcacactcccacgtttaatagaaccatgtattggctcaactcttcaggcaccgtttcttctaggtaaagcgcaaagctgttttcgtagattcctgtgattgaaccgagtagaatgtactgtgggagcagccagaatacactcatggggacagtttcatgtagtaaaccttgagtactaactactttgagcctcctagactcaacatgtgcagcgatggagcagcaaaatatcgataggatgatggagactggtataccataaggcgttttggtttgtttaggtgattcagggaagtcaatggcatggcgttttgcagccatgacacatagttctcgggatcctagccttgcagcttcactaaagagtaagaggagtgggagaggaaggttccatgatccgaacttggagtccatatggtttgcttgttcaaggaagaaagtattaccaagagagaagacaatccccgaaatgagagatgtcgcaaacaaaggaaccgtgcgtatgacgcttttcgtttgctccacttctgtcacccgacaaagcttccatctgtttttcctctgttgttccaaagactctgtttggagtatcattgcagctctatctagatacctgtgtttgaaaaaatcaagagttacgagtgttatacagtagtgtgggttaacaactcttaatgaagtgaatttttattgaaccttaagctgcttgtgtggggcttaatatcttgatcacactcagctttttcatagagctggcttgagttgttcgagtatgcacaagacattttggaagcagaagccataaagacccggaaaaccgttgtcaaagggctcccacctggtttaacccgtttgtatgaacacgcaccggaaataaaaatcagcattgctaatacctcacagcccgaggggatcgtgaacctaacaaaccacggacttatctgaggcattgcaatagcagcaagtaacaagaacacaaaattccccacatttccaatgacaaagctaacgagcttggcggggtttcccttgttcctaccgtcttctagttggtcttctgtaaatactcccaaagagatagaccgtccaaatataccaacggatataaccgttagcgctacgtagaacaggcccttttgtccattgcctgaaagtattggtgacgctgatattgccaagaacccgaaaccctgaacagaagagagcgtaaatttcaattctagacaaagaatataagttagaaccatactacataaccaaagttaaagaggaggtcaaggtcttacgaaactgaatgctaaagtagagagacagagcatccaaaagtgaccaataaatgcatcaacaagaaattgcatgccaagatgaccaatagctgatacaccagcaaacacatttacaatcgcagctgcgtctgtgaactttagcttcatctcgttcgtcaagtatagcatcaacatccagagggtaaaccacgcaacggtaaaagcccatgacagaactgacatataagaaaagaaaaaacatgatgatcaagaaaccaataaaacaaaaccctagtgattacaagtattgaccaatgtggcatcgtggtgaaaatgttgaactatcaaacaagatcaaaaagcagaaaccacatctcaactcaccgatgactcggagaaaagacgccatatattacttctcatgtggaaacaaaatcaatgactaacaatgctatcaacaaacagaacaccttcagctctacagataaatctaatgaaagcaagatttgaaggtactgatcaaaattgacccggacattcaacagaaggctaatggaggcatagacgtgcttatagattctataataaaatataagagaccggctaagataattctttatcatactctgttatattggtcataaccaacaaggctggttttattgataatgttattcaatatacagaaaactgaagataaactaactattttgtaggagacctgaacttttgccagttcataacaacctatagttaacacatacttgacggccaaaccaaacaaaatccattaaagtaagaaaacaagacaaaacttacaaaattttattgtgggaacaaaaaaaaggtcttacgaaatatatctcagtctcaccaattaaaaccgacgaatctgaacatagtttgatcacccaaactcaaacgtacacatcacgcatgattgctcgtcaaaagtgaacaaaaaattcatgtcacacggcaatcggaggaaggggatagagtctcgccgcaatcaaaatctctgccgccatatctctcatggtctacgaggagatacagtgggaaaagcgccggcgaaacgaacggcaatgagtcgccggtgtctgattttgtggatcaaggtttcattaatgggccttaaagcccagttttgacccaatatcgaatgacctgttgttgccttggaactttgtttccttttcaagcctatataaatattgggtctaaactgggctttaaggcccatttatattttgttctttattcaagttgatttctgtcttgaattcatatatctaagacttttgagataaaacgaggtatttttcttagacttttgtcaagattttgatctcaaagtcaagaagtaggtcctctcttaattcacacatttacgtaacgctacggcaaaatcaatattagtttgcatatactaaaagcagatactcaaaccccatgtaggggtcgaattagttgtttggtgttaaattgtttcatctatgtgaaaccactactaatgtttaacaagttactacattcatatgatccccagttgttccgtcatatcaaagacaataaatagaggttaaagattgaaaatataatgtggaacaaattggggttgcaaacttgcaaaaagaaaactggggagttaatattcacataaaggagagtctgttatcgcagccaagggttgttcaagtatttaagacgctgcctaagtagataccctagtgttatggaatttaggccaagtcaaaatcatgtgactttagtagacccaacattggacatagatcttgattatctattcattgtcccacttatagatcgagcaacttgatagtataatatgctagtatctaatttctaggtgtactttgcataaacatacagattgatatgacctagatagcgaactaatgatccacctaactagattggtcgattaaattgatgtgtttcttttttcctggtaaactcaaaatttcaaaaataaattgaaatcattaaattaagcgaaaaaccttctattgttatttcacctagagacactgattggtttctttcttaagacctttggtctctacctgtggatctaatgaaaaagtatgatcacttatggattcatcaagaatgatttggttactagatcataatcaattagaagttcaaggcgttttggtgggattctcatagacataaaaagaaaattgcagtcagtttgataatgatcgagtgacattgtatttttgcttatcaaggagtctcctatattatgcatgttttaaaatagtaatatgcaaaaatcaaatatatgtcaatcaacttcgtcgtcattttttatcgatttaaaatgcataaacaatttgtgaattcattgcgtttctgtgtatattcttgacatgatcatgatcgggcctactggatctgacttatgatattacatccagacgtacatttggtctttgtgtttattacttgtatgatattagtagaaaatgtcatctcacaaacggaacggtcatagttaaaaaaaactttctccactaaatgttttataagaaaagtaatatgttactcgtagttaattttctaacgaatgttatatacaatcacataccgatacttttttctttcttttcttaaaccgttattgtactaaatgtaaaacttgaagaaacattcaccgaagcagagaagataaaggtaacaacaaaaacaaacttatcaattctttgccccttaagtattgataattaaccatccaaatgaaaaagattccaatctttgtattatttctttgttttctccatcctccgatcaataatcacgtcttctccttcttcaccggaaccctaccgtcagtaccagcaagcattgcgtacttatcctttcttgtgaaattggtgcactcaaaacctaaggttcctcccaaaaccctctgtatgtaattcgcaacctctatcggagatttgcctcctttacacgtcagctcagctggaatctgtttgaggaacgtgatctcatacgtcggcctcgggttcatgaacgcaaagtaaggatcaagaagcttgtatccacgtgtggtggtaccattgaacatgctctgctttgtgttgatcgccacgggaacgatccggtccgtgagctcagcgaaaagagcactaaaccggagaaggaaaggctcacggcacgtggttccctcgggacatatcacgagatcgccttcctccaaaagacgcttgatgttcgctgcgtctttctcacgttgacgagtcaacgcaacggctttgattggtgagattagctcagagaacttgctgatgctgtaagtgacgcagctgattttccggccgagtgcgacagctgtgaccacaggatcgagaacggtgcggtggttgcagaccaaaagatggcctggctggccaggttttggcggcggaggagggtggccgttgacgactagcttgatgccagtaagcttgtagttgtaacgggcgatacgttccggtaacggaatattcgtgtagacgcggatgatagagaggacgaaaccgacgggaagccagaggaaagttaacagagcaactaacggcgttgggcgttggactaatctgccctcgtggaatattatggggcttaagagtttgtttcttggtaatggttcgcatttcgtacgtggcaccatgtaaccttcctgcagtcagtaacagaaaaaaaaagtacgtaaattatttctatgggtcaaagtacaaaagcagttgtgatttgtacgtaattgtttagtaccatgcatgtttcatttttctctaagtatataggagagtggacaccaaagtcacgagagatatatatgtgtactatgaaatttattgatggttagaaaaatatttatctagattacatatatgtatatatactagctagtttattaggataactattcgaagcttacaaaatgaaaggagagtcaaaaacgaaaaaagaaaaataaaaaagagagatgatctttaacaaacaaaaaaagagagatgaacatagcttttacatgaggaaaataaaaaccggtaattcgtgtatgaggaacctattcacttgagagtttccaaaaggaaaaaaataaatactgttctttaaccaaagaaaatgctattagagtattgtcaagtgacccaagtttctaaattcacttgaaaggttccaacaaatctagaaattatattagcatatgaaaaaccaaagtaaattaagatatggtcatttaggttgatataaaagtttgtaatggctgactattttttatttggaaaaaaataatgtcgtaaaaaacatttaattccagtgttacacttctaagtaaaatagcatgttatctagaataaaacattatgcttttttataacaaaagatatctaggaaaataacacccacttttttgttttcctaaaaaatatataatacctttaatagttatatacctaattttatcgtcatttactgctacacatcaaaaaggtataaatatgattggcccaaatttattaggaagggcagtaaactccataggacaacacaataattatttataccaaagaagctgcaccaacggacaagttccagagacacatagttgtatatactcataacgtcctcgatcgatattatttaatgtcggtggatagtaagaaagtaatgtaaaacgacaaaccaaatttaaaaagagatgatgacggaaataaccttgcagatggacatgaagtcgtggtccgtcttgctatcgccgagccccaaatcaggtaaatcagacgctaggccaccaaactctctcaaaacgacgtcacgtttgtactgaccgacgagaatacctggttttctggtgaacccggttgcccgacccgatttggagacctctagctctgttccaagaactttatcaactcctaggaatgttttcacgaatggctcgaccataattcgagggctcgcagttattatgtaccgtttcccgaacgtgttgaagatacgccaggtatcgggcctcacgtcctccgcatagaacctcgggaggacggaacggaccactagctcaacgtctcggatcttgagacccgcgaacgtgatgaagacaaatacgttgatggctaaagtctcggagatggtcaagtacgtaagataaacgaatggtacggacacaagtaggatcaacgctcggagcaagctccctgcctcgagggctacgaggaaatagtaagggaaggcgctacgagagattagtagtgttccgtctagatcagcggccacggtatggttggaccggtccttaacatcgcactttgatatctgctcgaaacggcgccgtttctcctgagctcccattagtgaagaagttggagagaggagaaaagagaagatagagagagatagagagagatagagagagagagagagagagagagagagagagagagagagagagtggggagatttggaaggtgagaatggatatggattggtgaatacttttgggagtgttgtttatataaagagaggcgagagagaatgggcatgatattgttgttgtggtggtttgatattagtgtgccaaagaaatatacgcgttgatttttcaaaggtaaaataaaacacactatgcataatagataacaatatctgcgtgactataactgttgtcatgtaaactaagtagtaaatcttcttgattcgtaaggaagttatcttcgagataatagtgccaataaagtggatatcaaatatgtttaattagggagaatagttaattgtagaagaagttgtttgagacgtgtgaagtagagagaaaggagagttaaagttggtgaagaccgacaccaatgtattgaatagccaaaacctatttgagatgttttttacgttgttgaaggcccccacgcgccgccgttttatagttagagcatccacttctctttatatttagatttgagaaatttgaaaaaaaaaaaaaaaaaatagtatccaccatttgtaaatgtatcttcgatcaacaaaatatgcaaaactaacttccaactcataaaagactcgtagtataacttaaattacgtcgttttgaatattaatcttaaactaaaaattgtgagaaagtacacttgaccttttgaccctcaaacaaatacaagtcatactaataggtttaaaagatcactaaccgttaattagacgaccgaaataggtttaatgccaaataaaaaatcgaaaattaatcggagtcactgtaattatggtcgccacggtgattttttgtacataactaaaagaatgattgatgatacctctttctcttattgtactaaaatctaaagttcaaattctagactaaaatgttaaagaaaactatatggaaactggaagaagcatctatatcatgtgtattgtgtctgcatcgttttgacttttgagctagccattgtttctgtctataaatctcacacatctccatctacaatcagttttgggcttacctatccgataatcatttcactatttaaaggttcacaatgttttgacgattgatgttacgcgtcgttttaaagttttttttttcagcttgtgaatattgataataattttctaaaagatcattcaccataacaaaaataaaaagaagttgcatgctatttaccatagaattttgtggaaaaaacaagttgcatgctaattacggtagaatattgatggaaagacaagaaaaaataaatctcattaaaatttttgaatggtaaactaatgagacttttgtttaacacattatcgttatttcttaagttgtttgtctgacccattgaaactacggttgcttaggctcaaagatcagataacttccggggtataacatacttcaactggaagatgcttttcacgaaaggtgctaatcaagtgctttctcttattttataaagaaattgtgatagatttgtgagtctacatagttgaagacttctttaatagtggacgtaaggaattttggtaattaaatggatatatgttgtcaaactacaatattcgtagaattatcgcaattcgtgcaaaatacctcataaattatatatcttgatcgaattgttgatcaacggttttaaatatgtatgtcatgtctcaagttcaaatttcagaaatgtaaaaaaaaatagattctctaagcaaatttattggaggttttagtgtgtagtaagttgttgtatttttgtgaatgacgcaaaaaatatatccaatgtagttgtcttatgtggcgttggaagttagattcagttcttatgttgtaaatggttgatcatcattgtaatacgacaacaaaaagatgatgatttagcatagggaatctcttttttcaagactataaaatgtgaaataataatcaagggcacttacaaaaagtctgttttgcttcttttttttttttctcttttttcttggaatagttctttcatctattaacatacaaataagtaatacaactgtttgattagttggaggaaaccttaacaatcttttcccagtgtaaagcaaaataaaacccttacaaaaaaaaactcaattatgttggaaacttaaaaagactaacaaaaggtccaaattttgtttgaaaattcagaacactttgatgctgcatgctgacattttttttaaccaaaacgtaataaacaatgttttcatccaaaaagattaagaaaactatatatcttgttagataactctctagtcatacaggaactaatttcccaataatctagtcagcgacaaaaaggcgtagctaatctttcgtgaatggtttgatctcctacggcttgaaaacgtgtgtgaaagaattctccaactttaagtctataatcaaagacgtgtaatatatctctatatagtttcgagggtgaacttcaaatagacggtggataaaaatcgttatcagaatctgttacatgcatgtgatcagttttccaaccacaaactgtgatagatttgcagttttaagatacaatgtatacgatcgcttttatttctaaactttttaattatccaaatttaatggttcaatcaataaaaatgttcgaatatgcaatatgcaatttcaacagttgtacaactaaatggtgatctaattccgaaattaagcttcatcccaaatatgaagcatagagtcacaattacaactgatttttcaaaagaaaaatctgaaacagatttacaatagatttttgatggaaatttgatacatgtgagtattgaacaccaatataactagcatgtaagtacacaatgaaatgtgcagtactatatgttcatgagttcatcaattaaaaaaaaaactaaagaggtatgcatgaaatacacggtagtatatgaatatcatcgtgaaggcctttagaccaacaagagcggaaacagtcgacacttaccatcatctcacgtgttattattattatccttacacatcaatcacgcttgctctagtaagatgttctaagtatgctagctaagctaaaaatatggtcacatatctcatgtggaagatcaacaagtggtcgacctatccatctcataaattaatgttttggtaacccaaaaatgttaaactctataaaataccagtccaaacccaatatgaaagggatctcaaaattgaaaccacgattcttaattaaagatcgaataatcagtccatacactgttctttttcgtgaatttaaattagtattttttgacttgagcatcttctgatgcttataaaatgattataatagaaccatatatatagtctagtggttaaacctcaatggaaaatattgatctcctcacagtttcgagtctccatggttgagtttttgtcatttttcattgtgttattaatttttttttctatttttgtttcaaagccaaactaagctttaggccacatatattctaggaccggccctgcctctagtatacaatttcagcggtcacgaagacctttagtgtcttccgatcctatttgatatatgtcatattcatgtctcttgttccctttttttttttctgtcgtcatgtcacctgtcttcagtttgacattttcgtctaacaagaaatcgattccaaactgcgacgttccggtcacccgtaagagtagctaagtcaattgtttctacatagtttgtcttcattcacaggactatataagttttactataaggtacttcaatttttaaacatagatcttcccaacaaattgcacctattagtccaccatttctttgtagcctaatttcaaaaattctcatattggtaataatcatttaagctcgaatcacattgtaaaagcattttggatcttacaaacaccattatttcaaagtacaaaatatggttgtatatagcatcagctgcttgttatttcgccatagcatctctaatataaaatgttttctgatgatgaaggaaaactaagaaaagttttcttgaaacgtatagaaagaaaatttagatttccagactcatgtatatttatgattttcccgttttattagtaggctcaatacctaaattaagtaataccacatggacattgatgtcgcctccatataatttaccaactcaaaggcataagtgcgttgcatttactctctttaactatatagtatcattctgaaacctagacttaattctactttttttaaaaggtgaaaatattatcttttctgtcaaaatcttttctttttttctttttgcaaataaccttgattggttggtgattattagatgcacttagtaaataaaaaaaaattgatcaaatgtaagaaggaaaggtcttaacctcctcatttgtcccacctaatttatctgtatgccttgacagctccgtcaagctataattctctatcacgccttcttagtcaaataccgaactctctgtttttttctcattggctaattatcaaaataatcaaaatcaatatttagcatgttcggcgcagtgacgttagcgaccactttaacgacataaatagaagctgacggttgcaaaaaaaacggtggtaagaaaaaaaaaacataaagataaacggatttgatcgagttacattcaaatgtatgtaacaacacgtaaaatttactagttttctaaaactatggtatatcacgacagaatctttgcatgtatcttcactatgagcacctttttcgaacaacgtgtttgcattactgattctggagagaaacaaacaactttctctatacctctatacgaatcatagaataacctctccaattaatgaatcatggtgcaaaacccctttcttttttttacttttttataaccacgatactttttttagtgactctatcggtgtcatctcccatataacacatgctttaaactctaaatcaatgacagtacgtttgttgcaactttcgatataattgtggtgtacttgaaagtttatcttatgaagctttttgaacggctaagaatctaggatagaccaagcttagtcgggtttttgggctttaatgaaattgggtctgatgttggaagctgagcctgtttatttatagtggggtagttcttgtacgagcctttccttgtgagaggttgggccgatagatggttttgcttgtacaactaataaatgtggcctcattatatggtcacatgccgtcaccaatttgtaacggaacattcatagcaatttgctagtgggactagatttggctcggttgttaaccaatgacagttttttttttggtgaagaaagttcaaatggctacagttgccatgaacatttttggtttgttacaacaatccttcactatatcaaaattggccaatatatattgcaagttagtgtttatatggtgatgcctttaattttattttagaaaatgaattgtctataaataattgttttaaatcttttgatgaactttaataaagtagcgtaaaggaaaatcaaaaagactatttaagccggaagctcaggctcttatcttttccattcaatgtctgccacctcctgtcaaatccactcgtgcaatttaagtaggaaaatataaagacataaaaatctaagatattattaaaaaatcgaatgggagacaaaatcaatcaagaaagtggaaaatggcctctctaatttttttacatttacacaaaatatattttatctttatttcgacgatgcgttattatgtatttccataagaaatcaaccgcaattaataacattccaacgaagtcgaaaatttatacgaaagttaaaaaaaattcaccaaaaagaagtttttaaaaaaacttcagataattgacataagttaatagaatttgatcagaaatggaattgtgggctagagactgggctccgtaaaattcctaattaaaatatagagcccacaacgaaactcgatattgtcaggactcaggacacacacgtgcatcagtagcgcgtatagcgcgtgtatcgaaatggcctagtctgaaaacgctgattttagcctaaatacgtttcgtagaaaaactcggcgcgtggaacaatccatgagcatttggttttatttttcattgtctccataatttatttcacattacaaaaaaaaagggattttgtaactaagtaaacaatttttatttcttagtctttattcagtaataaatcgaaacaattgttgtttgtatattaagtgtacgaattcaaacaaatacctttataataatcttactacactaaaccaccaaatttttgtttgttaaagtcaaacaaaattaaaaaaataaaaataaaaaaatttgaggacataatctatccaaattttatatccggaatgaatgtatatgataataaattattaaatgagctctcaataaataccacgcgacattcacgtgccttttgttttttgagatattgactctcccttcgttttctatcgttcgatcttcatttcccaaaatgtttgcttcagttcttcaggtcgttaaagtctgtccacgaagtctcgaagacaaccatttcaataacataatcgccccttggcttttaaccaagcgacctagagatgaaatgtaatacgatgggcaatcggtaatttctgatatcaaatcatttgttgtgttacgatcgaatgggtcctcaagagttacttgtgtttttttagtggggtcagtttgggataacgtcaaacatatagattctaaagaaaagataaggtataaattcttagaaacaaaaaaataaaataaaagttctaataggatacattgtatagtagggaatgtaattagataagtttatctaaaaacttgagaacatacgaaaatgtattgatttttttttttttgggacaaacgcgaaaatgtattgatttgattgtaattataggaacatttacgaaactaaaatatcatgaattttttttgtcatcattcaattgcaagtgacgaaaaataaataaaaatttcaagtatgaaattttcatggatgcgggatagtagattttaattttttatttatttataaaattgtgttgattttgttttaaacctcgtgatgtgaagttttatagaaatttgtcaacttaattttttttctcaaagctacccaaacaatcatgaaaaggggataaaattattagtactaaaacttttaacatatgtggagtactagtcgtccccacttacctactactaaaagatgaaagaacacatttattctcgacgagggctcttttcttaatttcaacttctttttgtgataatggggtttaatttcaacttcataatactatttttttgctgttaacatcgatttgaccctacacacttaacattacatacaccaccacttttgtgttaatggtccttctttcatcgtccctttgtaatggatctttaacaaaccaaaattagctttccgttcattttattttattctcataactttggaaaaggaaacccagcctgtggttaggtttatttctttttctctggatatacgcttgaccttattatactaaataaactttggagaaaaattaagagaacgctttttgtttggaattctagcgtgtgtaaacaaatgattttcttgtgtacaggtggatatgaatttattagaaaacgaaatatggtggcctgatgctcacatgaatccaactaataattcaaatcatcttcgtgacccattgaaattcttcttctctttttctaagaaccattgaaattcttacacaagaaagcaggtgtagccttttctttagctctgttttgtaataacactttattatagctgttctggttagtaaaaaaaaggtccatatatagaacgatacattatcatggcaaacccgaaatacttacaaaagaacgattttgaatcatattttttttttgattaatatatgagaaactttcaccttattttacaagatatcataagaaaaaaaatgcggagattaattttttgaaaatgtctctatttctcgacaacaaataatctctaagataaacatcaattagagaattaagtttggatcgtcagtaagagacccttagaaagagacctttaatcatcactcagtaactaggcctttaagaacctttgtgggttacattcctttctagctaagtcggacctttgctcctaagaagggtcaaagtgtggactgtggatgattaacttataaacttgtacgttgagcatgatgtataaactggactatgtgccgtatcctttggatgttgattttgattacttacgtgttagctaggttagagaaatgagtcaataaaccaaatgaacctctagtgacatttaggatattggtaagtgataagtaggtatgtgtcctaaaattggcttgcatattaaaaataaaataatgtatgctatacctcactttgttttatgtctgagttcataattaactcctactcttagtatgacgttatgatctactttgatcgtctctcactcttttacgtaccgatttaacgccaaatttatcaactgtatgttgtccgttatttagttggtgcgtatatgaataatgtacctcgttatgggatttgtatatatatcttctttcaatatatgtgaacgaaaaacaaaacagaaaactatgattgatcccttccttctgccagaaaagatatataattgttattttgttttcttttttttcaaggtgaatacaaaatattgattgagcacagaaatatctacggtagagcaaatggagagtaaacaagatttccattcatttattttctttggctacatgtaatgaactgtatgtagtcgaacgacgaattaaatccagacatatctcacgtggtgttgtatcgggaaagttaagcatctgacattaataacacaaacttatgtatttatatgcagcactgtgttttaattttagtctcatatgtgggcattagtttatgcagttccttcttctctatacttatatatgtactttttagtttatactttctcaggtccattcttctctatacttatatatgtactttttagtttatactttctcagggtcaacaaactcaaaaattataactacgcaatctgaaataatggagaaaaaaaaaagtcaaagatcaatttccaccttagaaagaccaaaatcttacacatacggaaaaaaataagaaccacacttaatgaatatatacctcaatgatcacttgttcttatatttccagcacggaagcttacgaatgtttccctttatgttcaacttagcattaaaccaaaaaaataatgattttgtactaaattactctaattttagatttacagatttccaaaacttcttttaccacaaaaaaaaaagggaagccgaaaagtgaaggtgagactcttaaagttgtagcctgtaaggtacaataatcacaaatgcttcatgcttggtctaaagatattatcatgcagactcatgattttagttaccgcattagtttgatgttaacatagtgcaccatggagcccctttgaactaaacatgtttctgaatcatcatccatctttcaacatatcagacagtataatctgattcttcaccttattaagacacattttttgttgaaaaagatttattatcataagaaatttgtctattagatatttagaaatttgtcaactagatcacagccagtccatggtagtgtggatacttattttcaaacctcacatgtatagtacttaaactttatttatattggatgatcttttctcattaccattttttatacttctgaattattttataagtcaactctacggttaatattggttgttggatggttttgacttttgacattgtaaacttattcatattgttgacctggaaatttaataatataaattgagtacacagatatgactcgacctatatagaggcttaatcaaatgagatggaacacatcgggaaagtaacgccggcgacgcaatctcagccgcagccgactatggtggtggctgtggttccttaaatcaaaatgtttaccgacattttaaaaacatttattgcgatctaatttgaaatcttgaagagtgaaaaattacctctccgaatctgttgacttgggtttattgtagccttatggtactatttatggcagtgtctttttcatttctactcttgaacactttcataaacgtatgtaccatgtaacaatgaataaaatttttaatatatgtgtagactaattacgtcatgctggtgtcactttcgcatctaatcaaagtattaatttggactgtaactacagtaagaaaaatcgcctaggaacactttttcattccactagttttctatcaatttacgagttttggtctctaactaatttgtggattgttataacaaataacgtgttcaacatattcagtatataaaactacaaataaatatgagttgtgaaacacgatttttatttagatatcgaattcaccattttaaattgaggaatagctactatattttgactactattttctctcttctaatgttttttttaaagagacattctctcttctaatgttctcactacataaaagtattattattattttttgtaaagattagcatttattcttttcatcttttgtattattatttttgggtcatattcttcttgactaatttagtttaacataaataaattgaaatattggatagtttaacatttattctattataatttacctacatatggaaatcatgttgcagatataatgaataggttggtcaactaaattagagcatcggtcaaagaatcttaaagtaaaatccttgggaaattttaaaaatcatgttatagttgtgccatggagaatctacgatagattcaaaagttttgttgactacaccaaatagttcaaaccaaatattcattaaaaccactcaaaagccatttcaataatccataaagcaagagaaaatgataagatgtttgttccttggtgtcgtttcagataaataacattcacaaacaaacaattttccaaactaaaatgattttcttgcactcttccttgtcgacaaactactttattttcgaatggcatagagtacaagatctgaatatatatcttattttcatattaatagaaatttatgagaattaactgcttttaactatcaccgtttcttataaaaactggtcttcaaaaaactttgttcataaagaaaaaaactttggccatcaaagtcgaagtggaatctactaagggttcgtatgccaatcaaatattgatagttaaaagcagttaactagaaacaaatgaagttgccgattcatgcattaataattgaaacaaatgaagttgccgattcatgcattaataattcatcaacgataagaaaaataatatatcgatttttttttcgtaattgagctggaatatggtctgttgaaaaaaataaataaaaaaatctagatctagtaatggcatatatctgttgttttacttatcaattacacagtagaggccattcaatacactttttaagtgggatgtgtttaaaatttagaggatatccaacaaaaaacactttaaacaaatacaaaaaataaattgatatatttctttcctttttttttacaaggttatctaagcacatggaatcataagtaaaaatggttgacaaagaattaaaaaggtggaattgaagataaaaatcaataaaggaaaaagatataaaaaaaaatggaaaggccgcaaaaaaaaggtggggtcaaatgaagggagcagaagggaacaaggtccgaaatttgatccccgttggaaagaccatcttctgctctccatatccttctcctcatcattacttctcccactcccatatctttctcattttccatacacatcttgcgtaattttttactatatcttttacattgtttatcataaccacaaaaattataatgtagaatactagaatttgttactatacaacaactcgttgtgtacttttctgtgcagtgttagaatatgtacagcaagtcagcaacaacccaaataccacttccaaaagggtatgtgtcattacatagttatcattacatagttatgtattgttgaactttggtcgtattcttatagttctcgtgcagatagtatataactcgtttcagctatgtttgttagaggtgtaacataacgagccgacaataactgaaacattcattcggtcttagattggtggtaaacacatcaatggctaaaattactgaactcattggtccgagggtctttattggtttcaagtttcaacgaacatgtgtttgtgtttaattttctacaccacttgttttcgttattcgtccaaatattagattttttacgaataattttaggttttatttggtggtcgtcgtatgtaaaacggtggacttgcgtttttatcttttcttgataaatatatacatactttaggctttgtttcaactttgaagacatttaggaaagttcatgaaatcaggagtaaggaggtttcataagctttcctaaatcaaaagtcttgatggctacattgatctaatactgtcgtgaaagaaaacacttactaaagcaagtttatgaaaatgttagtttttagtaagaattatgattcagtacttgctttagtaagtgttttcgttcgctttggatgtaaactacttttcttataagataataaaataattataaattttatctttttaggttagattgttggttgttgggtttatagtcatatattaccaaccaggatgcatgtttgctaagttcggctgatcgctcatttaatgttttctgaagaacttcagatgttttatgcttccgtattgtaaaaatgtaattgtcaaaaacactgataattaatatgcgagaacattaagcacgcaattttacccaaatccaatatccagattgtcacaccaacgaattttaaatcattaaatgtgttagtcataagataaaatctttttgtttgtcaaaaaaaaatcattctcaagatttaaaatctctaatcgttgctgatataacaaatgacaaaataataaaataaaatattaaatgtgttttattttacaagacagtaatatatttggtatgaaatgctccagttataaataatatatatatatattgttgatattgtgcaagccatcgcctgattttattgttttttgatccccaatttgtatctgcaaatatatgacttcaaagggacaatatcgagcggatgtgaaaagtcaaatttgatatttctcaaaatatttaatcacaactctgccaattgcataaggtttgtatgcgtcttaattaccagagtgtactataacgtgaagtcgcttatcttgtattaactgagaccaaagccacgctaaataagggatttggcagatctgacttgtaataattttgcaagaaaatcgattcctttgtaacatatatctaagattttgtttgtaattattcaatgctgaaaataattgtatagtgttggtggcgacgtggctccaccattgggcttttatagtgtagtcttccccatgtgaccaacgatacgagtctagtgtttattcatcaaatattagttattttcaaaaggaacctcactaaccaaatttaaggatttttaaaaattaaacacgagtaaagattcccgagatatgtctacatgataaatggacccaatcgacttgatggctacatcgtcaaaatttaattaatatcttgtaacaacagtattagatactatttaaattgaagaataagtcatgttaatgatcatcataaatggagtagatagtctgataggttaattattaacgataagtcgaatcacaatcatatagaaagaatgtataatatggtttattttttgtagattatcacaagggtgtttacaaacttataacaataaatcaataattcataacaattgagatataaaagaaataataacaaaattgttaaaacatcgtcaaaaagagggtacttagaaaaggaaaaaataaaaatgtgaataaaacatggaaaggaacagaggaaaactattatttgacccaaaacatataaaataaaaatgtaggaaaaaggaaatggacctacaagccgataggaggctctcaatggcaaaaaacgttcgataaaaaggagaaaaaggcatctttgtaaatgatgaaacggcggcgtgtgggggcgcaggtgttcatagtgcgcatgtttcttttgcaaagctttaaagcttgtgacttcgtggctcggctcggacttgcttagcaacttttaagtctttgggttcatagattctcgagtgtttccgctcccagcctacgccgacacaagagctcttggtcttgggttcagactttttcatttttctatatgttttaatttcgtattctttttgttgttaaagttttattctcaaaccaagaaaacaagaaataaaacacacctgattattgatctaaaaattatgaatgatggagtgtgaaaatctataataattttgagaattatggaaagaaatttctgagagtgatgaagcaatataatttttgacttttatgcatgcgtgagaaacatagatataatgtaattaaaagaataaatgacaagaattgggataaaatttctccatcaacataaattacaaattcaattttttattataatttaactttaagttcatagttggcttaattaaaaacacacacaggtgtttcaaacattatataaccgtttatctttgaccaaaaaattaataaccgattataacaattgccatctcctttaaaaaccgagtattagttattaagtattagtattgattatttttctaggtctagtagaaatgcaatttggtttccaagtgatgatcaaactaccgtcaaatcatttcgaagtgttttttttatatcagaaactaagtcgatttctgaaaaacgttgtgatgtatagcatacgcctaacttttatgctgaatgtagatagctagaaacctaattgtttaaagatggagaaaaaaaaactatagtgtcctccataaaaaacaggtcatctccgaagagttattttcaaaatcgacattaatgatcagttacatattttttaatcattatttgaaacaattattttataattttagctaagtatgtgattaaaacaaatgaaaaaaaaaaactctaaaatggagggatgaacatatttggggaagtgatagacaatgatatttcatatttaaccattcgttattgaatttaggagttgataattgaatgcctatgaaaaatatgttcctattgttagaggtgggttggagtcttgaagacagaagacgctctaatatacaactgaagtttgagttgcttgtaaattcaagttttgtataatttattttcattaactgcaaactaaaatttatataatattgcgtgaaacagaagcaaaagcaagcaactcgttgggtaaaatctgcagtttctgcaccaaattaaagaagacctgcaacattgccgcctttacataaatacacacactagatacataggctctatgtatcttatagtatacgatatttgtttagaatattctgcaagttgattaaatttcatggatcagtagacttgtttatattctaaagtttcaagaaatagtcaatttgtctacgtataattaaaccgtttcttagctggaagtttacgataacgtatccaacatttaagtattgtcgagccatataattagagaaaatgactagtgagaacactgagaggtttagcagctgagcaagcaagttacttacaaaacttggaaacaaaggttgtcacactaatattcacactacgtgagaattcgtacagtgcacatcaatataatatttttaaaacagcaaagtgaaaaatgaacatgatactatatatatccaatttattaacaaaattttataacttatagtatcaaaaatagtaagactcatattagaccaatatatattaatgcctacctacctttgaccttaggagaaagtatgaataattaacatgtatccaggaatggcattgtagaaaatactattttacattactatttcatctaaggattgagatttcatatgaattcaatgatttatatttactgccaatatttttttatcttactaatttaaacgaaagagatattttaacttgaaataattagaaaataggttatagatcattcaaacataaaattattaaactgttcaactatttctaaatgatttatgttagccgtcagataattaacatggaaaattctagtttcatcatgataatactccaactatatgtgttaatatgcgtataagagagagtatggcgtagtatccaatcatttcttagtatcatgtagtatttggtatatgccgtatagtagtacccaattatttctttgatgggcaaatgctaatgactaatgagtattttgcaaactcatgatcactgaaaacatgagccttcggtcgacgatcaggtgtcttaaatttgtctgctctttaatttttgtaggataaaaaattgaaaaatttgaactttagaccatagaatagattattccagctagtaatctagaataagaatgatgtgaaaaacttgtatttagtggttgatcatataaccaaaccaaaggatgattacgttttccttaaactctaaaaacatgcagattattgatctgtccatcctagttttaggtacggtattaaatttagatagctgttgaaaaaaaacaaaagtgaagatatctaaatctagatatgttggagcaaatccagtagtggattctaagcaaagtttctaacctataataataataataaaataataaataatattatttaattaagatagtttataaggaaatgtgagagagtttctaattcaagagattttgaagactcttctaactatttttagaaacttttcaaattaaataatattatttcttattttattattattttagtagattagaaactatggttagaaaccaccattgagtatgctcttaatttatatcctataacaagtcaataaatcgtcaaacattaatacgttgcattatttgtttgtcatcatatcttaaatatttcgaattaaatgatacgttttcgtcacacaactaatgctttttagtagatgaaatatagtaaaatacgattttatgtattttgaacccatgtggcgttatgttttaatttattattggatagtagaagaagccggaaattctggatgtcaaatagtcacattaatattcaatgcgaaaacgtaaaaaaaagtaagatgctaccgttacctaaacaaaagttaatggtgtgattttacagcacctgtttaatatttttaaaattacataaaaaaaccaaagagaagtaagaaaaaatgaaaaagagagattggtatataaaaaggaggagtagggggtgaagcccgaagcatcttatagtatttttagcttcattccttcttttgctctgatcaaagtcttctccttcccttctctctctctttcctcctctgcacatttctgggttcttctcttcttatgctctgtttcttttaagacacagaagaaacagtacagagttgagattttcttaaacaaaagtgaaaagagaagaaacaagtgacagctcaaacggacaaaaaccactcttgggtctttcttgcttctgattctttctcttctctaatagaagaaaacgtaagtcactctctctactctcttttttcacactgaagaagagaaaaaacgtgaacaaagaactgtcaattctctttccctctctgttttatcttcttgaattctccaagattgagatctctctcagtctcttatgtgctctgttttctcctctctgttttcacttagttactaaacacaatcgattctttcgctctgttttatttctcagatctagaagctaaaaaaatgtcggaaggagtagaagcgatagtagcaaatgacaacggaacagatcaggtaaacggaaaccgtaccgggaaagataacgaagaacacgacggctccaccggttctaacctaagcaatttcctatggcacggtggctctgtctgggacgcttggttcagctgcgcatctaaccaagtaaaccaataaaaccataaactaaagattcaaaatttcggatttctcatagtgaagaaagatctgatttgtagtaattatcgttggtttcaggtggctcaagtgttattgacattaccgtactcgtttagtcaactaggaatgttatcaggaatagtacttcagatcttctatggtttactaggaagctggactgcttatctcatctctgttctctacgtcgaatacagagctcgtaaagaaaaagaaggcaaaagcttcaaaaaccacgtcattcaggtcccctctttaaaccctctctctctaatcagaatcactaaatcataattatctttcactaatctaacacttttaaaaatctcaacagtggtttgaagtacttgatggattacttggttcatactggaaagcactaggactcgcatttaattgcactttcctcttgtttggatctgttatccaactcattgcttgtgccaggtctgttatcttttaatcattctctttatctttttaatcactctttaatgattaagaatggaggataattgaaatatgattggtgtttacttgcagtaacatttattacataaacgatcatctggacaagagaacatggacttacatatttggcgcgtgttgtgcaaccactgtctttataccgtcgtttcacaattaccgaatttggtcattccttggccttggaatgaccacttacaccgcttggtacttagccattgcctccatcatccacggccaggtaatgttttaatatatttcaccaaaaatatatttcatcacattataaagatcactacactgtcgttttcatatttatatgctttgcattgaggtgacagtatatgccttaattaaaaagaagaataaaaaaaattcgtattttctctttaagatcagggattattctttgcatcttaacccaaatttgtattaaaaagtgtatgtataatataacttagacaaaattagctgtttaatattctcctaatcaaattttttttttgttgtttattttaggcggaaggtgtgaaacattcaggtccaacaaagctagtgctttattttacgggagccacaaatattttgtacacctttggaggtcacgcggttactgtgtaagttactcttcttttgatttcttaatgattattaattttgtatctaataaaagatcaataaattttgtcagacatagttgaattactatttaagttaaagctaaatggcagaaaaagtatatggtaaattaaaatggtgccatattattaaattatgggtgctgctgtatcgtttcttcgccgcttctattgcagcttttgccggcaaataaggtgtaactattattacagtcatcatgattgtcattattatttttagcaatccttaaaatagtagtactaataaaataagctctttttaaatataaaatagaataaccattattattcctatccctataaagaataacaaacactattgctaccaaagcactactactactagtaggaatagtacgcttttgcgaaatgtcaaatacaccctttttatgcgtcaatgattgttgtgaatccaatcttttacatagttaaagttttggatgaaattatgaatattaacagtaatttctaatttgcagtgagattatgcatgctatgtggaaaccacagaagtttaagtacatttacttgatggcgacgttatacgtgttcacgctaacgattccgtcagctgccgccgtttactgggctttcggagacgcacttctcgaccactccaacgctttctctcttatgcccaagaacgcgtggcgtgacgccgctgttatcctcatgctcattcatcaggtatacacatacaacatttttgttctttcttttttaagtaaattttgatcatgagagattaatgcaacgtgttcttgttcgtgcagtttataacgttcgggttcgcttgtacacctttgtactttgtgtgggagaaagtgattgggatgcatgacacaaagagcatttgcttaagggctttggctagattgcctgtggtcatacctatttggttcttagctattatcttcccctttttcggtccaatcaattccgctgtcggtgctcttcttgttagcttcaccgtctatatcatcccatctctcgctcacatgctcacttaccgatctgcctccgctcgtcaggtataacatctttactagctcactctcttttagcgtttcaaaactcgaacttaacctaaaatacattgagttaccaataattttttagaaatgaaatgaagagtcggtggaggaatattatagttggggggtagggttgtgaaattggagggcaaaaacgtcttttgtggaagatagatggggttcagtgttccgtatcttacggaagataggatcatcacccacattccttactggcgtcccctccaaataatatattattgagttggtttcagccatttctttatttggttacatttagaagaaaaaatacaatatccggttaggttagtattagtaattgaccatgacttctttttctttctctctttcaaaacagtgtatattaaatttacgtaagataaaagtagaggaaaataggggagaggaataggtaagagtcataatcagaaatgaaaaggagctgtacaatagggactctatgcctaacattaatctaaagtgagagtctgagtatgacaaatcacaatcatatctctctctctctctctctatctcatgggtcaacaaagctttggattttgtccattactatacgaccaaaactctaaaacacttacacactctctatttctttaatggttctctgattatttttgtgttttggatctttcttgtagaatgcggcggagaagccaccgttctttatgccgagctggacggcgatgtacgtgttgaatgctttcgtggtggtttgggttcttatagtcggatttgggttcggtggatgggctagtgtaaccaactttgttcgtcaagtcgacacttttggtctctttgccaagtgttaccaatgtaaaccagctgcagccgccgcacatgccccggtctccgctttacaccaccgtctttgagagatcgagtcagggttcttctaatgcgtttgtggagggttcttaaaattatttgttcttcttttgtgttttgtgttcgtatacgtgaagggagtaaaagtcacgaaaatagtgtactttttacacacccctttaaatgcgtgctaagctcttaattatttttttctcttttggggttttgtatttttgttttcactccttagttttttttttaaaattgaatagtcgataatatgtagtgtgtgatttcttaatttggtattgttaaaacaataggctaagaaaatgtatcgtcttctctccttttacttgtctttagtaacaaaaaacaattcttatcttatacatttatcctaattagacttatataaactattttaccatgaacaatatcttccgatactagataattctttaggatcctattagatcttttaattatacagttttgatcatagcacagcgacaatactactaagtttacattaaaattttgaaataacactttaatttatttggaaaatttgatttaacggcagggtgtgtttaaaaattaaataggggaacatggacaagttggaccgacggagccggtcatatatcctatgggccacatgggtgtggggagaggacgcacgtggatacttcgtccgagtcacgtgccattatttacttgacactcttcatcttctctctgatcaaaagaatggatcagaggaccgttcctgtccctcatattaaatatggcatgtgttcgttccattcgtactcaatcgtttaccccttatcatatgctctgctttcacatgtactttgcccccaaagattataactatatatgtaaaattattaactaatattctcgtttgaatccagagtccgattcttgtactttccatctgactttttttttgttgggggtcaaaataaaaaagaactttgcaaaaatgtttcttctaatagcataaaatcgttaaagagaaaagaagaagtgaatgtgagtcatattatgcgatatggagtaggacccttggtaacgtttggttagtgacccttggtaacgagtgggttcaaattgtcaataaactattatgtggcgagtggtgaatcgtctttaatttgttctgatttaggccatgtgagttttgcaactacatttgaggcttttcttcttctttatattagacttttttttttttgtaaagtggactatctggatacaaaaaaaatctcggctaacatggataaatctaagatggttgtgtttgtgaaaagaaaattgttttatagtaaaatacggtatgcaataaaagtatttcataaaatatctcataccaattattcaagcatgtcttttcataacatttgactggcatctttctctcctttggccttaaatcaattttttgtcatcttggatttcttttgaggtatatagagctgtttgaaaattttgatggctgaaaatcacttcacatctcgatttctatatcatccacttaactcgaagtcaggagtagcctgagacgattaggttaagttaagtggttatatgaatttgtaacaacatttagatctttgtttccaatcatcaaccaagtttgagagaccttaaaaacgtatatacgcacaccacaaagtgatatgaatatgctaaattgtttctgtagacacacaagaccgttgaaacgtccagattaatcgcttactccagtcgagaatacttcataaacatgggactagaattgtaccaacacataatatttcttcatacgaaagagaacatagtcttagcatgttcaggatttagaatacattgaagaaacacacatcttcgttcatggccttaaggtacacgaggcctaggaaaggtctcatactcttgttgggtttgaacttgagaaggtatttgaggtacacgaggcttagggaacaagagcttcaggcgaaaagcatccatcccattcaagtaatagtggtatagccgtttggctcttataaacccgagtcgcccatatagtgctaatgctcctttgttactcacttctgcctccagagttaccttcagccatacatctttacattaattagattgcataaccagacaaccatactctcatgttgtaatcaggcttgattatgaggaacttgaagagcaaatgccaatcacgaggttctttttccaatctatttactactgagattacagttaagagatcacacatacaacagaaaatgattcgtcgaatacgcaattagtaagtgggagacagggatttcttattttatattactatcagttacattccaatgcgtgtgactataaagagtcatggactacatacaagacttatacaacatatgtatactaagtgagagactgggattttgatttccactacaaaattagtaactaaacgaatatcgaaaagttccaactcttaggagtatgattaactacttttatacgtggaactaaacttacacacacagttagctaaacaatcaaaagcaataggtatacttgcaatgattaaaggcagctacatcacctcagctatgaaattctattctagtagataaaaaggaggcactatttcaggacatgtaatggacttataaccttccggaaaaggtggttcataaggtcttatctacatttatactaccaggaaaggatatcactctagtgctaccaaatatctaagttctccaaagtgggaataaagagagaagtgagaatgcaagaacagcatacctcttcacagcctgattccatcatcgcttttatcgctcttgtgacaagctctgaggctgtaaaaaaacaatgacaagtcagcacacaaaattatcgaaccttaagagaggcatgtatttgcagtagatcaaacactactcccacagtcaaaatctgattctgtaagaagttaggaagcactagctcaagtattacctatgcctcggccacgatatggtttaatcacaaccaacatagcgatgtaccctctgaaagtctgtcgatgatcccccatcttacagactatggttcctacgcatttacctttgtgaaaggcctattaaaagaaacaaaacaaatgctactcataaatccatcaaaacataagtatcatgagggtaaagcaacgataatcgaaagctgagtgtcaaaataccaggaagcatagctgcggccagaggtagacgaagtaccggtaagtaaagatggagtaaggttcactaagttcttggtcaacaagagacataatcaatggcagatgatgctcaccagcataactcgtgtactcaatctcaccctcatcgaattcttctttatcttccatctctttctccattgcaagaagtgatcaagatcccgaattgtatacttacaaagagaaatatgaacttctgatcagttgtttatacattgatgatcttgttcctataggaagtgatgaaacacataatgcaaagttagagaatataaatcattttctgtgaatcgaagttgagtgattgtttcagaattgaaagttcaatgttttcataacaaactcagattgctcaaagcctcaaataaacagctgaagcagaatctataacactctactaaagcaaacgactttggctaaagcgagctatagaagatttgagagttcagaaaaaagagagcttaccgatgttatgtgacaataggattagtaaagaatcctgtgaagcataagaatgaaaaaaacacacacagattttaaataccaagtaatgagagatttagaaagagatgtgattataaaaattgaaactttttagaaacccaagatcaatgagatgataagaatacttaccaaaagtttgagctttgtgaaattcgaagatcaaaagttacgatctgggtgatatctgaagaaaaaagctccgaagagaagacgaagaagaacaagaacaagaacaagaacaagaacaaggtcgattacacacgtgacaagcatgtgtagggtttagatatatttgggctttaaaataagcccaattgaaattaaagcccaaatatgaaaagataattaaaagcctatcctaaaatcgtttttctactctcactgccttatcttcttctggatcttcttcttcgaacaaattcgaaaacagcacacggcgatggcgtcgcttatactcggagctcctccgcgagtcaccgtcgcattaccttcctcacggttatcatcttctcactctgaaactgccggtgtctctctctcttgcttcactcatcaattctctctctccacttcctcatccagctcaattccactcggtaatctccctctcttatctaactctctcttaattcgtcaatggcgtaacttttccggtgttcgcagtgtactgtggcagaggtgaccggaaaacagctaaaggaaagcgtttcaatcactcttttgggaatgtaagtaatcaaatttctctttccgatttcgtaattttactttgcaaattcgcaattttggttttgaatttggggtttatgtaagcaggcgaggccaagaaacaagagcaaaggaagaggaccggagagagtaccggttcctccagcaccaccgaggaaagataagtttgagaacgacgagaagatcaaaatcgatatcgacgagtctctcttctctaattagaaatatgagattcttcacttgttgtctctcactgtaattttaatttgttttttgaaaagctttgatgctacgactcttttgttgttaaaaacatctccaaagttctcatctttttatgaaaagtttgcttctttatgaatcattgagtcttttacattgaaaaagtaaagcaaactaagaacgagaatctatatacttagatagatcagatggatgaatcatctgtctctgtttggatctttaaatgtgagagtttgtgatgtttccgcagactgtgcagtgagtggagacgagagtgtgcattacacttccttcttcaatcttaatcttccttgtgactttgttccacagatgtatcatgtaactccctttgttcatgtcctgtactgtcttctctacccattttgcttctcttgtggttgcaggtttcttgaaaagcttttggattttgatccagtttactggatagaaagcatcgggagaaaagattgtgagattgttgtatccaggtttgtttcctaatctcttgataactctagagactaggtaagggctgttgtatccccatttgtttccgtcgaaagttgtggcatactcttgcaagaattctcgcattagcggatggtagatgtcaaagaccatcactgcgttgtttagtctcgtccatctcttggttgctggatcactactctgtgctccaatagcgtttcttagtcctgtcatgtcgttgaggaagatgatgtctgtgtctagatagactcctccgtatttgtagagtactgcgagtcttgttagatcagagagattcatgaacaaggggatagaaccgggatccatgttgccactctttagccttttcagccaagcttcagcaggagtgttcttgacgagaaacgggatatctatagttacagcaatgaggttgaaaccttgatcaaacaatggtttaaggatagtgtatccgtttggggagtctaaggagttggacaaaatcgccaagcaagcaccaggattggtggtgaagagagtatcaatagctaacatctctcttggtccaaaagaatttgcaggagaaagccaaatcataaagaactgagcagagcaattcttgttgtacaagtccaaaactcttgtatggaaactcttgctcttggtagtcgatttcagtatctccagctcaggtagctttcttctgaaccagtcaattctctggttcttgctagctttacgaggaggtaacaacggatctaactccttctctttatgctccgagtccacaactgagttgatattacaactactactcatggggccatagggtctgggaagaggcacgtttggtttgaacggtaggttattgtcatagagagttgattttggagattctatatagaggagatacaataataatacagaaaacgtgaagttcgcgaagatcgataactttcttgctcgcatctttaatcctctgagtaaaaaactcctgctccttgttaatcctcttaggtagtttatatatataccactcgaggtgatcgatcagttactaatcctagaggtaataagagcgtgtattgctgccgctcttgaaaattaaatccataaaacaaagttgtttcggtttagggcacctagataaccggaaggtcctaattgaaattggagtttgagtttcgttaggttgattttcttgcgaggaactacgatctcaaccaatcttttggtgccacgtttaaatatctgtttgattttttggaaataccttcatggccgtgagaccctctcccaagcatgtttgtatagttagttcctcacaggcaagttttttaattgaatgactttgcttgaaacacaagtcataattcataaattttgcattttctttataaaaattacgatttcaatatggggaaaccattttgagattctcaatttcaccatattatttaaagcttatactataaacacacaaaaacaactcgaaaacagaagggaattcaaagccaaagagagagtacttactgaaaagtaaaagtgagatggtctaaagatttacattacaattattcattacgataaaaggtctaacaaaaaggaacttctgaacattaccattacggcaaaaataagttataagaaaaggcagtgtggataaagcattagtttgttcccaactcccaagtaacgtgcaacacaattacaatagagctcaaatgagaagtcacactctcacagccagaataggtagctcttgtaagtgaatatggcttagccttcaagatcagattagccaacaaaacatcacacacatgtcctctaggttagataataaatcgtacttgttctgcaggaggacctatggattgtcattataaaaaaaaaaaaaaaaagagacgagggattttggtttagagttttgagctttaaatacgtgagtcgcaagacaattaggtttatatatcaaacatcaggtagcagaaataattgtcttccgtatttgactgataagtgaaaatagtttggacacaatcttacacaaacctagaaaatcaagattcgaattttaaaaaaacaaaacaaaacatatctatttgatttcctgttatctctgaattcctctgcaaacaacacagtggtctgaaattatgatgtctatgacactgcccttaccgatcttcagttttctggtgattttgttccatagatgaagcccatagctttctctattcagcttcaccagatcggttttgagtaacgttgagtcattgcttcctctcggcgtttgaaacagtcttggaatgtctaaccaattgaatggatagaatgctactggtggcagtactgtgaaattatccccaatcgtttctcgtgctctttgtgctactcttgttaccaagtaaggaccattgtgtccccatttgttcccatcaaaggtagaagcaaactcctctatgaaactgtaaacaagcgggtgatctttctcgaagatcagaaccgcattgttcaaccttgtccagttctttgaatctccttccactactgtttgtgctcctattgaattcttcaaccctttaaagcttcttgtgacgatgaaatcggtatctagatacacacctccgtacttgtaaagaaacgctagcctcgcgaggtttgaaagattctgatgtaacggtatccttcctggatctcttttgcaacttttcatttcttgaaaccaagatttggccggtgtgttctcaagaagcaatgacatgtctggtgtggctgcaaaaactttgtaaccgcgatcatttagcggctttaggatgctatctccttgtaaggaatccaaggatcctgatacaatcattaagcatccttgaggatgagctttaaagacgctttctacagctaacatttctcttttcccaaaatactctgctggtgaaaaccatgtcatgaagaatctaacctcacatttgtcgtcgagagagagtcaataaccatctgatgaaactgctctgaaaggttggtcgacctgaaaacctcgaattctgttagatgtgagtgaagccaagcgatcctgtctctgcttgtagtgttctttggaggagccaatgacttcctctccattctgtttgtttgtattacctcggaggttggtgaagaccagaagaaagttgattttagggacatgtttgagaggattgttcccgcgacaacgagcagcattatgaccgcaaaaatggcggtagagaataccggggaattcgtgtgcctgaattgccggacatcaagtacttctgagagactcttcttgttacaattatccttctccattgtttcaaaatgtcttgaacagagaaggaaagtcaaaaactcacatggatcggatcgtctaaagctaatgcagatgataagaaatgtatattataaccctcctcaattatagtttcattattcttctaaactaatgtgatttaatctaagtagttgatcaattctttaaaaggagatcaatgtgatttggtgtaagtagttgaattaacataagtggaaatgttgaggtagaagtacagaagatgatgtctccgttttttaggtattgttttgggattaggatattttaaggttcttcatgttttattggcttttaaagaaaacttgttaaacaatacaaatatgtacattttctcaatattgttaggtcaatcttacgtggaagtttggaccgtttggttgtcataatatatatattgtggaatatgctgaagatgtgcataccactaacctcttaagatgtgaaccatatttttgtttagctgtaactgtggatgatttatcaacgtactaatacttgatcatacgtacacaaatgtttttttttgtaaattcattttttcaacattgtttaaaccaaaataagtcattagaaaaaatcaaaaaaagaaaaagatttgatgattaacaaaacgaaaccagtgattctaattaaatttttcttgccaaactctttaatgattctaattgattaattttaccaaactctttaaagatttagttgattttttgtcaattatttaatgactaatcgatttatgttgaaaattctgcatgaatgcatgatacatgcggcattttcttttctttgtcggcaaatgctttgttttcctttgactacaacgatgaatgataacatatggatcaaagcccattctttgaaaactcataagaaatctccatcacttagcaaacaatcctcaaaccctccagtggaaacagagtctcgagagcttctttagtgtggatcaaagcccactcttttattctcttttgatccactagacaaaggcgacagcgttttgatgctttacctcaagtggaggcttttagaattgtttgctaagaaactagcaaaacaaccagagaaaaacagtctaaaccgtgtacggatgatttttgaagaatatatatctttctctaagactcggctaggttcaacctgtatttgccgatgtcttataaaaggtacacatacatataagtttataactattaaccaccaactggttactaggatacagatctctaatgaataagttcgaaataagtactatgtagcgtctatatctgataataatgggcaggtcacgtaggtggtaatttccatagagtgtgccaccaaagctgagaatactttggtatcacgatgactcgtttttgtccatcgagtttgtcgaagcactgactgttaccctcaggttcttcgaaacgctatgccttatgttctgccaaacgaaacgtacaattttgtgagcaatttaaagcttgcaagttatataactaactaactagcttcaatggctaaaggaatgaggatgtgtaccatgtgcctcaaagccatgtctagagacgacctagaaagagttctcccgaagcccaaggtcgtgttatcgtcatgttttggaggtggaagtttcctcatgttcacaactctttccaccatttgagtccccatcaacacaggattcacatcattactaatcttcgatcgtcccgttgatctgtcacctgaactgtagactctgcttcttgaggttgagacaggtctagcacgtgtttcagggatttttggagttgtacatttagcactagaaactgattttccaaccgaggatgaacgaggaaaagcagatgctcgtgtattggatttgattgaagtggttatactttctgaatttgatttctgagcagagttggttagtcttgtggagggtaatgtagcacgtgaagttggtgtggcttgtcttgacggtttaatgcttggttttacttctgcagctgtgttggcttgcttgctagaaacagttcttggggttggcttggaaaccttaacgctccgtgtcaatggttcctgcgggatgttttcaaccttaaaacaaaagcataacatgaaccagcaccaagcaatcattaaaggtacgcataaatctaaacctgaggaatgctgaaactagctactagtagttgtaaaaatggaccacaataccacaatgatgtgaacatagtacttaagactaggaagtctaggatagactggcaaaaaccttaaataacatgacacatatcaatcttatatgttccctaaagagtctttagtaaagacaaaagatggctaagaaggggactagttctcacccgttgttttaaagcagtggacttagctttaggctccttgagtttaaccattgagttctcttttcctcctagtagtgtgatctcaggagccgcaagtaacctggaatcaaatcatctctagatgaatatatctcaacaataaagagagtactctattcgaagattctatccaatggcaaccagatgtgaccagtcatgcagacatataagcctattagaagcatcacattggaaactctactgtgacagataacacacaaacatctcaaaatccacaagaaaaaaacaacaaccaaagaagttaccactcataatctgacttgtcgttctcagagtccaagaacttttcaacagaactcctacgcaacttaacacagctcgttttcaaaagctccaaactctttgtgctagtcttctcaacactgtttgctcctgtcaaaaattcatcaacttgatcaaatcaatcatagctacagtcaccacgagcacacacacacacaacaaaacgccgtgaaattaaaatgttgacaagaaatcagcaacaagagctgaccagtcaactctaaattactctaaagtgaatccaaatgcacgaaactagttcaaataagcagagattaagcataattacttagtcatattcttagatttaggttccaggagctcagattcagagaaatcgaagtcaaaatttagagaaacgaagatcggataaaactcaccaggttgtgaaagagaagaaacgccttgaagcttctcgcgtcttcgcatctccagaaatagagagagttcttcatctccatcacgaaccaccaccacattctccatttctcaaaacctcttcgttgtaatatcacttctagctgatcatttgttgaagatcatagcaccaagcaaaaaacagcgaaacacaaggttaacaatggagaaacaaaacgaagaagaagaagagtgataatggctaaaaaggaggaagaagaaattttacagagattgattcagtcgtatattcacgaaactgccactgttctgatttctcaggtgttctttaaaattttttctggaggtggagcgttaggagagggtatagatgtaaataaagtagggcctagtgaatgaatctaagatctgaaccgttggatatacaacggcgattgactgatttgacggttgatatttgaattggactgaccaatgaagcagcctcgtttttcgtgtgaattcaaactcttcacttcatttatttgttttgcagatataaatctaaatggcccaatagcttattcattgggcttttaacccacaaaagctcaccaataaaggtctgacccttttttttttctgacattctcaatcccaccgaaggtctgattttgacttgatgagatatatgattatttgaatttggatttctattggtagaaacaatgttctacctcgattataaaggaaaatcaaaaattccatttatttatagttttatagtattgactactcagaaaaaatgataaaaccattaataaaaagagatagaacatttgacacaagacattcatagatagttcattgcaaaacccacccacaagaagaatttataaagttctcaaaactcatcttcatcaagacacccaacatttttgaaaaatgaaataatactcactgaatctcaggaatctctctgacaaatctttcaatatttataaatgaatcaagaaaattggtttttgttttcctttctccattgtctctcgctttggaaattttgtttcaacacattggtacttgtcttcgtttaagatgagaaaactcctcctcctgttgcagtgacgacattgttcatcgcttgatgtcccaagtgaatggcattttgttctgaaagataaaattatcacaatttggtgttagggaataattatcattgtcaatctagtagtagcatgtagtatgtagtaatcttattaaattggaacccaccccaattaattttaaacctatttatacccaattaattgacggtttttgcaagaaaacgtggattttgtgagaatttttttttttgtgaaaaaacaatgaacgtgaagaccaaatgtttttagtgagagttgttatcttcttcgagaatttcaacatttttcaacattttctcttagtttccagggatatttatttttcactagcctatgtagtttcacaaacttttcaataaaagttacaatcacataaaacagaatttcgcagtttaaacggaaaatgttatttttcggttttggcggaagcaacagttatgcagtttttgacagtaaaattataatttttgtttgtttttgaattaaaaaaataaaatataagttttattactattttactttagttattaagatattactcaaaaattagtaaagagactcgtcataaagaaaagcatttatttatgttaaaacttagttaataaataaatataattgggggaacctatttaacccgttttaactttatttgatgaagcatttccatttgatatatgggtgttgtatgcctcaattattgttttccctaataatagcatgcatatacatttgaaaactaactcactctggggaagtttgtcgacgaagaaacagatggcaataatgaaatagcaaagcaagaggaccagtcccttcatgtagtgagaactcccatcctaaagaaccacaaaacataacaaaaatatttaaccctcaatacttggatcatccattaatttgtctagtggattaataattttgtaaggtgtcgaaaaatgcttaacctgtaatgtgaacgctgtgatgattatggaaacagcaagacagccagtttcgaggggaccaaaattgagatccatattaattcccaaaatccacgccacgatgatggtcaaggggacaacgaataagccaatctgagtcgcagagcctaacgcaactcccaaagatatgtcctagaaattatttggattgatataagttcttgcattgtgtcattatataatagatctcgggatcgattaaaagcgataattttaaggaataaaatcgaacttacaagcttgttcttaaaggcaaaaataacggctccagcatgttcagctgcatttccaacaataggaagcaatatgatgcttatgaaactcactgataagttccatttatccgatgcttcctaaacaaagttgacgttatattagcgagcatgtttccaactcaaaaccaattggcgataagtgtatttactataatgttttagttgatcatgtcagtttcaatgtggaattcaaaagagttacctcaatcgtggctacaacatactccgatagcaatgcgataacgagtgtcatcccaaccaaccatgcaaaaccgctccaaaaactaatcaccgcggtttcttgctccacatcgtcatcatactcatcttcctgtaccaaatttcgtatcaaagatccattagaatacaataatatatatcgctactatataacattcttctgttatcttgtgtgtatagatttcagttacctgttcttgtgcatcgaacaattggcggtgagtccacagttggaaaacaagatatgcaatgtagctgatcaacataacaatactgaagcctcgcgatatactcagttgcatgtcggacaaaacagcagccgaagcctctccgtttttcaagtatcccaccaacaatggcagcaagtgacacaagaaacccagtagaagtaagaagaagttcacatcggcttgtttctgcaacaatgaccacacaaattgatttcgtttagcatatccgttattaaaatttggttcaaacataccacttgcttgtttatcaagctaaacttttaaacaaaatcctggttaacactagccgtacaaaacctatttcattcccggttcaattatcttaactaaaaaaaatattattggttttgaaattaaagttgaaccgaagttaaaagggaagtcatacccggtcgaaccgctgttcccttcggatattagcgattcctccacagaagagtgaagtccctagaaccaataaaaggttcgacaaaatcgaacctagcagcgaatatttcaccactgcgactttgttattggtcaaagcaagaatcgcgattatcaattcagtcgcgtttccacacgttgcgttcaatagaccacccactgcggttcaaaaacacacagaaaaaataaatgagtttctactgataaaataagtaaataacgtttgtagattggaataagaatagttggtaaagaaaacgttacatgtaggaccggtgtagaaagctagttgcctgcacgagaatcacgagagaatgtgaataataaagttaccacacgaaaaaaaaactttttatggcgtcacttgataagatgattctagataatctcaatgtacttgattagatgatagagtttgtactatgctgtcacgttgacatatgagtgtcaaataattgtgtgtggttgtaataaaaaaccaatcatgcattgccgaatccccaaagaatattggtccatgtccatttatttcaaaaagcataaattatggtggaattggacctaactaacgtgatcttcatgattataacccctaagatttaaagcaagtagtgggaaaaactgcaaacttagtggaaagtattatggagcaacgataagtattacaatgagtggttggtaactagatttatttgaaagagagaaaaaagtattgatataacgtgatctttttaactacagatggatagatacgattcattttatcgacagttggctaaattttgtcacgatcgataagaaaatgtcgtaatgtgaagaattcaaattatagaaatatgtaaatggataaaataagagatgatggtcggatacttactctgtcaaaaagctgactcgctcagccaaaggtgtcagtcctagcaagctaagtccaaatatccaaggctgtaataaaaatcacgatttagtaccatatattatgtacatgtatatacgttacaagatacaccaaagtttaattttaaaacatcaatgactacaaatctaatttaatagtaaccggtaattagtaatttggattagatgtaatttggattagatgtaatgaaatatcttaaatactaatgacaaattgataaaaatctgtaggcgtttcgtattctaactctttttgcgaatattttgaatgatgttctcaatgtattatcaatgaaacagcggaaaaatatgtgtacctgactgacgccacaataggtgcaaataatggcggcaggaatggccggaaaaagaatggcaagctttgttccgagaatgacttcttggagattagagagaaaatctttaagacctttgtatggaaccttctgaatcactcggaggtctgattttttcctcaaagaagaagaagacatgttgtgagcggttcttccaagtcttagttctctgctcgatcctttcgccgttatgcttgggtttccgttctcagctactgaccacggctctgtcacgattcccgccatttctctactgactcaaaactttgtaaattctgagacacaaacgaaggtttttttgtgtctcttcgaattttgctttgctgattctttatgtttgttttgtaaagaaatggcgtcatgatttgtttaaatactactgattagttttgtttattgggtccaccaaggcaacttccacgaagtttcccaagtttccctttgagattttaattatttaattttttgggatttatggttttaatatttggaaaccaaaatcagaaatggttaatatagatcttgcagttgaaagttgtaacacatggctctcaaatcttgatttttgggaaataactctttggaaatcatactaaattataaagttaattttgcttagtaatatatttatctaatagcaaaagagttatgtgatggtcttatctttcattactaagcaaggaatatgttgaagactaaaatttgattttcacattcaatggtgtttggaaaggaaaaactatgtaaggaaaaatatatactataaaatcaaaaattcattagtatcctaaaaatcattgattaaataatcttcttattgatgttatttgccttctttacaagttttgagatagctacaaaaaaaaaagtaaaaccaaaatctataacttaaaaatatactatatctcaagtctccgtacaactcttcaagtggaaatgtggagactagaaacagtcgaactctttttgacccaaggttttagtaaaaaggtctactagttgcgtgggtgtcaagacattttttgtcaacatggtccttcagagaagttcgtcggtgatgaattgttatcgaaccatgattcattagccactccagtaggttggtatgacatgaatgaccgaaaatgagaaacctaaaaatgaaattaaaaaataaaaaaaagccttgaaaactggttatacacagtaaaccggagaattcaagacacccggatctgtacttctgtatcaaaatgaaattcacatacgaaaacaaattagcgtcgctataagtctataacacatgctttaagagtattctttagaatatcctaagggtccaaattgtgtcgttagtacgaatgcgatgttgatggttttgccatgtggctttttcggttaacgaggaggtaatagcttcataaaaggcagaaggtggctggtggcttttgttcgctagtgtttattatgtttaacttctagcatgatgttatttcatattcatctataaaattatgatttaaatcagggccatagaagctcacggctgaagctacggctgttcttcacgcaattcgtcacgccatcgctcttggaattttgacaaattcactttgtttctgatttgtctcaaatcagaaatattgactttgtcgaaacaaatcagtaaactttctttatcgttccaaatttattggatgtcatcgatatttaattaggaccttagatctaactatagggataaaaatagggttatctaaagtcaattacgctccaaaacattataatgactttgctaccaccatcgagtctataccattaaataagagtattggagattttggaaagatgtcatgaataaatcaaggatcgatgaatttaaactatactgtgtggtggtgcgtaattaaatgatattttaactatatataattatatattgtgcaacaacgtaaataaatccttttaagatgatttcttatacattgcgtaatgcatccctatcaattgttcctttccttaagttctttctcctaactcaatggcctagagaatcttagattatagcgcccctagtcccggataactaaattttcattataaaaaaagatcataagtgatctatctatgctttgtccaaagagaaaaaagtgttctatttatgtagtcctcgtccattgataacgattgagcctgagaatttaaatagatcaaagattcaaaatattagtatttaatgaattatggtgtgtaaactgcactgcagtactcaagcggatgctgccgaagatacgagaattaggctatatagtattgaaacaaataaagctcaagtaaaagattctaaaattatttcataaatatttatgcatagtgcatccacatatacccccatctattgtacatttttataaatctttctcctaactcagtggcgtagagaatcttaattagattatagagccagtagtcccggagaattaaatttggttgtaaaaccgatagcataagctctctagttatgtagtccttgtccactgacaatgattgagcctgagaatataagttaaatctatcaaaatataagtacttattgaaattatgatttctaaaaccatacttaagtactcaaccgtacgcatactgccaaagtttagagaattagggaatccaagtgggtaaataaagacgcaaacacagctgagaaactcatttgtcttgtccgaatacagaacaacattattaaagccccacaaatctttagtgattttggaagttacacaaacttcttgatttggttcaatcttatatacgtatgggcaacaataaacgaaaggagtaggggtcacaatgatgaaaaggccaagaaactaaaaaaatgtaatcaacgataaaagccttaaaggaaacttcccggaagctgccttcttgaggatacgtctatgcacttctcacttgcatgtggttagatgttgttatcgacccttcttggttagacaatctattaatatatttttgtctttgttatataagatttctatactatatgggaatcaaagctcctacatgcatgtgttcttacagtcttacttgttatggcatttagcctaacgtggtcacaaaccatatgacgagtgggtcctctaatgtgtacggaataagaaacttatgttatcatttagatcatatcttcttagaaggtatcgtaatcatgcctcataaaaaatcatatcttcttccaaagaatcataatcataaatgaaaatgaccattaaatccacgaatataaccgcttattcatttataattgtttatcactcctgcatcaatctttgaacagatcgatagaagcatccgagatactctcttcactagcaaatatcctaagagtaagagatgtggttgattgcgtcttagtggttgatttgtttagtttctgtctggcttttattttaattcctcttttgccaaagaagtttcttgttaagtaatttgccattagaatttacatataaggggacgacgctgaaaatcaagctgaatgattgtacaaaattcaagatgaaaattgcgttctacttccagcaacctaaagaaaatatgcttaagcttgatgattagtgatgctcatataaaataaaacaaacatataaataatatgtgacctaatcacattatataaaacaaaattatatcacattattaaattccatcatttaaggtagcttgattttgttttatcagaatgaaatatgatttataaacctaatggagcaggtgaaccaccccaatgtgagaaccactcaaacctaaaaaagcatgacaactttaaaggtactaaaactgtattggaagttggaatcaaaattgtttattcactaaacgaattttcccctaggatcttctgatttgactgattcgtttagtatattgtttaatcttcttttttttttggaacaaaagaagaactgttgagtactagagaattaaaaaaaataaaaattgattctttgattatttttatttttttgtttacctgaattgattctttgattattttaagaattctttttaaggaattttggtcctgatgtgttgctttttttcagtagtgcgatctgacgactgtcacaaaggcataaaccctttatgcatggactaatcaattaaattaattaaatagcttctcttatttttcttataatctcgaagttggtcgaagcaaagcaaaagcaaaattctcttggccgagagaagaaacattgatcgtcgatcatggttggaccagtaagacctcaaatcgtacttttcggttcttcaattgttcaatatagcttcactgatcgtggttggggtgccactctcgctgacctctactctcgcacggtttgtgacatcttctcttccaattccaatttcgatctgtagttatactcaggatcttctgattttgactgattagtttagtgaataatctacaataaacccactaaacctgtaatgcaaatctgtactttactgttttcgcaaatggacaactgtttcactgtcaacaatatctaatgattgatgagtatataaatttcgtgtctttatactctgatccataactgttacacttaaaaattactttttttttgtgtgtgtttgatatgcttattcacaggctgatatcattcttcgtggatatgctggttggaattctaggtttgccttgaaggttcttcaccaagtattcccaaaggttctctctttttgcaaaaagattatgtaatatagtgaaaggaattagctttacttgacctctttttttttggttatgtactgttaggatgctgtgatacaaccttctttggtgatagtctatttcggtgggaatgattcaactcatcctcatccttcaggtcatggccctcatgttcctttatctgaattcatcgaaaacatgaggaagattggtgaacatcttttggtaaagtttgtgacttttttttttgcttcttccttcttcagtgttgttaagctcatggtatcttcttgtttcacctttattaccagagcctttctgataaaactcgtgtcattttcctcactccgccaccaatgaatgagaaacagatcgagatagtttttgggtacatgtcttacatatccgttaaatgttcttcttggtattgtttttggaagtttgatcattagctttgtgtataactcatgtctcagagatgcaataaaaggccggagtaacgagttgtgccgtccatatgcagaagagttgttaaatctatgcagagagatcaatgtgaaaggtatcgatatttggaccgcgatacagcagcaagatgattggttgaacagctgcttcacgtgagctactaaaccttcatgatacattttgagttctaaaatgattcttgcttaaactaattccttgagttgttttacttcacagagatgggatccatttcactgcgaaggcaagtgagattgttgttaaggagatattgaaggtactgagaggagcggattggaaaccaagtctttactggaaatcattaccggttgaatttccatttgattttgatgctccaaactctataagccttcatgacctagagttaaccagaaacaaccattttgagtcaccgcaccttgtaagcctttgtgaacaagagttaaccagaaacgagcagctggagccgccacaccctgtaagcctttgtgaccatgagttaacccgaaacgagcagctggagccgccacaccctgtaagcctttgtgaccatgagttaacccaaaacgagcagctggagccaccacagcctacggcgcgcttgtaaaacaagtcgtagttagagattatgcttctacattgacatcttgatggtgtgtaaccagtttcacctttcatttgcatctggatatttgtattgctaatttaacattttgttagacgttttgttttgtatcattagtttcgctgggtctttggattagaatattttgttctcacttgtgtgcttcagatatacaaaacaaaatgctagctcgaaactctgttttccttctgtcaacaatggttgtggttactcggccatgccccatgttttaaaaccttaagactatcataaaaccttatgtgttgttgaatatcacataggaggaagttctatattaagccgatggatatcagcataggcccatacaggcccgtctcaattctgatgggcccatcgcagaacttcagtaagaaaaaatatttcgtaattattaggcctcttagccttaataattttttgaaactgactctgcacatttgccatcccaaaaaatgttcctagcgtatagagttttacatgtttttttttttgctaagaatgtaaatatttcattaaaaatgaaaacatttaggaattacatgagttttacatgtttttgtacaatttttcactacgtatatattctaatcgtaaattataattaggctgaatttggtagatccttcaaggctcatgaaagtagatcttatagaatctcatgaacatgaggtgctcgtttgatttttctatatatttagacaaaagatttacacaaatcaaaaatagagttaatacataaacccacaaatatttccttgaacaaaagatatataaatctgaaaaatatttctgtaagagatttagatttatgtcttaaaattgtagtgaatctaataaatgctgagttacatgaccaataataggcaatatactaatcaaattgtaaagagttaaacttaacagtaacagtaactgactaacagttaaacttaacagtaacactaacagtgaaattaactttggccaaaaggataaaacaggtattttctctaaaagaaacttctaagaatttataaacgacataataatattcaaaaactaaaaagacataactctaaaacgacaaaacacatgaagaatatttgtctttaaaaaaataaatattatagaaataccctcaactttcgtttatcttctaccgttcaacgccggtgagaaaagacgaagactcgccggtaaaccactttcaaacagtaaccgttacattaatcaatttttccctatcttcccatggattctcctcgtcacagattctcaggttctttatataaatcctttaaaatctctagggtttcttcaattcaattctcacccttttcattgactccttacaatttttttctcttaactctagaatcatcgaaatggattcagctccttctccatcatctctggactttgaattatctcctccggtattggttacaatgacttcaacctcatcttcggcttctgataacgtcgaaggagctgatgatgatgctaatactcatgggattttcaattggagagatttttcctcttgttggagagtttcagagtcgaacttgtactgcttcagtttagctcttcttatctggttctttggtttgtttctcaacttaaaaattcgattttgatttgttctgcttttgaaagtttttgtctttgactatattgaatctgactaattctcgattgactcagcttcgtttattctgattgagaatctttacggaccaaaaaatgtctggcttggacccagttcgtcaattcttgttgaaccaagctctatttttgtcaaaagcattaaggttgtctgctttttactttttctcactctctacttgtgtttatgtttataaggctgtggtaatttattgaaaatatatttgtttcttgttaggttaaagtgcttgattactcagaaccagggcttcagctttatgggttctatagaactcctgctctggattgttttgtcaactggtctgaatcccgagtgttatctatctcacatgaatcttacaaggtagctttaagattctcagtactgttttctttaaaatgtatatatggctggtttttgaacttcatgagaacctttattgtattgattagaagtgttgtctttgtatacttcacattgatattttgaaatcaaagattcaatctttaattagtacctatgtttagtcaagaatttattgtagctttgattgtcattgaattctcttttagacaatttattgaactgattcatttctctcagggatggccatattatctcaacagtgggtcattgttgaatattacatataccgttaaaccacaaggttctgcggttcagcttgtggtcgatgaaggttagtaagtattgtagtgttttcattttctatgtctgcctgttggtttgatgttgtgtcactgaggctgtgatagcgttaaaatgatgagcacaacgaaaaacctaaaagattgacaataacgtatctaaacccatttcccgcgttgttttctcgcaatcgagacttcattcgtataaagtatctactgaaacgtagagcaaaccctaactagaaatgggaaataactttgaataaaagaggaaatataggagatggaactcttcttgtgagcgatttttttttgtttgaaagtgttaccttttagggatttaaactgattatgtcaaggctttctcaattcataggacatcaaggcgttcctcagtcggttttgaacgaccctgcatatcgttacaatgtttggtcgtggaatctaattgaaggttagtcaaatggaagctcctagttaaaatgcattgtgttgcaatgattaccatgagttaaataaaagtcctttacagggagtggtatgattcaattggagataagaaagtcttcaagttattatcttgctgtagctaacttgaagagcaaggacgtagaggtaaccactactgatcaagtatttggattaagttttggtttttccactcttcattgtgttacttgacatgatgtttgttcaggtggaactgaatattgatgtgaaggctgtcttgtatgatactaaacaatcattctacaactgtaacttcagcaatggcgagtgcacattcaatgcaatgtcccttgttggaaattctgttgtcgtaacttcaccagcagcgagtcaggtatgtattcgtaaaacgaaacaccaacagcgttattattatgactcttagctgaatgaatgtttgtcttactgcctcggggcttagggagtatccattgaagatgaatggtatatcaggttctcatatcaacctagagaaattgcatatgtaatcggcacaggtaaatatttcaatcttttcaaagtcaaattcatagcattggttagtttctctataacatgtagtattattgcatatgcaggtgtggtgatttgcttcatgttggtagctatacagttctgcaacaggtttcagtgcagtggtggagagggacatctaaccgaggatgattcagcgagaacacgtctacttgcagacaaagatgacgatggttcaagcatgggttcgtgtgacgattcttatgcaaacgatgatgctgacttagaagagtttatgggaaatgatggtgaagcaagtaaccgaagtagacgtctctgtgccatttgttttgatgttccaagagattgctttttcctcccttgtggtcattccgtctcctgttatgaatgcggaacaacgtaagttattttgtccacgaaggtctttaagaattgataatatacaactagacatatcaaaatcacttgattgatctaaactttgaaacgttatgaatctgcaatatgtgaaggatgcaagaagctgatgggagttgtccaatatgtcgaaggaaaatgaagaaagtgaagcgaatctatacagtgtaagatgaatcaaatataaatctctgacataatgttgaatctatagagcattaataaaagttatattggtattgccaaggctcatttctttctttgcataactatttcatttcgtccctgaccatctttgtgataacactcattgtttgtcgactcacattccgaaatgggatcgaaaccctgaaccggtaagtccagtgttggtgcgtggactaaatgagttggtacttcttgatgactttggaatatgcgtaaaggtgggattgcaaagtccaaatctatctccacctccaacacacaaccatctccaatgcacaaatttctgtatctttgttggtgatccaacttattatttttgttctttattgatttctcccacggttcttatcttcttcttccttttttattgtggttattgttcaagctcaaagaaattcaagcatgtatcataacatttttgttagttgacatggtcatacttaattaggagaaaccattacataatgtttttaagcactgtaattttttttttgttaaaataaacattatgtaattaattgtgcaataatacattcaatcattgttaagataacacatatgaataaacaatttcacataagtatattgaaattgctaagttcaatcaatatagtttattttagaatactaattaaacactaaaacttaacagttgattaattttaacttactatactgttaaacttaacagtttaattaatgttaaccgaaggacaaaattggaatttcaagaaagaatctcttcaaataatataataaaaaaacaaaatcctcactgacaaaaacaaaagtctgaaaaataatgttattattttatataataaagttataaaaataccctcaagactctggtcgtcgttaccgttcaaacgacagagagaatagaagaagactagccggagaaccaaaatcgaacgataaccgttacactaataaacttgccctatcatcttatctttcatggattcacttcctcacaaattctcaggtgttttattttatctttacttatcctataaatctctagggtttcttctatccaattcatttctcacctcataaatttttttttgttatctctttctctaagaatcaccgaaatggggtcaattcgtggtgaccttcagccgctttttgtcatgccaccacctcccctcgatgaagattgtgatgatatcttcaattctgacgaatcttcatgggggctgttgagcttgtcctgcttcggtatcattatgggattgtggttctttggttggtttctcaacttcagttccaatttaaagtttttgtcttttttgattatatgagaatctgacttatttcgtggattgaatcagcgtcggtttgtctgatttttggtgtttacggtagtgaaactgtctggcttggacctaactcgtccattcttgttaaaccaagttccatctttgtcaaaagcattaatgttgtctcttgttttttttttttttttctcactctcttcttgtgtttcttctgtgtaccaaggctgtgctaatttatatgaaatgtaatttgtttttgttaggcaaaggagcttgatttttcaaagcctggacttcagctatatggattcaatggtcaatctactcctagtggttattttgtaaactggactgaatctcgagtgttatctgtctcacagaattcttacaaggcaggtttaagattccttaggatctttattgtattgttttgggtacttgccattgaaaccaaagatttgatctttgtctatatattttgtcagaatttattttcagctttgattattgacgttgaagtctcttttagactgatttttttgaactgattttgcttctctcagggatggccatactacttaaatagaggaacgcatatgaatatatcttataacattttacctaaaggttctgcagttcggcttgtgatcactgaaggttagtaaaatattgttgttttgtcatatgctaattgctatgcttgcttgtttgtttatcattgttaatgaggcttggaaagagtttttaaaacatgaacataaagaaaaacctaaaagatcttctttgttgatgtgaacacgtaaccgataaaccctcgggaaaaccgaatatttaaataaacctgtttccctcgttgttttctaacaatcgagacttcatttgtgtatagtatatacttgaataggaaaataactttgagtgaagtaagaggaaatagaggaagtagaagtgttaatgttagtgagttttttttgtttgaaagtgttgccttttagggatataaactgactatgttaaggctctcaatttataggaatgccattcttctatcggtcgtcgctgaaggatattgcatttcgtgacaccgcttggtcatggaatctaattcagggttagtcaaatggaagttcctgcttaagatgcattgattacattgcttatcatgagttaataaaagttctttacagggagtggtatgattcaattggatataagtaagtctaaaggttattatcttactgtggctaacttgaagaggaaggacgtagaggtaattataatcaagttatgactttggattaagttttggtttctgttgtgtttctgcacagtccacagtacactgttttacttgacataatgtttgttcaggtggaactggatattgatgtgaaggttgtcttgtatgatactaaacaatcatcctacaattgttccttcagcaatggcgagtgctcattcaaaatgaatgaaaggtcccctgttgaaaattatgctgtcgtaacttcaccagcactgggtcaggtatgtactcgtaatacgaaacactaacaatattgttactgttattattattatgactcttagctgaatgaatgtttgtctcactgccttagggagtatccatcgatgatgaatggtatatcgagttgtcatatcaacctagattgattgcatatggaagcttcacaggtaaacttttcaatcttttcaaagtcaacttgattattggatttaagcatttgttagtttctctgtaacaaggaagcaattacatgtagtattattgcgtatgcaggtgtgttgctttccttcatgctggtagctatacacttctgcaacaagttaaagtgttgtggtggagagggatttttatccgaagatgattcagtgagaacatgtctacttgcagacaaaggtgacaatgattgttgtaatgatgtcgaagcaagtaacaaaagtctctgtgccatttgttttgatgctccaagagattgttgtttcctcccgtgtggccattgcgtctcctgttaccaatgcggaacaaagtaagttttttatcaactaagtacaacttctggattgcataattgtaatggtaatgtgtttaccatattgggattgatctaaaatattgaacgttgtgatttgacaatatttgcaggataaaaagaaccaaggggaggtgtccaatatgtcgaaagaaaataatgcatgtgaagcgaatctatacagcttaagatgtattattatctgtccaatgtgatgttgaatcgttagagcattaataaaaatcatataatttgatattgacaaggctcaggtctttctttgcattaattcgtttcatctcttaaccatctttgtgacaacaccattggttaactaccatagggtaggcaatatagtgaaccattgtttgttgactcacatcacaaaatggttcgaaacccgaatcgataattaaggatttcataaattaattgttaatttctgaataaattcggattttgtatatttcctccgtttcgtaatataagtagttttggaccaatttttttgtttcacaacataaattgtttttaactttctatgtaaataatatattattttaatattttttgattatttatattatgtaatctcttttatgattagctaaactttttaaaaataaatatttttaatttgcatatttttatttaaaacaacgtatattgtgaaatgaaaagagtataaattattgattaaataattaaggactgtaatttattttattaaatttaatattcttttccaaattctccacatattttataccataaaaaaagaacaacacccttacacacataacatatccgaatcagtggttcttcgacatcacacgatggtatagggaaatgagcttccacgtcaacaagataataatctcttcgggactatacatttacaacaaaaagaaacaaatcttgtggtcaaagtttccatacgtagcttctcttctctacactcacgtccaccacaatcctcgtgctccttcctctaaacccgtccgattcacgtacttttactatcttttctcaatccaacagctcacagtccacaaacaaatttcaaatcgcgtcctataaaatcccctctcctctgctccacactctctcaaaaccctagaaaaaatggcaggaaccggagttgtggcggtgtacggcgaaggagccatgacggagacgaaacagaaatctcccttctccgtgaaagttggtctcgctcagatgcttcgtggcggtgtaatcatggatgtcgtcaacgcagagcaagctcgaatcgctgaagaagctggcgcatgcgccgtgatggctcttgaacgtgttcccgccgatattcgagctcaaggcggtgttgcacgtttttgttagttgacatggtcatacttaattaggagaaaccattacataatgtttttaggcactgtattttttttttgttaaaataaacattatgtaattaattgtgcaataatacattcaataattgttaagataacacatatgaataaacaatttcacataagtatattgaaattgctaagttcaatcaatatattttgttttagaatactaattaaacactaaaacttaacagttgattaattttaacttactatactgttaaacttaacagtttaattaacgttaaccgaaggataaaattggaatttcacgaaagaatctcttcaaataatataataaaaaaacaaaatcctcacagacacaaacaaaagtctgaaaaataatgttattattttatataataaagttataaaaataccctcaagactctggtcgtcattaccgttcaaacgacggagagaaaagaagaagactagccggagaaccaaaatcgaacgataaccgttacactaataaacttaccctatcatcttatctttcatggattcacttcctcacaaattctcaggtgttttattttatctttacttatcctataaatctctagggtttcttctatccaattcatttcttacctcataattttttttttgttatctctttctctaagaatcaccgaaatggggtcaattcgtggtgaccttcagccgctctttgtcatgccaccacctcccctcgatgaagattgtgatgatatcttcaattctgacgaatcttcatgggggttgttgagcttgtcctgcttcggtatcattatgggattgtggttctttggttggtttctcaacttcagttccaatttaaagtttttgtcttttttgattatatgagaatctgacttatttcgtggattgaatcagcgtcggtttgtctgatttttggtgtttacggtagtgaaactgtctggcttggacctaactcgtccattcttgttaaaccaagttccatctttgtcaaaagcattaaggttgtctcttgtttttttttttttttttctcactctcttcttgtgtttcttctgtgtaccaaggctgtgctaatttatatgaaatgtaatttgtttttgttaggtgaaggagcttgatttttcaaagcctggacttcagctatatggattcaatggtcaatctactcctagtggttattttgtaaactggactgaatctcgagtgttatctgtctcacagaattcttacaaggcaggtttaaaattccttaggatctttattgtattgttttgggtacttgccattgaaaccaaagatttgatctttgtctatatattttgtcagaatttattttcagctttgattattgtcgttgaagtctcttttagactgatttttttgaactgattttgcttctctcagggatggccatactacttaaatagaggaacgcatatgaatatatcttataacattttacctaaaggttctgcagttcggcttgtgatcactgaaggttagtaaaatattgttgttttgtcatatgttaattgttatgcttgcttgtttgtttatcattgttaatgaggcttggaaagagtttttaaaacatgaacataaagaaaaacctaaaagatcttctttgttgatgtgaacacgtaaccgataaacccttgggaaaaccgaatatttaaataaacctgtttccctcgttgttttctaacaatcgagacttcatttgtgtatagtatatacttgaataggaaaataactttgagtgaagtaagaggaaatagaggaagtagaagtgttaatgttagtgagttttttttgtttgaaagtattgccttttagggatataaactgactatgttaaggctctcaagttataggaatgccattcttctatcggtcgtcgctgaaggatattgcatttcgtgacaccgcttggtcatggaatctaattcagggttagtcaaatggaagttcctgcttaagatgcattgattacattgcttatcatgagttaataaaagttctttacagggagtggtatgattcaattggatataagtaagtctaaaggttattatcttactgtggctaacttgaagaggaaggacatagaggtaattataatcaagttatgactttggattaagttttggtttctgttgtgtttctgcacagtccacagtacactgttttacttgacataatgtttgttcaggtggaactggatattgatgtgaaggctgtcttgtatgatactaaacaatcatcctacaattgttccttcagcaatggcgagtgctcattcaaaatgaatgaaaggtaccctgttgaaaattatgctgtcgtaacttcaccagcactgggtcaggtatgtactcgtaatacgaaacactaacaatattgttactgttattattattatgactcttagctgaatgaatgtttgtctcactgccttagggagtatccatcgatgatgaatggtatatcgagttgtcatatcaacctagattgattgcatatggaagcttcacaggtaaacttttcaatcttttcaaagtcaacttgattattggatttgagcatttgttagtttctctgtaacaaggaagcaattacatgtagtattattgcgtatgcaggtgtgttgctttccttcatgctggtagctatacacttctgcaacaagttaaagtgctgtggtggagagggatttttatccggagatgattcagtgagaacatgtctacttgcagacaaaggtgacaatgattgttgtaatgatgtcgaagcaagtaacaaaagtctctgtgccatttgttttgatgctccaagagattgttgtttcctcccgtgtggccattgcgtctcctgttaccaatgcggaacaaagtaagttttttatcaactaagtacaacttctggattgcataattgtaatggtaatgtgtttaccatattgggattgatctaaaatattgaacgttgtgatttgacaatatttgcaggataaaaagaaccaaggggaggtgtccaatatgtcgaaagaaaatgatacatgtgaagcgaatctatacagcttaagatgtatcattatctgtccaatgtgatgttgaatcgttagagcattaataaaaatcatataatttgatattgacaaggctcaggtctttctttgcattaattcgtttcatctcttaaccatctttgtgacaacatcattggttaactaccatagggtaggcaatatagtgaaccattgtttgttgactcacatcacaaaatggttcgaaacccgaatcgataattaaggatttcataaattaattgttaatttctgaataaattcggattttgtatatttcctccgtttcgtaatataagtagttttggaccaatttttttgtttcacaacataagttgtttttaactttctatgtaaataatatattattttaatattttttgattatttatattatgtaatctcttttatgattagctaaactttttaaaaataaatatttttaatttgcatatttttatttaaaacaacgtatattgtgaaatggaaagagtataaattattgattaaataattaaggactgtaatttattttattaaatttaatattcttttccaaattctccacatattttataccataaaaaaagaacaacacccttacacacataacatatccgaatcagtggttcttcgacatcacacgatggtatagggaaatgagcttccacgtcaacaagataataatctcttcgggactatacatttacaacaaaaagaaacaaatcttgtggtcaaagtttccatacgtagcttctcttctctacactcacgtccaccacaatcctcgtgctccttcctctaaacccgtccgattcacgtacttttactatcttttctcaatccaacagctcacagtccacaaacaaatttcaaatcgcgtcctataaaatcccctctcctctgctccacactctctcaaaaccctagaaaaaatggcaggaaccggagttgtggcggtgtacggcgaaggagccatgacggagacgaaacagaaatctcccttctccgtgaaagttggtctcgctcagatgcttcgtggcggtgtaatcatggatgtcgtcaacgcagagcaagctcgaatcgctgaagaagctggcgcatgcgccgtgatggctcttgaacgtgttcccgccgatattcgagctcaaggcggtgttgctcgaatgagcgatccagagatgatcaaagaaatcaaaaacgccgtgacgattccggtgatggcgaaagctagaattggtcatttcgttgaagctcagatcctggaagcaatcggagttgattacgtcgacgagagtgaagttctcactctcgccgacgaagataatcacatcaacaaacataatttcaaaatcccttttgtttgtggatgtaggaatctcggtgaagctttaaggcggatccgtgaaggagccgccatgataagaaccaaaggtgaggctggaactggtaacgttgttgaagccgttaggcacgtgaggagtgtgaacggagctattcggttacttagaagcatggacgatgacgaggttttcacttacgcgaaaaagatcgctgcgccgtatgatttggttgtgcagactaaggagcttgggaggttaccggtggttcagttcgctgctggaggagtggcgacgccggcggatgcggcgttgatgatgcagttgggatgtgatggagtgtttgttgggtcgggtgttttcaagagtggagatccggtgaagagggctaaggctattgttcaggcggttacgaattatagagacgcggcggtgttggcggaggtgagctgtggtttaggtgaagccatggttggtcttaatttggatgataaggttgagaggttcgctagtcgttctgagtaaccaatcaaatttcagatgtttttatccataacgtttgtcactttaatatgtatccacaaaccaatattctcgatttattcaagattttatagaaaaaaattggaaatgaggagttttgttggctagtgtggccaaccataatttcattggattaatggcaaattctacaactaaactatgtgaaattaacaatatcaaacctcaagagagagcagcaatataataagaaaaagtgaagatacggtttacatattatttagtaacgactatatcaaggacataggaataacagataatacttggaatgtttatcaattattatctagttaataacagtgagtcgacttggttttttccacaaggacccttttgccttatcagagaacggtactcgtcgaacctgattggtttataaagagcaggtcggtttgcagttactagttcttcgattggtccaaccgggatatcacttctcgggttatagaagaatgccaaagagactcgttccataccggaattaacgatcacttgatgttccacgcttttgtaaattccattgctaagtatctacacattgatatatccatcggttagtatttaatttgtagagtccatttcaagatagtagatcaaatatcacacaataccaatatgatgttttgccacaacgctaaataaaattaaaatatttatatatgttgtaaaaagacataaagtctctaaaaccataaaatagtagttttagacaacgaaagtaaaacacacaacaaagcaaaacaaatagactttcgataattaacgtattttagagagacaactaaattcaagaaagtcaaaaatagtacctgaagttgatctccaatgttaacgatcaaagcattagggactgatttaatggtgacccagccatcaccacgacggacctgaaggccagcgaccttctcgtccgggagaagaatggtgatgcctccagggtcagaatgagaagagagacctaaagtgagctgcggctgagggcattttgggtagaagtttgtcctcagagaagctccgactttgtcgcctcctcctaaagcctgcatgagcttgtttggttttaaacctaaactctctgacaacgtctctgttagcctttcgcacagttttctcacttcttctccgtacttttcgatcaattctctgcacatcagtttttcctcgaaatgttagttatatagtgatctttatgcaagggaaaacgaaaatcttaatagatttattttctcaattttcatttaatcgattaattgcctatgaacaactatttgtgagatccgtttactgaattttgtttttcgtgaactaaaccattgatcataatgaatctcgagatctaggttacaaaataaaacaacagacaatatgtacatattgttttatttagtcaatcggtcaaattgtatgtattataaaagaaaagtcatgtttcacgtgggtataatgaccacgtgtaacgtgttcacacatgagacacgtgcctaaataaacatttagaccaaacggccatgtgtgtacgtttatgcaagttgtacttccacataattcagatgcttgaactcctaaaatttaaaaacacacacacgcaacgtgtccccatgcaaaacattcacttagtaaaaaaacttcttttagtaaacggttccgttataagtataacttataaacatttacactcaggaatataatacatagacctaaaccatatgtatggacaaaaaagttacaagaatttatatgcatgtacctgatcttaggaggctgagatggccacttggaagggtttcttatggaagaaggcaagtaattgaggaagaaataatcactccaatctaatttagcatctttcacaaccccaaggcggcttccatatccctcgtacgtgtccggtgagtttgcatacttccgtttctcctctagcggtagctcgaagaactctcgccacgctcctctcactctctccatcaacgagtgggtcacaccatggttcaccatttggaagaaaccccactcctcacacgcgctcctcacgagccttagcccctctggtttcccccaaacgtcgttcatgtctagaacagggatttctatcccagcatcggattgggtggtgttaaagaccggtctctgatgagccggcttcacatagcggtttggtacagttggtacaccggtttgggacaaggattgcacggaaacaatcggctcaggccagcatgtagccattttgtgaattgttttggaatttggaaaataggataagaagatactcaaggagagaaatgtagtggaagaatgaaagttgtagatggtggaagaaacaaggacgagtggggatataaatagggaaaattgtaaaaccaaaatgaaacgatgatattcttttattccagccttttttttctattgaatattgaggtcgacactcgacataataaaaccttgcatgctaagctagttggatgataaatttaataagacacgtttttaaaagagttgtggataaatgtcgacaatattgctttttgatgtcttcagtgacttttgaagtgaaggagatagggaacgaatttcggcgccgtgcgacggtttgcaacatgtacaaaagtaataaacaatgtgtttatgtaaaataaatgattatgctttactacttttgcatcttatagaataagagtttgatgacaatcagatgtcgattcacgattgacagacttaaaaatacctaatcaacaacagattatcggtggaggtcatgccaacatttggaacgaaaacagccaaacccatagtgtatttttttcatggtcattgtatttatatagactaaagtagagatcatcataatttaaattattgttttggtttgtaatccacaaaagccaaaaaataaacaaaaaaaacgaaatcatttgaaaaatggtttgattatagtggttgaaccatcttctgtttggcgcaacattgttgaatgattttggatgactgaaattcccaaaagaataattataaaatactcaaaaactaatttaaatgattttttttcagttatatctctaacatgtctatgatatataacaaaacgtttaagacaaatgtttaaacatgagaatagaatcacgctttcaaaacgtgacaactaaagaaataccatttatcaatctaactctgttaaattcgattatctattgtttttctttgtacaaatggtattttgatgctatacattagcatatataataggaacgttcttttagatggtattaaattcatttcatcctatatatctatttctttcatcttctagatcgagatatgtcaaaaggaaatactagatccgtgatgttgacaaaagaaattgtccgcctaatatgttgaatattgtgaacgtaaatgatgtgatatagtgtgataaataaataaataaatgaatcaattaccagataaggatttttagtggcattcatagatttgccgaaaaaattatatctaaagttacaatttacacatttaggtttacttggttctatttttttagggtataatatttgttattatgtattttataaaaaaaaaatggaaacataatgaaacaaaattctcaaatacatatttttatttaaaaagtttctcaaaattttagcttttaagtggcagaaaatagttttttttttttttatagataaagtgaaaaatctaaaatggcaaaatcaacaataatccaaaacaacaaaatcaacaaatctaaaaaactcgttgattgttttgaagacaacagctatgtggtgaagaaaaaatgaagaaaaaccaaaatcgacatgtgggctactgtgtaagatgcattcatttacagctaccaaacgcacacgtgacaattttttttttttttttttttttgtttgtatatattatataaatttaaatacaatcgaaaacaaaaattcttcgttaaactcttttcaatgctgtatttgaagcttcctatttttattattaaaaatatgttgtttctaaaaaatatatatatatatatatataaaaattcttttcttgactctacaaaatttttgtttgctaacaattttaccttcactgtttactatacaaaaaatctctgttttagtgaataatatatgcaactaagtttttcgcaataaaaatacaataaaaaaattgtagctagctatagtctggtcacaaaccataggaaatgtagcctctaaaaataaaatcaataacaaatttgtactgatctttttatatcgacataaatttggtgaaagtccaaataacatgtttttcgtaccataatcaaccaagtggtgttccttcaacagatacataaaacgaggcaaaataaaagtgaacgaggcagacaaagaattttccaaacctcatttaagggactaggttgactttagtcctttactttagaagagagttgcagttttcatctattgtaggggttacacaaaatttgttcttatgtgagtccaattgccaaattgtacatcactcgaagacaaattgggcccaaactgtgtagaatgggtttgggctgccaacccataataaaccttaagttgaaaatgaattagtttggcacatgcttttttttgtcatgttcatgcttttaaaaaaattcaaaattggcctaacaagtttcacatctctagaatgttgttcctagctggctagttccacgcacgtgtcacactataatttgtcatttcgtgaatgaagaaatcattccaacacttttgttattttgataaccatacaaggaataacacgtgaaggaatttaggaaacgagagattctagagaagtcacctagttttgtatttaaaaaaggtgctcaaaattagaaaaatatcgaattttgttgaaaaagggaaaaataaacaaagacaaagtagtaaatagaaacttgggcatgaagctaaggatatgactggtcgccgagaattaataaccacacagtattattacaaaaagtatacaaaccgaaacttctcgcggtgatgatgaaacctcaacgcaatgttatcgtcacatcaatttgattcctcattatagtatgaatgaaaaagcagattaaacagaaaatacataaagagctctataactcaataggaaatatttaccactcacctatgtttttcttacactttcactctaatttattttgacaaaagaaaaattgtattatattatttaaagacttgactttctctttaatattttactgttttttatatttaaagcaatataaaaaattatcatcattttaattaaatttattatccctaccattttaccaaaccaactcagtaataaactcatttcatacacatatttgacaaatatgtcgactgtcagaatctagaatactatttgtcaaatgaaagtgattacattatgagataacgatagaaatatccacatctctcctgatcaccagtcaacatatcttttattaacgaattgactggtagtttaagacgctaattatcctttgctctataataccatttcaatcgatattttaactaattatatactattagaaatgaaatgacaaatctgccgaaagcttttttctttttaatattttgtcaaaagaagacacacaaaaaaaaagtaaattgtattagaaaaaatccaagacagagaaaaaagtaaacgcgtagacagatggcgacaggagaaagagagagtggagaagaagaaaagaattgcgatcaaagaaaattagacttctttcttccaacgttttcacattacaaatacacaaaaaccaaaagataaagaaaaacaagaaatattttgtttttcgatctgaaaaagtgaaagcttcttcaaaatctttgctttagagatcgtttggtgattttttttctttattttttttttatagtttcttcttcttgattctttcatatggatggacatcagcatcatcaccttcaccagcttcaatatctcaacaagcatcatcttcatactcaatcgcaaacgccggaaatagcctctccggtagctgttggggataggtttccacagtggagcgtcgaagagacaaaagagttgatagggataagaggagagctagatcaaactttcatggagacaaaacggaacaagcttctttgggaagttatctctaacaagatgagagacaaaagctttcctcgtagccctgaacagtgcaagtgcaagtggaagaacctcgtcactcgttttaaggtctattctctctctccctcttctttcattttgtggatgttttataatcttggaggtcttgcatggaacaaataaataaataaaaatttgtaaccaagaaatattgaatcttatagtccataatctttccgggacatatagacaaacaccattgtaaatatttctgaatcttgttgtccataatctgctaagtagtttaattatatgtatacaatctcattggtgatgtattgcttgatgtttctagggatgtgagacaatggaggcagagacagcgagacaacagttccctttttatgatgatatgcaaaatatatttaccactagaatgcagagaatgctatgggctgaatccgagggaggaggagggggaacaagcggggcagcgagaaagagagagtattcttcagatgaggaagaagagaatgtgaatgaagagctagtagatgtcagcaacgacccaaaaattctaaatccgaaaaagaacattgcaaagaagcgaaaaggcggtagtaatagtagtaatagcaataatggtgtaagagaagtgttggaagagtttatgagacatcaagtgagaatggagagcgagtggagagaaggatgggaggctagggagaaggaaagagcagagaaagaagaagaatggagaaggaagatggaggagcttgagaaggagaggttggcaatggagcggatgtggcgggatagagaggagcaacggcggtcgagggaggagatgagagcagagaagagggattcacttatcaatgcattgcttgctaagcttactagagatggttccctctaatcttttgtcagctttgcttaacctaaattaacttgttcttatatgcttgtttggggtgtagtgtaggtacaattatttggtgggggaagataatatctacggcaaatctcaacactcatatattgattgatatgatgacatatttgagttttagtgaggctttagtaatttatcatccccacattatttcttcctagtttatattttggcgagccaaattcttatagcatatcatttaatcttagtagtatactggttttaattagtaatttgtaggaccgtatgtgtagtattttagagtaatttggattttgttagagttaacctacaaatccatatatagtgcagcgaatgtaatatcggtttcaaatattatcttcatgcagaagagaacgaggatactaatagtttatggtattatgaactaattaactttgatgagaatgtagagatcaagagggcaaaacagttagtggaaatattaaacatgctcgaaacaagaatgaaaacttatcctatgaattatgggatcatttaggtccattgtctgcgatctaaacttttattattttaccataaatgttttcttgtaacattgagaatcatatctaacatggcaagataatacgtgaatgcgtatggcgtttcttatccacataaatttgttttacttatgttttttttttgttttccacataaagattagtaaagatcttgtattattttatttgtaaatttatatttatataattatatactaaggagatgcttaatgaataaaatacacatcacatgttaattctagaaaatacgttaaccagtttttttttggtaacattgttgtttctttatttatttactagctatgaactcatgcgtggatttatttgtaaaaaatttaacagttttttgtgtgactaaaatattttattgaaaattttgaaaatatgattttatatatctatttgttgttaatattataaactctttgaattttaaaattatcatgacaaatagtaacaatttaaatacataactagaaataacctttatacaactcttagattttacaacatttagcaaaagaacatttttttggttaatgactctctctttagctttagatatttaggataacgacgtctttttttacgtattaaataaattgttgtataggaaatagattcgacgattctcattttggtacccgcaaatttactattgtttttcgtttatcttcgctgcattagttagtatagctcttctaaaaataagatattttgtagaaatatattcgtaagtttatctacactttcttttaacaactcatatttttctcacattcttttcaatatgtatatgaatttctttcacaattttttttacagagagctatgactctccctatctttttgcaaaaactcgttttatttgtttcattttttcttacagtgtctctttcatcctcttatgattttgtctaagcaatatgtgccataccttcttaaattttcacatgctccatatttcttcttcgaaaatctcttccttttcttgttagtataagcatttttcaatctcgtcaagatgtactctgttttgttttctgttattctaagaaaacgttttagcttctaaattgatacttaactctatcacttctcctttttgatgcagtttagatcctcttcaccttcacgcttcccagactgaaagaccttagtttatatcttcgagaacttgattcaaattgatacgattaaaaacaccaccatcaaaccacgtccttgttacgtttctttaaattatattaaaatgttggattacttgtataagatcttataaggtttgggtttaatattacataattataattctatagcttctttttttttataagtttaaatttaatatttgttattttccttttctattttaaattttaaaatagaaagtaattactattttcaaaattgttaactaattagatactaaatatgttaattaatgacatgtttaacgcggattggtcgttctaaatcctatgtagacgcctttagaagcaaatagtttcaacatttatatagtatagatttatttgacattactttctcattcccacatctttaagcgttttttttaagatcttataatactttttgttcacaagatgaaaatagtttagttaaattttatttatcttttaaattttaatatagtttcggccgatacatataattcatttgtcatcaaataccacattttccacctggtcccccaaaagagaaacttactccagttgacttgaaataaccccagtatgatagtctataacattggtaagaatctgcatatatccttgctttcctgctttcaatatcaactagttgataatttgaattcttaactttaacatgaacataatgtgaacttttaaaatagctaataaccggaaaatgtccatttcccattggaggactaattccatccggagatgtaaaagtatttcctccaaatcgcaccaaagaagctcctttgtttaagtgtgtaaatagttttttgggccaataaccaactatttcgttcatgacagtgtcttttagtacccagtttccactgaaaccatcctaacaaaacataaaacactagaaaatgactgcaaaaatatttaaattttatacgcatatatgttattttaaaaagaaattttgatgcactatattgcaaaatggaaaattataatgcggatgaatgtgattatttcaaaagcctaacaaagaatttggatttgtggcatgttattaaaataattaataactaaaattcttatcattgttgtcgaattatttgtcgtataaaatgtgaagaagatttacctggaaaacttgtggtctgataacaactgatcctttaccaccataaatagaggattcattaaaagcgattccaatttgcggaactcgacttataataacaaagccaggacaatttgtattataacacccagttttcttatacccatctgcctaaaaattcaaaagaggcaaaatattttgagatacgagatacaaagagacaaaatggtatcaaatgttttttttttataaacatataaagatatgatttattttagagaaattggtaaaaatgccctttcaagactatccctttttaactatgctatttcatgttggtcatttttatttatactctcttttaatttttagtgaccattttacccctattttgaaaatgttttaggttaacaaaataaaatattaatttttctgcctaaaatattcagaagatagattttccgataattatttttttcgaaaatatttttcccgcaaaaaaagaaatggcgggaaatagatttacaagggtttttacaagatttttaaagggtttagaaggattttaaggatttacaagggtttttcaaaaaaatttaaaacatgtacaagagttttaaaaccttataaaaacttaaaactcatgtaaatctttttaaaatattttgtaaaggttcacaagagttttaaaatggttcaaagattattaaagagtttacaaagatttttaaagggtttacaagagttttcaaggatttacaagagtttttaaaacatttacaagggttttaaaaccctttaaaaactattgtaaatcattttaaaaccttttataatggtttcaaaataataaaaaatgattttaaagtatttacatatgtatttaaagactttataagaggttttaaaatgatttacaagattcttaacaactttacaaaaaaaaaattaagagtttctgaaagatttacaagggtttttaaaatattcttgaaaattttacaagaattttcaaatgcatttttttgtggaaattattttttgttatggaatttttttttggcgagaaattgttttttggaatttctgtttctaattacatattctcattagatgagaggtaatttggtcattttgttcaaaaaatagtatttttaaaaatgaccaacaaaaaaatatattgttacaaaaaaatagtagaaaaatggtacttttataaattctctttattttgtaaaggttaggtataaagactttattttttctaataatgtttttttttattgttttgttcatgtatgaaaaaacacaattattcgacaaaaaaaaaaacataattaattcacttacagtccaatatatcgtaagtcgcgttaaagtatccccatataatcttggatgcacctataaataaatataaaatatatgctgaagtgagtgttttatctattttttaaaaaaaaatatttttgtctacaatattaatataaattaaaatattaaccaaaataattaagtgttaatatttttgtaatattgtatattagttccatgtataaaatcatatgattacatatgattgtacacaatttgttttataagtaatattaacttaccgcccaaccaaattgtatgctattaagttcacctcgaggtccattctccaaccaaatttgacttttgctatattggttattttgtacagttacattatgaatacttatcatagattctgctccccggtagatacttccatccaaaacggtctcgattgttgcaaactgtacatcacatgtatatatataaaaataggtaagtaaaaaaaaataaaacaaaatataaaatgtgtataataaattgactcgttcacaaattatacgtgtgttatataatcgacttaatttatagatagaatcaatgataaaaccctaaaaaggcaagaacatgaatatataaaaattattcgcgattaaataaaatttagataaaatgaaaaataagaaaattacatgttgaccaggatactcgactgtgttgagatgaatgatttcagttccatttttttgttttaaaactggaactgttccttgtggacaacttagaacattttctttatatttattttttataatatggcttttattgaaattgaaattttcctgtaacaacacaaaataaaaggattaaggaaaataatagaattacaatattatgctcatataattggatgtattattagacatcttattatatctaagtaaccactataacgactatacctgaatcttgtggtttttcaacaatggatgttggaaagcgggttgtttgtatatatcaacacaatcaaattcctgtaaaattgactacaaaacaatatttatttgagaaatttaaatgatcaaatcttaaggaatgtaaaaattacaaagtaaaagttatagaagctcacatcaacgtttccttcaaccatttgcgtaaaaagcaaataagaagatagaacaaacactagatttaaacccattgtttgattttacttatttttctccattgatattttgatctctatatatataaattttgagtcaacaaacatttaacatgttgccaaaaaattatactttagtcaaaaactaattaatttaggaaccatgaatttatacctttttttttttttttttaacaaaatacagaaaactaccatacaaacaacaatatgaaaagagcacatatagaaataacatcaatgaaaggaatacactttgactaaaaagtcacgcggccaaccgtgtcgccacgagttaacagcgatctgtgacctcttataaacttaacaaaagtatcaaacacaaagttgaactaaaaacttgaaagtcttgtactcttctatacatataaagtcactgttatttttcatatgactatttaatacagttgactaaaaacatacttttaattcagttgacaaaaactctaagaggaaatgaaacttgttcatataataaacgtgaaagtaaatttgctaacaaaaaatttagaaaattttggtccgtaacataaaatgcaatggtttaaaacacctaaatttggtccatgtaataaaatgaaacttgtccacaaaaactagagttggtcaatgacattacttaagctagtgaacccgtaaataccaaaactctaatattaaaacttttgagcccattaataaactaatatttttgagcccattaatagcttaaagtgcatcaacgaatgctaatataggtcaatctacccgaaaaaatctcatatattattattttttgactttcctactaggctctattgtttcaccttctatgaacactccaatctttctgtacttagccatcctatgcttcaggagctcctcctccccactcattttcccaaattcctacaagtcccaagaaaaagttagaaaccttttagatcacatccaacgttgagaagaataactatgcctacattcatgttttcattgatagcaatctttatctgctgcgacgtccatgaaggatcagcatgggccccaccaaacggttcctgcacagcatgtaagagagtaactcaatgatccaaactgacaaaagaggtctaagaggcaaacacacaaatagattagaggtaggatcagttacaggaatgattccatcggctacattaagcttgaccagctccttggaggtaattctatgcttttcagcagcctgagtacacgagtttcattcaagtgtaaaattagagtctacatgatcacttaattaatagtagagcagtgtacatacctcaggagcagccttggaagtctttcacaagagcgctgcacaggcatctggactgtgaaaagcaaaacaacagatgggataaattcaacctatagaaatatcatatcatcgtaatctacattggggaaattttacctggcaacatagaaaactgcattttcgagcatcagcatttcattatcacagccaatggctagggcaccaccagaaccaccttccccaacgacaatagaaagaattggcactttcaggccaaacatcgtcctcagattgttggcaattgcttcaccctattatacaggtaaacaaaaaaatgttatgctgcagataagataaaccagtacacttcaaacataaaagacatttattgtacctgtccgagttcctcggatttaagttctgcataggctccaggaatgtcgatgaattttacgattggaaaaccgtgatggtctgcataatacatcatccgaagtgctttcctctatctgtggtagacattatagaaatttgataagagtgttgctgattctgaatgtttctatttaactgcaaaccaggaagctcctcatgaaaacatacccgtgaggagtaggcataccaaagttccgcattatattttctttggtgtttctacctttctggtgacctatgaacatgtaacgttcatcaatggttccaatacccgtcacaattgcagggtcatcataccccgctcggtctccatgaagctccataaactgaaacaagagcagagagtcccaagaatgtaaaaaaaaaacaagaatttatcgtcaatgcatgacaaaaaagccttactactgagagaccaaaccttgtcagtgatgttatgtatatgatcaaggaaagtaggtcggttgggatgacgcccaatgttcacacgttgtatcagagtgagatgctgtaaagattttttccggtgcctgacattagaatggcgggggtcaataagaagtctttcccaaacaaattgtagctatacattaacatcaaatttgaacggtgggtctcctttaaccatttaaatcgagaaccaacttatacttgtatctttacctgtctatacttgttctccaaagtaataatctgctcagtgaagtccaaccccgtttcattcgccatcttccttacctgcatcacaagaaccaatgtcatgagaaactacacacaggatatcaaacaaagatacaaaacaaaatgtcatcaaagacgaaaaattctgggacataaaccaagtcagactaaaacatggactttcaaaaacttacttaagctacgggagaatgcagctaagcggtttacaatcgtgccagggaatagtcggacttgtagatagtgcatgagggtacgggcaggagtgcataagttacatttgaaattgaagatagtgcataagaaaaactacccattttgctaaatacaaactaaaacactacccacctagttaaaaatttcctaaatactaatactaactagaatagaattgccctacagataggacaagtcttgttccattgacttaaacagtgaaagtggaacgcgtgtccgcacactgtattagccaatggaacattactttcaaaagtgtctagacaaatactacaatccctttcgggatacctaaatacgaaattctctactggaacgggtatgagcccttcttgatgatgttcatcatcggagtcaacaacaacttgtacatatgtgttgtcatcaactcgatgaacatcatcaagtgatggaaatattatcctaagacatataacaaccaacactaagatagttataccaaaaatcatggcaaataacaaaataactggactctgtaacataaaccagataaacgagcgcatgattagaagagttagaagagagaaggcggaggaaaaagaacagggagttgaatggagttgaatgaatggtttgtacaagatgaatgaatcgtttggtaagtagaagaaataatattgggacaattttcctgaaaagggcgattagaaaaaactgaaaaacatcgtataatcttgctgtaaaagtgttttttagcgaagattaaaacataaaccaaatcagggtctgacctctaaaatcagcttccagacctcgacaaacaggtatctccattgacgaatctgatgatagaatctctgtttttcgatatccgaatctctgttgacgcatcttctctcctttgtaaccaatttgataaaacaaaaaatcgcgatcacacctcttcttcgcatgcaggactgccttttttcttctgtgatgttgagtaatcaatcctctttcgcctcgtccgccgtaattgaagacctcacccgcttctctggaaattcgaaacttcgtcatcgaacaatcggcttcaccggagttcttatagctagccggatttgatccccaggataatcagatcaacaatcaaacaataggataggatctctgcttttcgatctcagaatctgcttttcgatgacattattgtcattcccgattgtttctcttacgatttgggcttagtactacctaaaagggctttttgtttttttgtcggccaaatttcattatatgaaagcccagatcggaatattacaacatgatacaagcctcttttaagcccagattaaatgaacccaataacattaatgacacgtaaccccataacgtgtattgttaagcacatatgtgggcccactcttctcttatcatctcgattcttcttgccgactaagatttggatctgacttgattcttctctccggcgattagtagatagagacttggaatcatgcttcggagaccttctttccacaattttagccatagcaactgttgaattagtcttagaagacttcgaactcaatcccacctccaagaagaagctccacctaaaacctaacgaagaggtctttaatccttcactttgaggatatagcggcgaagatattactctatcattggagaaacatcaagtcgatgactaattctgataaaagcaaacgggattcaagagtaaaagctgtagaaagagggaagaacaaaaaggaaaaaagcgtatcttagccgacaaattaagatagataaacagaaataaagatcgactaagaaaaacagaatccaaacaaagtcggaaaactatataaaacaaaaagatggaatattccggttaaccggaaatcaccactctctctctcaaagatgaacagtgtgttaagagagagagtctcttttaccgtatctttttaccttttagagctttaattatgcttacttgtatgggctgtaaaaaattattaggcatcggccatttttatttttaatgcaacaaaatccactaacttctgcctaaatttcagtttgttgtttctggttgatacaagtaattattattgttaacaaaaacatagttaagttcaaaacttagatatttcaaaaatttcgatgaacaaacttatgctatggtttatgatggccaaaccgattcgatcaagtttttttttttttgtattggcactagtactaccactcatcttctttctcttcttagcttgttgccctttttgacattcgtctctttttctcttcattgattccttatcatgcgatttcccaactaaagacggttgttctctctgagcaaaactcttggcgacatgacccaagtcaagtgaagcttcttcaccacgaaaatgctcttgagctctcccttgtgagacacgaatgcactcttcgctaggttcttcatcttttttggtgtaaatgttaaattgttcttcatctttggctgtgaataagacggatacaaacaaagagagatttttaccatcagagtatcaatcaatcacagcgagagggaacacattgaagagaatcgtacctaaaagtaaaatctactaacttctataaaatttcattttcatcgactacatttatttctattgttggtgcaggaattagcacctccgacaataccggcttaaaccagaggaattacgaattagactgagattgtaatcaaaccggggtatcccggtttagcctgttaatgagccaaaataaggaggtcatttgccgactttagccccaagtagggagaccgcctagccgacttcctaattcgaagaaaaagaagttttctcctttgaaaatagcaagtcttcgaagataaaggaaattagaagattcaagcctcgaagaattgaaagtttaacatatcttttaatcgtcttaataatgtataaatagggggaggggggagggagttgtcctctattctaaggatccgaaacttaataataaaaccctagttttcttcattgttcttgagcaaaaccctaactttgtctctaaccaactttgttcttcttttcattgagcctttggtcactaaatagcgagagagagttaagtaaatttgtttatcccctttaaacaaatttattgtgtgattttcagaatcaacacctatcaacttattttacagtctgacttatatttttttattgttttgtttttatgtaatcgaatttttgagaccgttgacttgttgttttatttgttcatttaatttttttcagtttccaaaaaaaaaataaaaagaaaatacaacccataaactaacctcgtcatcatcatatttttcaattttcatgaacgtttgttactcatataagttgtaacaaatgaataccatagaatatttgtgttatttttgagatattcatcctacaaatgagaatttagtacttaaaatgaatattttgtgttagttcacccaaagattatgtcaaagaagaacaataattctctaataaacgtgctacaagaataagaatgctactaaattaatcaattaaatcatttaacgtaacaatagttacttaactccatttccaattatgttttgtttcaacatatatatttaaagggacaattagtgtaaaaaaaaaaaaaaaaaaatcattggttaaatgaccacaaaataggtgaatttagtggatggttatgcgttttaaacctactcttagatttgtatagaatctgtaaccttttataaatgcggaaaacagaaaacgaatctgtaactatggaagagaatccaagcatgttttctctataatgaatgtttggagttacaactagaaatagagaagaaaatcggatgaaactagttcaagatattggcaagttcaccattttcatacattgaggtcaaaatatcacatcctcctacaagttctcctttcacaaatatctgtggaaacgttggccaattgctgtagttcttaagcgtctcccttagcccatgattatactcatcgtcaagaacatcaacagtttcataatcaactccttggctttcaagaatcccaacaactctctgtgagaatccacattgaggagcactccttgatccttttatgaaagctaccactttgctctctttcactaaacggtcaatcagttcctccaaaggaaccgtgagctcaacatggcgacctggagtgagacggatatcggatttcttcctcggagtttgtttgacaaatgtgttgttccctgacttattccccggcggaacttttccagttacttttatatgttcttctatccataatttccatgcttgtgttaaaactgctttatctggttcttctactattccaacctagcaaaacaatgatgaaatcagttatggaagatatatcaacaataccaaaacttgtcaatatccatcacatgagcataaacaaagtcctattgagtcaatggagcaaataaacactaaaataatcataacataagtaaatcataagcaaaatataagcaataagtgacaaataaatgatagaaagaggaaaaatgtaaattcttaagataataatacaacccataaaaatgtaaatttctcaagagcaatctttagatttgactgttgtaagctgatacagttaaggatcatggacacaaaaaaaacaaaagctcttgttattaattaaaagaacctgacacagaatggtaatcaaaatgccaaagagaatcagttctctccattggtacaaaaccgatatacctctcaaacctcgacaaatctcgccaatgcgcactgtcctgtatctatagagtagaatttccctaaaaaactaatcaaaagaaaatgctaaaaaaacaagtcctaactcctaagtaacatatacaaaatgaactattgatgcatctcctaatcataatgtgtggtaagtgttgttaaaagaactcttaccaacaacagaaccaagaacttcattagctctagttttgcaaacaatagtgatcctaatgatatgaaatactatctctggaactaaagtgatgaacttttgtagtattcatttaccaaaacacttcccaaatctatgaacagtaataaacaaaagtcaaccacaacaaaacaaagaatccttcgttatagtaacagacatgctactcctctatatgaaatcatggataagtaccttaacggagccacaaagctccggcacagatttgagatgagcagagacactcgcagcgatgttccgagaaattccgacgaactgaagctcgtcgctcttatcgtatacagcgtatacaccggaagcggacgggattgaatcagcctctgtgattggaagcagctccgtctccgttagagatttgacggcggaggcgataaagaaggaacgacgacgagacggagctgtgtcacggagtgtgaaggagagagatgggaaggagaaggatggtgtgaagcgtgaatagagggtgatcacaggggtatttcgagaaacatgtggacgaacaacacgcggagaggctgaggcgtgcaaggaggaagaaatggtgattgcagccatttttgtcggagctgagaaaagttatcggtggaaaatgatgagctcttttatttgacataggattttatccattgggcctgaattggactgttattaaggccttatgatacttgggttttaaataccataattcggaaaagtgggacccgctttagtttcttttttcttacacattccatacttcagtctgttatgaaacaaaaggaacatttgtctagttcacttcatgatcaagccaaatctaccaatgtgacccaaaaacatgtgtttaatccggtaaacagatctcagtatggtttaaaacagaaccaaaacaaacaaacaaaattggatttcgaacataatgctatttctgattaaaaattgaatctgaatccaagttaaaacagtatgtaatccaaaaactgaaatccattatattaaaaccggttctcaactggtctctttgtatctcattatctaaaaagctttataaaacaataagattttggcacagcctaatcgctttctcagggcacagagccactcatattattaccctatctactaggttcctgctttcgtatacttctcaaaatgctctctttgttcccctgcaatctgaaattcaatcattgacatcataagaaaatgttgtaacagaagtgataagatcattgagttgttacatacatgttggattcttacgtcttgccatttctgattgtggtttttatggaacaacttcatcagagataacagccttgcccagataaacctgttgcatctcctctttccagatctgcatcaacttcatatttttaatttgttttcctacaaagagaaattaacttgtgtgaagaataaatatatttcattccataccgtgtcacggaactccacccttatgtgtggcacgtttgttttgtgaatgtcgtttccatcaggtcctcttttgtagtaatcttttccaatccagtgcgactggaacatctcaacaagttagtattattagtagatcggaacagagacatcttgttcattcatactatgggccatgttgatataacaagtaccttcagggcgtgtgagaaacctgactggtacactgagttacgagctatctcgcacaggtcacacgcactcagcttccaaacctgaaaaatccagttatcatcttcagttaatacataaatataactaaaacctagaagaaaaggatgtatagagagaaatttcattgttcttcgtgtttgcaattgcagaagatcagtataaatcatttaaaggtaataactaataagacttttaaaaatataatcaacttttcaaggcctatgatgtgtggcaagactgcataatggaaagattatgacttactgatgcagctatgctatactcttccacgagaggttctttagttaagtgaatctgaagggggtcatcagtagacagagaaacattgagacctcttaagaaaaacacaggaaacgggttccggtggtaatctagaaacaaagagttgttgctcagtggtgacatggccagaccaatctgtcaaaagaaatgtcttcttagaacagaaacaataatacatatgtaatacatgcaggcagtctccacaaacctgggcgaggtagtacagatactgaagcacaggagactttcgcagattgattccatgtgcgatgctatggcatgttagaaacgtagcagccaagtggtcaatgtcaccagcctgaaatttgtagacatgttaaaattccactgaactgtaactgaaaactgtttatctagcacaaaggaagaaataacacacctctccagaatgtggtcgtagcgtgatagtagtcatgccctttgactctcgaagctgaagaaaaatagttactccatattacacagttttgagaacaccaagttagttacagaagcgactaagaggaatggtaccttatttaacacatagaggttagcataacaatagtagacataatacgaaaatgcaggattgaatgcgttagtccattgagctggagtgggcatgtgttttgtgggacgtctttcaggtttgctttcatcatcaaccaaatcaaatccaacaacctgaaatagcaaacaagagacagcaaccagtcaaaccaactctttattgtgtaaagacatgcggattagaggttatttgaagatatgaatgctaacctgcttcaaaaaaacatggagctgaggatgggaatcaggatctaccgtggcttcaaacagaggaatgaatatattgtccaggatattctggaacgatgtcacaatacccatgtccttgtaaatgttgtacaagcgtgggagctagtgagcagacaaacagaaaacaaggaaaatatagctcagttagcagtcatgttacaaacacacggagacaaaaaaaacacatacactcatggaaggacatggagcacacaagtatcaaagagatggctaacctgaattaaccagacaacattctcactgtatagatcattgttcacaatccaactagcgagttggtcccactcgctcatttttctgccatatatagatattctgtattcagccatctgcagtgttcaacgtagacatcaggaaaaacaaaacagagcaattatggatctgctttggcaagaagatttcttgacacagaatttgagcaatgccatgatgttttttggaactcaagtcaatgcgcatatgtgagggagtgtgagtttgatatggttactgagactaaaatccaaggattttactactatatcttttcctaatataacaaatgagttaaagtttaatgcagctataaagcatatgcaacaagaaatagcaagctttgcatttgtaagggggaataggaggagatccattaccaaatcctaagtctctatgtattcccagtaaatcattatatcaaaagcttagttagaatggatttgattctaacagtgttcctctcttataatgttcgttctaaatgcataagaccactgcagttgatcaagaataaaaataacaaagatgcatgtggcgtttacctgatatttactagcttcaaggtcagagaagacttgctttgttatctcaccaagaaatcgaccttaaaccaaacgaaaataaatgtcaggcaactgagagtgcataactgatgcatcaaatgaactaaaaacggtaataagagtgactggagtattcaattaccttggatgagattatcctgtttaaggaaaatctccctaagcctactttgaccacaagggttatactttaggttgaacttatcaaaacgatgaaaggtacttttgtctgcatgaacatccaaaaggtcgacgttcaggtcatatctgtgcaatgttcaaacaaagggaaaaaggttaatttcttcggtgtcatggtaaaaatggtaaaaaatgcaatacaggcaatctgcggtgcgcaacaactaggaggctcctaagagggtaatctaatagtcttgcagccatcagattcagatagagttaagttgggaattctaagaagttggaaatgtaattacccagtcagatccaggctctcaaaaacttctctcaaggtcaaatatgttccatctcggaatattacaacctgtataaaggagcaagaaattatcatatctgcatatcagcaaattgtatactatcctaaaacatatagtttgccattgttacctcatcgggttctttccggagctttgacttaataaaccttaaaaggtgtttctggttcatgcaagctgaatgatgcacatgagtgtcgactttcctaacgttataaaaatcacgatgtggtgcacttttttgagcaagaaattctttatccgcattaagcatcaaatggagattaaatttctgaaacaaaaaatagacatactgttaacaagacgaaacttgcttattgacattcattcttctctaaataaaactcttgcctgttctaggagcactagtcgacggtggcacaaagtccggatgtttcctgcagctatgactttgagtacgtgatgcaagtcagtgaaaaacgctgtggcatcagctaccgggaagagatcttcttttgctgggaattatgaaacagaagaagggtcagttattcgaaaagcaaaagaatgcaaccaaatcaactattatgagtaaaggaaaaagaagcattagaattttaatactaggactcttaccatctttatttgcaaacacgtggacaaccccatcttgcatctcaaaacaatgctgtaaaaacaaagattgggaagtttaattcatcaatgcatggtgtttgatgacatatataaggagtatagactcacatcagattttccctgaggatagtgtgcaaatggctctgtattaggctttggagtactaggatcagatatgacttctttttcccatggtgcaactgtttcttggaagacatacctcttccgcagttcaagacattcttgcagacatttataggcttcaacttcatcggacgttggcacctctaaacagatcatgagtaaaatatgaataagatatgtgttgacgtcttaaccgtttcaagctataattcttaaactataatctaagaatttcaatggctcagctcccacactgagtaaagccttaactgacccttgcttctcttactcaagactacttatttaattgtccgtaactccacttaattacttgccactagcaaaaaacttttcaagtagtgggacttataaaacaaacatgtcatgatttgtaacaataggaaaagagtactaagcatacaggaaccagaagtaaggcaagatgacagaacgaaacaaaaagtgaccattcttaccaagaggaacattaagacggacaaaggtctcttgctctggctccttacgaagaatgtcagcagcaataggatcaggctgaactccatgtaagtcaccagacacactatgggatcgaatcatacttgaagcagccatagatatttgttcttcattagcatctgcaggctgcaaaaaacatcttacttgtaaacccacctattcaatcacagaacagggattgaaaaagtaatgataaataaagaaactcaccatctcattgtcaccattagcttgcaagtaggaagcatctaaaccctcactattagtcaaattatcatcatcatctgattcttccacactctcaaaagcactagcactagcaacaggggatttcggagatattggtctaacaaagcttccagttttcctgatactactagctccatgtacagaagctctccctgaaaaaaagcaatcacaaactatctatcagcatcatcaaaggattaaaggatcaatttttataatccacaatctaatctgatcaattcaggtttggttctcataccttcagatggcgtatgaagcctagggagaccaggaggaatttcatcgacataaacgtgaccgttgctccgtcctgtatcaccgccgccgccgccgccaccatcggtaaaaggagtggcatctggaagagaagcaggactgcgaccatattggtcattaaccttccttctaacttggctccgccgcctcaccaaggtcggattttgaggctcgtctccatcagggttctctttacgctccttaccacgctcaaggactagattcagtgccttgaaatgcatgaaaaacccagaaacagcaacgaaggaagctccgaatagagccgcgagggcaagttggtaaatattgggttccatgagtgacacaatcaaaatctctgtgtgtgtgctcaggtcagaactcagaagagagagtaagaccacgatttcgttttagtggcgatggtgggaggtcgaggttgagttgttatttataggcccaacgagtgaaaccacgccacttgcaaaaaggctgggtctttgataaaagttgaaacctttatggctaaaaactaaaagtgctgataattataggggcagagttttatagacaaataatttcttcattagtgttcaattatttcagacaccaatttttgtttttatctgtccaatttttttattttattttatgtttgcttttatacgtgaaagtgaaaactcttcatattttttagtttgttcaaataaaaaatcattttcataaatattgtacaaaatataaaacggaagaaagttcttcattaaacattaacacatcaaaatccctaagaaataagggaattaaggttaacactatcattttaagaaaactaggtgttgggcctttggcactaaatatcaagagaactatgggtctaatgttagctcgagtccagattacatggtctcagtctcatgcttttcttttttatttgtggcccaaggaaaaagtgattaaggaaattacttattagccaaatgacttgaggaaattactttaactgaatttaaaatggttacaaggtacatttgttcacgaactctatgttttcatttcaacaaaatcacaaatggttgttaactccaaatacacaccaaaaaatatgaaaagtgaagttttaccacctatacagaacacaaataactcattcacatctctaatgtcataaggaaatcaatacacaaaaaataaataagaaaaagaagaagaaaaatcatagaacaatggtgacacctctagcaccatgaacataagaaggatgagcagcttcttgatctctctcaaactgttgcacatgccttgtagcatcaaacttctctccatctccccaaagagcataagcttcttccccatgtgctgcgtcgtctccaatcccgagctcttcctcagccattctcaatggtatgaacaccctaatagcgagtagaatgatagtagtcgacaccacattccagacggcaatgaaggcagctccagccaactgtttcaaaagctgtttgccgccattgccaccgtagaaagctcctctggtcgctgggagaggaagtaccaaaacgcagagatcagggtgtgcaaacaaccctgtcattattccaccaagtaaaccagccacggcgtgtgtgtaaaacaccgctaatgtatcatccacctgtttatttcaacccaatcaaaatattacagttcaaatcattcgtttgttattactaataccttaattctacaattgaaacattttcgtttttctaataaggtaaaacattttttttttttttttgttggttatgaaattaaaatgggatttatgatctaaattaccttttgaaggagagcggatttcttgtgaatgatcatcatagaggcccatggagctgttcctgagactactccaattattatagctgcccatgtttggatcaaacctgcaatagatatcttatttgtcagtataataaattaacaatgcaatattaataagtttccacataattcaaccttaatcataaataaacttagagacttagagtaaacaaaaaacttgaaaagaagatgactgaaacctgctccgggagtgacgccggctaagccagtaaccatgccttgaattgctccgatgacagaaggtttgccaaagaagatgacatcaagtgtagtccatacaaggaggcttgtggcggccgagaggttggtgtttaacacggcgatagaggaggttaagttggccgcgtaaggagcaccaccgttaaaaccggaccatcccatccataaaagtccagctccagcaagcattagaagaacattgttcggtgggaatctctctctgtcagccttaggccttggtcctacctataataacatcatgtcagaaaatcgtatttctcaactagctagtgtttgctttttaactaaccatttaatttcattttcttttgcatgattttatatatttactatgtggaatattatgtcgtcgtcagtggaattgacttgacttttaccattttgcttatgtgcgacaaaatgcagaatacaagaaaaacaaattaattagtgtatacatatctataagatataaaatgcaaaaatggaatcaacctcaattattttgtgaatttactattaggcaaaaatagatatttcagttgagtgtgatcaatattggagcgttactttattcgattactctcctctaactaaattatctaatttgctaatacaatatagatcaagatcgtgttgtcaaatccaaaattgatttgatttaattaatcttagtacttggaaattagtaaccttttgttagtggaccaaacaatcatagaacttactacttatctataaactatggaccttaaatacgtaatcataccgaaagagaaagcaaaacaaaacttggcaattaaagaccagtctacatcgaattatttcttaagaattttttttgagactatgtcatctaccgactaccgtacattaattaattccaatattttcaacaaacaaacatcttcttcaatctttcattatatttctagtaataatacccaaatatcaaacaatagcctgagaatttaatagtttccctaactaaataaactaacctctaacaaactaaagaaactctgaacttgaatattttatgtaataaacgtacccagtaagcagcgacgaaaccggcaacaccggaggagagatgaataacataaccgccggaataatcaataactccccactgatacagaaacccacctccccatatactataagctccaactgtgtagctaaagatcaaccacaatggcacaaaagccatccatgctttaatattcatcctccccaacacagatcccgccacaagtatcgtcgttatcgccgcgaatgtgaactgaaaatacaccaacgtcgccatcggaaaatacggcgccgccacattactatttgggatctgtaagaaaaaaatatcaaatcaaattctcattcaggcattttatcgaacactttgtgtgcataaccaaattcaagacctttgcttgtcccttaaggtatccttggtcgaaagctggaccacctttgccccaaaacggcaaaagctcttctccaaaagccattttgtaacagaggagaacccaacagagaagaacggcggcgaaagcgtaaagagccataaaagctgaattcacagcccatttcttcttgacgatggaggcatagaggataacaagacctggcatactctgtagaccaaccagagtcgctgccgtgagctgccacgcgttgtctcctttgttgagccattcaggaacctccggcaagcttggatcgtaagctccggccattttgttattctatctttcccggagttgatgaaatttttgttgggtttgtgatgtttatagtcaatggtacgaattttttttgtgtaggtgtgaaagcctttaattataataatgtgtgtagaatagacaagacacaagttgggtttggtgttttgtttgcacattttgatggagaaaagtcttcgaggtttgatagatatgtttctcattcttcaattctagtcttgatatttcaatgaagcttcttaaattctttgtgtaaattactaggagaaagaatataaacatataaaaacaatataggagacaaatttggtatacaaaaaaaaaaaacaaattgggataagatatggaccttggtttttatttatcttataagtcattgcaaatttaatattttttgaatgagttaaatttaatatcttataaggaaatcgatccgtgtattgcgaagactaatttggcaaaaagattacctacttcaactgaagatatttagtcttaaaaatcattaaaagtaaataaagagggacattagaggtacatataaagggatacaacattaaacgttatgtttacacccctttttaaccactaggatactttcacttcatgcatcttatttttagccccaaaaaacacttatatagtttcagaaattagtttagattctgaggtggataagttaattctccagtagcaaaataaaactgatcgtgcggccatgtttgataatgaagtctgaagaagttgaccaggtacacacacgcatcgaatgtttaagaagcaaagattccatttgtttgtctaaatatcgaaacagtatcagtgtatccaatcaaactaacggagatcctaagtttcttgttttttctttttggaaaatcaaaattgatacttggtcgaacgtagtatttggcacgtcgaatcaaaattatacaacagtctcaactctcaacgttactattaacgacgtcattatcgtattgacgtataggtgccaccatattatacaataaattattagagattcaataagattcatgttcttagaatcgactgattgaacgaaaattttaccgggaaaattttacacagttgaaataagttccctatcaaatactattaaacattaatttttggtttgcaactaatcacatccttatacaataaacatttcacgagataaaattttatatagaataatgaactcaaaagatttgatgatttgtgaactttttctatgtttttttttgtattatgatctttaacctctttaatatttacaaagaacgaggtgtgtcttgttgtttaagtattaatcttgttcacatatagtaaaaacctcaaaaataattggcttcggatttgcatagtgtaaaattgtttcactatgtctctgaaaagggaaaaatgagtgaagatggattttggaaattattgaaaacactactattaactataacatgttttggaactacaaaattgtccatgtactgttcggataaatacgaaaccaaaatttttgtactatttacgtaaaagtctcatctacaaatgaatgaagctcaccagcagagatactctaatcgatgtaaatttgttgttatatgtatatgtaattttcatatagtatattgctatgagaagacaaaagatcgaatcattatgatgtggctagtaatatttgtttatatatgtgatgatacaaattggcggtatcaaacaaactcaagaccgttaatataatcaaacatttttgtttcctttctaataataaagaaaatacatgattaatgataaacaacaacgacactgaatattaagatatcggtaagtacctcaagatctcacttagaatttgtctcattcttaaatataattcatagagtcagatccagagtactctcctgaccaatcttaaccgtccgatcctcttcatctttcatcagtcggctctttttccacgaagacgaccctggacatagcgacaaggacaacgtttgatccgttgttgttgctgctgtttctgtctcttccaaaattgtcttctccggttgtcttagcttaagagatagatcaagatcaatgctcctacttgcgtctcttttgccatttgtcttgctacaataagaatgattagtgttctcctcaacaccgttatggaacttttgaaaagttcttgagtgtccttgaatgctgttgaatgtgactgaattggtccgttcgtgatgatcgtgtcgtagtttcggaaagtgattagaaattgaagaagagtagatgttttggaaagacttgttgttagtccaataatcactaccacggatgttattgctaaccgacgcgttgcggattaaaccgggcctaatttggtctatcaaactcctttctgttccttgagagctagagttccacaaagaagcatttgaaattttacttccatatctaccaaaaacaaaagaagacaattaatttagtttccgaataaatataattaaaacggaatatcattcaaattaaggaacacataaaatctaaaattttcaaaaaaaaaagttatatcaacctgaatggagaatcatggttatgattatagcctcggaacatcggtagctgacttagtttataaatatttcgatctgtggaagtctcgaagagatgtttgtgaccagctatagctgccaacaattcaaaccccactttattggcctatacatgtataacttgataactaactaatgaacacaaatagaaagaatcaataccttgaccttgatcatctatcttcttgcttctgtacatctaaaattttccaatacacaatttagtgatttctttttttttctaatttcagagattatttgaaacgaaatcgaaaatacaacacatatataggtacgttttagatgtatgtagatcaaatacctgtagatggctcttgacatgagcaatactaagccctttgatgttcatcatctgacgaaccaactttggagttgctcctatacataaccaaacatacacattaaaaaaaagaaaatcacatgaggttttgaccaaatagttaacctaagaataactaagaaattgcttatgcttttatatatatgtggaggaggtgatgaaagatgaagttagtagctatggacgtactttcttgacctccaagcctctcaacggcgcggacaaagcgaagatgaagatcaggagtccaccggagtcgagggactttagatctcacataaggcctaaccttagtcttcttgtcgctctcttccactgtactattgcttgaaaccttactctcttcaccttcttcttcttcttcctcttcctcctcctcttcttctctgttagtcttcccgcctccctccatacttggaatcattattacttctgatgttacaaattcagaagaaatatagaaagaaagtggtaaacgatagagaagttctaggcttagctagatataggttttggacgatatggatagatcaatcctttggtttgatatgaaagagataaaagaccagatgaattctgcttagttcaaagcatggagattttgtctgtgaaccctagatcaagatacacttctgattctctctctctctcttcccggaacatgtagacaaaccctcacctaaatcttgttgcatatgttaaaaagttttcttttctgttcacagctaattgatttcggcccttttctactatagacagctctatatataaatagttgtatattttaatatgtggatgcatattaatatcaaccatggagggagaaaactattactcctataaatgagataaattgttgtttatacccttaacatgccaacaaattacaagtaacacttattctatattattgttcaccaaaggctaagatgagtgtgatagaaattaggctctatatatagcatattcttagtagtcttagattgccttagttcgtcaaacaaacatttcgattacaaagatcgatatagataaaattcatgtatcgggactaacagtctatgaatgaattagttagtataagtaagactatttacaacaacaacaaaaaaaaaaaaaaaaaaaaaattaataattataagaaaataagaaagatattagtatagttgagacgttatttgagtttagaagaaaacaaaaaaatgaagaattttaaattttttgataccgtgatgcagtttccaggaaaaataattaaatacaaaatcgaattcacaaaattataatatacctcagagtagttttgtcggaattaggatcattgatgatcgagatcattgtctttttcttaagacatttggtttaaaattaatgttaactaaactttcttttccttctgtttttctttttgttgcaaaataatttttgatcctcaacgatttaaaagatccagtacgtgacatgaatcaatttatacaaaatattaatttatcgaagtgaactatacttgatggattttaaatcctctcatttctattgatatagcgatcaaattagttagaaaatttatttttaaaatcaaccttctaatcttctgagtactttttagtatttagaaagtgataaatcacaatactaactaatatattgattaatgggtagattcatatatatttatctttaaaactttttgatgagattatgaggtttagggttttgcgtggaattgaatgctaaaggcaaaaaatggaagagcgagagtggtagatagacgaataaattacgattacaaggcgtgtgactgctcagctgtctttgatgtagaccacatcatcacacatacctctttctttctttctttttctgttttttgttcgacgagaatcacgggacaatgctcctctcttaccccaaaattatatattatctttatatgtatttttgtagattcgtatgagagaattagtttatgtgtaaagtggtccttgcttggtttacgttacacatccgaccccgtgaagcgatgaatagcgttgttagttgagccgtttttttacatcgttcgttccaaaaatatgtaatattaacatacatagttataaaatttgacaccgtataaatcgaagtcctatatggtttaattttaattgcaaagaaagtctttttagacgagtttatggtgatttttgtaattacgattttagtcatcgtaagccattgaatactacctcttccgcatatttcgacaattagtttgaatatttacctttaccacttctattatgaaaacaataagataaatacattctcacgtatatatgcttatgatataatatattttagatccaattatgctttcgaagtcctcttggaattc

SEQ ID NO: 345 - DNA, 81467 bp, Arabidopsis thaliana
aagcttgtataattaagaatggatgaacattcccatcgataactaggtacacaaaagatataattctaattaagtgaactgatacacatgtttgaagttatattgcttaatttttttcctaaaatataatggagacgatttgtcctggttcagtgcatataaaaatgagaagacgatgtggaatacatcgtaaatctcatgatggtcgcactataatttttgttgcagctgatgtacttgaagactcaaaacggtaatggatcaagataatgtccttcatgaatgtagcaatgagatgttatatgggggctctctacattaatgtgtgttattctgttatatatttagatacaatttttcaggcccttttctttaaaaaaactcaaaccatatacatccaatttttttaagatgttgccagaaagttgattaaactgtccactgaaatgacataaaattacatcagtaaaacgatttgtactaatgttgatgtaatgttttttaaaaattacgttatgaaatgagtttttatattctttgttacatttatgattccttctcccaatattttttatatattccgaatcattttggttaacataagaataaacatcatgattatcatacattgttgaaaggaaaaaaccataaaataaataatggtgattaagagcttctagttgcatgcaatacacaagttaactataaatttattggataatgtagaaattgtgtaaaaaacaaaaccaatgatggtgtcatcttaaaggcaatttagttgcaattctcttaagataagtaaatttcttcgataaagtgaacattttcgaaatacaaaatcattaggggagatgcggattgtcttcccagaagcatgcacaagatttcataagctatttgatacattcattacatattctttgatagcgacagctttgggtgtccccaaaacttgttccatgtctccctacattcattacctacataattttaatatcgtttgttagacaacaaacaacttccttttatatgtatttagatttaaatattattctataaatagttcttggcttcgtcttattcgttttgatagttaaaaatttgtcatttgtatatattgcccgaaaaaaccgatggagtaaaattttaattagtaatctaaaggggaccattgtcgaagcttactaacgtacggaagatgctatgactaaccaattagtgtataatcacatgcccttcaaacctcaattatatatgcacactcacaagtcacaaacctcacttatctttgcttttttttgtatcttaaaatgtagattacacacttgttaacttagttggtccacttatctaaatttttaaaaacaagtataaacgagacttggttggtacagattattactttttaattactccacagcaaaaattggaactcggagacagccaatagctattatgatatacacttgtaatacatacactaataacgacccttcaacaatcttggggtttttattaacctactttatacagtttgtttctgttagatttgatcattcatgtcaacttcgggctatttagtattctttttatatacatttcttggttagaagtagtttatggggtttaattatctttagtatcactaaaagggcagccataaaagtaagtattaaaatatttgatccaatcacatgtttccacttcgtttttgtctgttacctattttcctaatatatattctataccataaactcaataacctaaatataactaacaaacaaagacatttataaactaaatgtttactcaataatattcaaaagctatatttgtccttgagattaattgcatttaaaaagattacacatctggaccagttcaaacattaaattgtggcccacataatggcccagcccaaagtggcaatatcatttctctctaagcgcgttttccatctgacataaatcatattcaaatcttccacagcggaaatgaagttagagaaccatatgatcatcatcataaattcatcattaattatatacattcaaaatcagtaatggaccctcactttctctaaccaaagaattaaataaataaaacaacaacgaaatgtgcttcttctaataatcgaacaagtcttgttgatttttctttcttcttggggcggatcataatttagaaccgcccgaaaccttcggatcctttcgctctctccaatggctctgatgcgaaccaggagccagttgaacgtatcttcattgactccaccacctcctcctccgtctccgatccctagagccagaggctctcgttgcgctgccagcgagattctcaccgagatcattgagcgatcgattcaggttcctgagctcacgcttccggaatctcattctggaggtgaatcttgcggctcacgtcatctgatcccggcggagattgattttaggttattggcgtcgaggagagaaggttcggtggatcggttggtgcgatcggcgagagagtttggggcgtttcgtgtgagttatcatgggatatctggggaggagctgaggtctcttgtgagggaatcgggtcgggttttcggagttttggagggaagagacaccgggtttcaccggagtgttgtcggaaacagagacgagatcgtgtgggtacggtcgtggaaggagaggatggaatgggcgcgcgagtatatcggaccggaaagataccgctgcttcaggtattgggcccttaatgggcctttctgtcactctctgtttgattgtgttatggagagatctttggtagatgaagtactaactagagctaaataacaatttgtgaagaatcaatacaaaaaggctataacattcgttttggttatacaagtttcgtttgaactagtgattacattttagaaatttttgatgaacattgcatttgcaaaaaaataattagtgattgagaatttggttccaatttcttgaatctttaatttggttgcagccaagaaatggagaatgtagctgataaacttgaagatatagcgaggaaactagggcaaataatggtagagaactcaagaagaccaaatgataagaagatacaaagaggagaatctgtgcttagcgtttacaggtacaatcatgaaaatgtaactgagcaaagccctcctttgcccaaagagaggaccgaagaaatgcttcattatacactcagccttcaccttccggctaagaactgcgagttccgcgtcaactcagggaaaggtccactttctttccatgctgatcccgacactatccttgtcacttttggtcgtcagcttgaggtatgaacgaacacttaaattaatactatatatttgttatatgatgtgatcaatcaattgtatagtaattttgtaataaatctatggaactataggaatggagtttaggagaattcaaatgtcgtcaaggagaaatcatctatcatcctgatgcatatggctcgcccacttccttctccgtagagctcaagtgcatgtctcttttcttatcacacacttctatcgcaacaacctccaaaacattctctttaacccatcagattttcactgctttcctcctactttttttcttccaatgtttttggatttatggatcacgaatggccgcttagaatactcatatatgtatattttctttttgtgggagggatgcgttcatttgaatcgtggatgatcaacgggtaaaatgtgtttatctactaggtgtaagcttcggttgtatatgtaaacccaacacataaaaatttgttgctcctaaaaaaagaatgccaatatagaactgattgagtttttcctttgtttggactcatatcgactttggatattaacgcaaattttcattgtaagcaattcgtgtgttcttgaatacgttcttcctctcttctgatggggttgtgaattgagataaaataatttgtcataaaaaaaaaagatgtaatgtaatgtcctaattaaaactttgagaaaatagcaaaagcaatgcctcaatatgtgactttttttttttttttgagttagatcaaaaaatttgtctaatcataaaaccatcaatttttttttttatgcttttgttaaattcttttcgtaaacaaagacaaaatgtcgtagaaatcttctgacggttggttttacaaactttgcttcgtagagtttttttaataacatttttaaagaaatcacacaatatatgacgatgcgtgagaaagaagaaacgtcttaaattaagagtgagggtgggtgtacggacgatgtcgatggctgacgtacaccatcacggtggtaaagacggtgtctctttgaagtagatgtctttattcttgatgacgataacaatgagaagatcaatattcaataataaagcaatggtgatgtatttgtttttcaaaagaattgatgtttttaaatggatcgatatagcacataaataagttgacttggcggttgggcattatattcgatgtgatgattcgatggttggtttttccggttgggtatgactccacaatgacgcccggatgtcatagtctaaatgactgtgtgaccgtacgataaaatcgagataacttttgaagtttggttgggtattactgccgactgttaggtgttaattttcattcagataaagtcaataaactaaaaggcaaatagatagtaaataccgttacgaaagctaacacctacatattggaacacatgaatgaatgagcaagagttgttttctttattcgttttactttgtcgagtttttgcttttgcatatttcctaattctttttttagaggtttcttgtttttggtcaaaaatttacaggtttatgataatgttttgaacaagttcacgtgtaaggattaattttttggctttttcaacaacaaaaggggtactagtatgattttaatccacacacgaatgacttggatccacgaatccaacttcaaattaattataagaaaaacttaatttgcccatcattaatccttagataacaaaatttccagctattaaaaagtaattattatatgtggcattgaatttcaaacaacattcaaatttaaatgttattattttgtcactcaaatttaaaggttatttattgactggataatgttcttggtttgattgggttgctacggttggatgcggttaaagaccaacaatttcatcagaattaaggatggttgatttgtacccacgatataacattcgtgtctaaacatctttacatgcacatgcaatgttgcgagatatagttcacataaaatttggtccggttcacttgtcttgatttggttgtacacttctacctgatgaatatatattcttatgttttaagaaccaaatcatatcctcagaactaaagtaccatcttaaccggtaaagaagcttaaaacatcgtcatgtatactgcttagcattctatacaaagtaacgtcaatccacgttgtttttttctttcacattattcaaatatttttatatagacgttctttttatttttgataaagtttttatttttgtcaacgatgaacgtttaaaaaaaaaaaatatgtcgagttttcccagctcctacaaaaacaaataaattaagactttaaatcccacctggaattagaaggttttggttgacctgacaaggcagatgtttggtaacaacaacatgaaccacacattggggaaagaatcatgaaaattccttgaatcgtaaattatttcaggagaaaatgactctatctctaacctggttgatatatcgcaactaattcaaattagtaaaaatcgaaaatgttatcgcattttgaaattgtcttttgtgaagattgtttctttcatttatttgtttaatgcattttataataaagtcaaactattttaaaatctttgtttaaaataatagcttacttacgtggcaagttgaggaatttcaataagaagaggcaccgcgcgcatgtcttttacaattcctagactgtttctctttactctgtttttttgctctgttttttttgtttgtttgttaatggccgaagactctaattcttccgaatcaatcattgttaacgtcaccggagatgataataagtcggctttgttcggtaagtacgatctcggtaagctcctcggtagcggcgcgtttgccaaagtctaccaagcggaggatcttcaaaacggcggcgaaagcgttgcgatcaaagtcgtacaaaaaaaacgtttgaaagacggtttaacggcgcacgttaagagagaaatatctgtcatgcgccgcctccgtcatcctcatatcgtgctcctctccgaagtcctcgccacaaagacgaagatctacttcgtcatggagctagccaaaggtggtgagctcttctcaagagtcaccagcaaccgtttcacagagagtcttagccggaaatatttccggcaattgatctccgccgtgagatactgccacgcaagaggagttttccaccgtgatttgaagccggagaatctcctcctcgacgagaatcgagatctgaaggtttcagacttcggtctcagtgcgatgaaggagcagatccaccccgacggaatgctacatacgctctgtggaactccggcttacgtagcaccggagcttcttttgaagaaaggctacgacggttctaaagctgatatttggtcatgcggcgtcgttttgtttcttctcaacgcaggctacttgccgtttcgtgatccaaacatcatgggactctaccggaaaatccacaaggctcaatacaagttaccggattggacatcttcagatctgcggaaactcctccgccgtctcttggagccaaatccggaactgcgaatcaccgtggaggagattctaaaggatccgtggttcaatcatggagtagatccaagcgaaatcatcggaatccaagccgatgattacgatctggaagaaaacggtaaaattctaaacgcgttcgatttgatttcttcggcgtcgagctcgaatctctccggtttgtttggaaatttcgtgacgccggatcattgcgaccagtttgtatccgatgagagtacggccgttattatgaggaaggtcgaggaagttgcgaagcagttaaatttgagaatcgcgaagaagaaggagagagcgataaagcttgaaggtccacatggagtagctaatgtcgtcgttaaagttcgccggctaacaaatgaactagtgatggtggagatgaagaacaagcaaagagacgtgggcttggtttgggccgatgctcttagacaaaagttacgtcgtttgattaaccaaccggtttataaagttcctgacaaaccgtaaaacggtttcaacactaaaccaacaatccgtgcgttttacttttagaattttcaacgtactacactcgggatcgagacgcattgtggttaaccggttcggtttacattggagcagggagagtaatgggacgatccgcctctttgtatataaaaatgacaagaagaaagaaaaaaacaaaccgggattcaattatttttgtttatttattttcggagtataatttaaacacaaaaattatttgctttattcatcggagagaatttgaataaaactctgatttgaactttgtagccttttatgtgtgaccgtgtgtgtttgcaaacttgggccttattttgcgctaagggacatgctacaccgtttgtaatatttatcgttgttgattttgtttggcaatcgtacgaagtatttcaggatcttttatgtatgaatgtttatttgagtttgtattaaaaacatatatatgaatgttacagattaacgaatagttgtcactgctgattaccacttggcaattccgttaaaacatgattggtatatataaccgtacaagtctataagatagatcacaaaattctagccaaagcatcaatgttttatttgttttggggagtttgtggtccaatgctaattttagaaatacaaaaactatagcttccaacgcatacatttgatttgacatagatatattcagtaactttctataacagaactagataacctatgttatttggatagtggtgtgatcccattaaaaaacttactatgcaaattaaattagtcgacgtcatagaaaaagagagagaggattgttataaagcaatatcagctgtcggtaattacgtgttaagtgtatggtaagtctatcgaagctatcagagataagaaataagtatactcttatgaaattagcaaagttaaattgtgtgttttgaaaaacaaatgacattaaaataaacaaaaaataaatctcaaactcacgtcaaacacacgaccctaccgtaactcgacgtgacgctaacgccaagctcagaagatttagtgtggtggtggtcaatgcaaatgttgataattgtatcatcacgttgaactctataaagttttatttatttatttttcttttcgataaaaaaaaaggttgtgaaatgtgaactctaataagttcccaaagccattacaagtctctcacattaaaaccttcttcctccattaagatcaaaattgttgttatatttgttgagctaagaacaaaacagaaataactgtttttacagttattggtcggacaatagactcaaaatggattggatttgaactccgtaggtaacttctctagtggactcaacaagtcttgaatcatccccttatcattgaaagcatctttaagattttctttgccttggtcttcgtcattggtccaattagaatgggaacttaaactgcctcgaatgatttggtacttctaatgcacacatcattgatctagacttatggaagttcttacttatgctcttcatattgacaaatgacaacaatctatttccaagtaatttccaatgaacttgtttttttttgttttttttttgctaaaaagaaataacaaatttcagtttttataatgtttgtttccaactcttgttatgtaataaagttaattaacattcctttatacagaaaacacaatcttccaatgagaaaaaaaaaacaaatcaactgtccataaattctccaatcagactttgatataaagctttccataaaaagattgtgaagaacaattccattcttagcacaaaagttatggaattgattaaacatcccaaatcctaaaaccatatattaccatatagattagaaaacattatcaccatagaatagataaatagatatagaaaaatctcttaaaaataataccaatgaaacacaatgatcctgaccaatgagcatgcttcgctgtctaaatgcaagccacgattaactaacacacatgacacagaactgttagtcttaatcacattgcttaatgcttaccaattaccataaatcactcccgccaccacgcgttttcttcaatttaacatataaaactcgaaaccttaattacgttttccaaaactaatcagtttttcttttcttccaagtttgttattcctcgtcccgaatcttcgcattaaaaacagaaccaattccgaccaaagttttgagatctgtaatatgacgaatcccgataacatgaaaccggttgaagctactgacgtggaatctgcggcggagaagacgtcggagccgacgccggcatctggaacgtcgacgattactcagagatggaaaagagaggatttgataaagaaagcatctccgattacgagaggaatctgtcttttgttctctcttattgctttcttaattatggtctctaataaacatggttacggtagaaacttcaatgactacgaagagtacaggttcgatttccgttttttgatactggaatttgaaattgggtttgcgtaatatcgatcaaagttttgaaatttcttatattgcttcagatatgtattggcgatttcgattatttcaacattatacactgcgtggcaaacatttgcacatttctcaaaaagggaaattttcgatcgccggacttctattttggtcgatttctccggcgaccaggtaatgccacaaactgattatcaattctcagatttatatatgtaaagttatgatttttatgcaaaaaagtgaaatttgcagattgtggcgtatttgcttatatcagctgcatcatctgcaattccattgacaaacatattcagagaaggtcaagataacattttcactgattctgctgcttctgctataagtatggctatcttcgcattcattgctttagctctctctgctctcttctccggttacaaactctccactcattcttttatctgaagatctctttgcaataatgtgcttcagtagttatataccattgtgatctttgttatacatgtaaatgtcaattcttttatgtgttcttatagctgatatcaacttctgttatttgggtctgtcagactgtcactgtgtctccctgtgtcactgtgtgtgtgtgtgtgtgcttctttgattcattattcaaagtgaagaaactgaaaattgattggttttattccgtgttctagttctatggtacaaagtacaaacattaaacatattacaggcgtgtgaaaaaacaaatgaaaaaatttctctatggactatagaagtctgacttactatcctgcaggataactagtaagtagtaaaatcctttggtggcagaaatgtacaaaaggaacataaaaaaggaacaactggttccttttttcttcagggcataaacgaatcgaaaaatgaggtctcctcgtttggttcttcctttgctctagagaatccaccaccaacaaagttttgttgcgtttgaaggttgctgttgttgttattgttgttcatggcgtaaccaaaaggcccggtattagtgttgttgttgtgcagcatctgaagtgtatatggtgcttgagaagaagtagtgtagttggagtgaccagcaatagcagctggtctaatcgggactgaagacgaatcctgtggtgctctgtttgtggcgtaaccgctaccacgagctgcaggaacatcgtggttgtgtttcccttcgtaggttgtgattactgctctcatgtcgtgtgatgctctctccacatgtttcctcactggacaaccgatggttgtgcacttgtagtagcttctgttaagattcagcaaatgaaaagaaaacaaaaggtcagattctcaagaaccttaattctgagttattgagatgcacaattgtttatgttattaccttggatttgggtttcccttaacgactttctggccgtattttctccatctgtaaccgtcgtcaagaatgtcaatatcactcgttgtctgcactacgattctcggctctctcactgtcttgcttccaccaccattcccaccatttgtttcattgtcccctttcctgaaaacacaaaaaaacatacattttagaactttcatattcaagattgttcaaagagtagcaaatttggagggtgatgatgatctgtaccatctctttgcttcaggttcactcccacaatcttcttcgtctctgctgacaatcgatgagccttgttcgaactcatcgtcaccaacagaatcagaagtagtattatcctcttgttgcatcccaaaggaatcagactgatgaaagctattattggaattaggctgatcagaagaagcttgacgattatgatccaaactggcattgtacacagctgaatgaaaagtcgaagaagacgaagaagatcttctagtagactgaggtttaggatggttgtggcttcctttatacacaatctctgtgatctgaccttccaaagatctctccactttcttcttcgttggacaattagggaaagtacacttatagtaactccgaggattctcacttcctttcacctgtttttgtccgtactttctccaattgtaaccatcctctcctttcctttgctctcttccattgtaagatacagcttgattgtttggacgagtctcggtttggctccattgttctgactggttcttcttctgttgttcctgaaactcaaaacaaagttatagaaaaactcataaacagaggatttgagctgttgatgaagtacatacctgagattgaaagatagaactgtttgttgttgttgtagttgtagttgtagttgtagttgtggtcggagcagaaactcctgatgattgtgtgtggaatgagaaatcgaataagttaaagttgttgttgttgctcttgtctccttcatttatacctttctggttagttacgtttgtgattaaagctcctgtggttggagaagctagaacctgcaaaacaatcccaagaattgttcagacttcaagaaaagagacaaatagcaataacataattaagaaagagtcgagagttgactctaaaagtctttctctctctttgaaaccgttgacccataactttatcacttccgatcacgattcattgtcaagatgttaaatcaatgatacatcaaacacagattatcatcactaattggattcatttcaaaagaaacagagaaaaaaaacagagaggcttacgttagcagaggaggagacaaaagcaggggaatcgagaaaaagagagggactgaaacaagtggaaggagagacaagagaaggagagatagagattgaagaaggagcaaaagatctgaactttggtatctcaagatcttccaaagaggaagtagatgttcttccggattgttgtgaccaattagcagaaccattcatgttttgtctggttctgctattgtccattgtaagaaaagaagcagccatacgaaaaatggaagtttgttttataaaagaccaatttcagatatatatagaaaggaggggggcttggagaagaagaaaatgagagaagtgatggttcttgttcttcttcttgtttctgtatatttgttggttatgtctgaatatataaaacatattgcacgtctgattggtgaatattatattattttaaaattttgtttaattgttcgtttttatttttagggtcacatatgaagaagagtagtttctgagaaggtgataaaaagtttgaccgttgaaaatatgattagaagaagaaggagaagagatagattggtcagaccttgtggccttgactctcaaacgttgaacggattttttgaggggcggctcaatgctttcatcatcttcatatgtctcgttctgacacgtatgatttattctttatacgatgttgtagtatttttggatcaaaaatacaaattcaaacatttgggattcttggctcttgctcaaaaaacctagaaaatttcggaatcttgaaaattttgactgtaggtgtactaggaaaggttctctcatatctttaaagcacatgacatgagtgtaaaagattagtatttagaagtgagtttgtgagtattttactatttttagcaaaacctcctaactaaagtcgatattaaatccatgtgcggctgtttttggtttcaatctattttttaggagacttaattctactatgaatagactaattgaacacaagattattcatttaaagaatactagaaacaaatatttattagaatgttaaattctatgattatcaaactattttgtatccgtatcggttttgatatagagataggctacaaattgaccctagataacattttgtagcttccgatcaataaattggtataacttctgtcgaaggtaggccttttttttttgtatatatgtatttgaagtagccataaatgtaataagagaattacatattgtgtatatatgtatttgaagtagccataaatgttcttattgagatgtcaggatgtttgtcttccatcactgctaccacgtctggccctcttctttggtagtcgtctctgttttgtacataaaaccttactcagtttgttgtttccttaactagtcttgtaatatttgttatttgctttttttatctagacgtccttgttttatataaacagtctatgtacgttgtattgtacaatgtttaatatcaataacaacaccctttggcaaaaaaaaaaaaattacatatcgtgtcaagcatagtagtgtaaattgtaaatcgtttaggtatataaaagtgatcagtttcttattgcacgatatgtggtatggttcttcacgtggaacctaaattaaacgtcatggattttgtgtcgctttaccgtgcaagttgcaaactatgcagtgtttgttgatccgatgacagtttctttcttcagcccaaaagcccaaaaggcccaaagtaaaatagcctcttgctttaatacacgtcggtatctctacagctaacacgtaaaacagacgtggcaagagttgcttccagaatcattaatagttaaaaaaaatcatcattggcacaagaaagtgagatatttcctagtcttgctttcaagtttcaagcaatctatctatctcgaaaaagcagcgatgcaagacgccgagacatcacgacagccggcgaagtctttgtccgatcgagtgaagactaactgtttatccatggcagtaacatgccaggaagggtttagctatgtcaaagccttttttgttggccaggtgcgtatacaagagtcttgtttcgagccactgaaacaagcggatcagagactcatgggtcttcttgaatcaatgatcacttgacgtatttggtgtctcgttaatttccttattgattagtttcattttgttataatcttttatttttattttggtttggaagacaaagagattgacggcaaagaacgagaaggaagctacggaggctcatctaacggagacaaaaatgcaagttgacgcaaccgatgaagcagagaatgccaagaagagacttcatcaatcttcttaatgtttctttattaacatataataatggagtgtgtactttattaagcaaacacaaatatctgggagttttcaactgtttctactactaatgatgaatgttatttcagtattgatttttaatacagaattctattcccaaaagataaaatggaaaattttcattgttattatagaactacataaaagtgagttcatacaaaacagagtgaattcatacaaaaaacggaggaaagttgtctttaacacatcacaaaattgtcactgaaagttgtctttaacacatcacaaaattgtcactgacctattttgtgggtgttttcttttgactatatctttgacctatttaaccaatcatttaagccatttgattcatttttggctgctttatggtcatgtcataaaaccaccccatttctagttatccatgtcggagaaatcgtggcacattccacaacattatgaattacacgtttccacgagaagggagcaacttgaatatacatttgttcaacaaaggaatcttctcaagatgaaaaatatggtttcttatgcggtagaggtgaattgtatagagcattcctgccaacgatactgtggagaatgagatcaacgtcaatatccaaaaatcctgaaataaaaaagtccataaatattatgaccttgattgtatgaaaacgtaaattttgcatttgatggataaaaagagtcattatctatatatggatccttagaatataaactggaatttatttacctttggattggagacaatgatacctaaaagatatgccatcaagtcaagagccgattgcagtgagttctgaacacctccaaccacacaacggtcggattctgaaacaagatcctaacacatgaccaaaaacattacgaaacgttcttattataagtctttaaagaatacgtgtgctgtaactatataagctaaagaaatgtaaacatacctgcatttgttggatgacggcaagatcaaacatccacaagccaagccttgaagcagcaactccagccattagcatgtaagatgctattttatcctttttaacccaaatcgatccaacgcagaccaaaaggcagctccactgtatgaacaacaaccctacttttatgactcttttgttttactcgagttccataacatggtcaagtacatatatgatacacttaatatctagtgaagaatgagaaaaagacttgttataacctgtaaccaatcagatgaatcaaaccataggtgtgttttcaagttgatatacctgagaccagaaggaccagaggccggttctcagagttgagagacgcgattgcattagcggatacactaatgtagccgctagtccaaccgttgcacttattcccctgcctataccgatgatatatgtaggtataccttcccactgcaatgtagccgtcatcaatgttccaaagctgtgtcaaggtggtaaataaaacaacaatgatccacataatcggtaggatatgcatgttcatctgaggactcttaaacatatagataaagagaaaaggaacctgaggacggtgaagaacaagagagctagagaaaccccggggaggacaacttcttgattgaaataaattctccatgcgccaacaaaagaggacttggacattctatccagtatcaccaagattccggttctagacggagggtttccagtataaccctcctctgttcccggaacaatagaaacagaaacaggtgcatctcttccttctacttgctttgtccgggaacgcaagatccgtctctcattgcttcgtgttattgcaggaacaccgctatacacagaaatgaagagccaatattcaacccaagctgttatagtagcccaagctgcaaaagtgatcgctgaagccttaagtgagacaaaactgatgatcagaccagtaatgactggagacagtagcttggagctcaaatcaatgcctctaatgacagaattcatttttgtcaatactgctggtggatgaccttcagacataaccacagccctgttggttgccaaaagagccaaaagaaatacatgttgcaaatatgacactatacataagattgcattcatgtgttgcaaatatatacagtctagacatttaccagtctcgttcgatcagaatggtgccagcaagagtcgaaagaactccaatggcgccagcaagattcgttaacacaatcaagattgcaaacaccgggagattccgggacttaagatcagaaactagcaacaacttgatgactgcaccaccagcaatagtgtaggagaggttctggaacaggagccagagtctaagaactttaacgtagtccattccctcgacccattgccccacaatgggaccaaagattgcagtagaaccagattctatagcaccataaatggcagcgagaagcagagagtttggccacaagtggatcatatacaatgcaacagagaattcccatgttctgcatcacaaaaccaagaaaagaaagtagtccatcatcttcaaaacgtctaacactaatacactatgaataaagttttatatcttcatacaataaaaaaaaaaaaaagagtttcaaaataattggagataaaggattgatggaaacctacctggcactccatcttgcaagaaaatatccaacgtaaagatatatcacgaaacgacgtcgtaaggctggtggtgggttttgtggctgtgattcatcttctccttcttcgcgttgttgttcttcctgatgaacaaccctcaattctgtctcattctccattttctgctggaaagtctcgaatttaacatcgatcaagcgattaggtgttgattacgtattgaattccaaatgaaacatgacatctgtagatatttctacagtcatcatttgcatgagcgttttagtgtgtgacaacaaagccgtcctcgagaattgcgataaatatgaactgccatattaacaatagtttatcctgaaaacaaaaaacgatgattctaggaataaatgagaaacaaaaaccttattttagcgccgcagaaatagctttgttgatcgaatgatggaaaaagaatcgacgaaactcagtattactttgttctagagtggtcctattaatattggtgattctatttccaaagggatgaaaatttgttagtggagcaaaaaacagattcccactaggcactgggaatatttatggttttgtgtgcaaaatgactatgatacaattacattattttatggtttttagattttaagattggtttaagaaaacaagccagtctttccaatgcctattctaagtcatcggagaaattataagttcgttgttatacaaatcacttatcgaacgaaatggatctaagtagtataaatggatgttcttcttctgaacttttttttaccccgctgatattgtttactttggagtttggaacatagaaaaagtaacaaaacaatacgagtaccttttttaactccttttcattgctagaataatcatacactgtgagcaaaggcattcaccaaaatttaaacaaaataaaaaaagaagacatatttgagtaatagagctacaaaatgattagcaagcatcaaaagatatgcgcagagagaagatattgttcattgttggaacttggatcatccaagattgaaacaaaacagaacaaacacaagctctctcgatcaggacatgctaatcagactctgaatctgaatcacttgcgttgtaacctgagaaatcacaaaaaaaacaaattcatatccaaaagcaaaaaagaaccaatttgttgataaaccaattttgacatgtaataaaacaaagacctggtcgtttatctatcactttccacactgaagaacgaactcttgatgctttcgtaatccaaagtctcccctaatcattaataaaacacagaatcaaattcaaaaacctaaaaaagaagaaacttgcaaatcaatctaatcaaattagagaattttcaaatcaaccaaactaaaaaaacctaaaacttggaaaagaagagattgaaagggagggaataaagacgaaacctttctagcatccttagggactccatacccagagtaatacatctgacctaacaaaacctgcatagtgatgttcccagctttagcttcctcaagagtgtctttaaaccaccgcttcgcacaatcagaaaccaccgatgaaagcggaacgaaacgtcgtgtagtttcgctggtggtggtggtggatgatgaatctttgtcggaactgtccatggaggaaatgggtcggatcggttttgaggatttgatgaatccagctactgctgcggaagctcctcttagccctgttttgacgggaatcgattttcccatttttaatttataaacataaaaataaataaaaggaaaaaatcggttttcttctcaatctcttgtttggttttggtttggtctcattgtataaaataatattaaaatatcttatgggcctagctcttaagcccactagaatttttttatttttttccctagcccactagaaattaagactagctccttgctatttcataacggttactgaataaagagctctgtctatataaaggccatcataaattcttcacaattgcattctttcgctctcgtctccttgttttttttagtagcatgagttcgtctaaggttttgagttcagacactataacggtaatcaagaatgatatctcaggatttttcactctcatatagtttcttttagccctaacgtctcaggtgtgaacccggtcgaggctgttgcttatggtggtgctgttccgggtggtattttgcgcggacgatgtggtctgatcccgataatcaagtattcagacaggatacaggtggtgccagccgagaatagagatcaagtattaagtaggcttccaactgatttacatatgaggattgaggattgccatacttccaatcctccttctcgatccaactactctatttgggttcaaattgaaactcagttatgcctgcaaatgatttttgtgaagatcatcctattggtactaagcaagcaaaccatcatatcatttcagtcctctagaaaccaaatattacctttgaagtgtgtgcagtgcactaactagctgattctcatagatattcgttatccaaatgaccaaatatacagtcaaaggacactgcaaatgattgagaacacacaatacatatctatgtatgtattcaaatacacatacatagcctactaaaagaatgttctatgagctaaaaaaaagaacgaaacattcctacacacaaatttccgtaaaactactgcaaatttcggaatctacttacattacaacatacacacacctataaaacagtacacaatatacatacatacatatataaataaccaatgactgtatgtatttaatgttatatgtctgaaatagagattgtataacctacctgactccaagtgcttgcgcactcatcatgatacaagaacgaacaccacggaaaagccaacgatcatcgatttcaagaatcactccaactatctgaatcttcatcctcgtcgcttccagccattgcctgcaccagtgttcaaccggttttagatgtgtgtgcgatagagaaaaagtgatattttatttggtctatgatcaggcttataattcattgtttccacttaagagactgcttcggatccaatctaagacataatgtgagactaaactcctcagattttcatgtcaaattgaaatgctttgacatgaagcctctacgattagcaaggaccacagaaaaaggtgaaaaaacttgaaaacatttactatctttgaaggagatggaaagagagtaacgaaccatgcgtattgtatttgctttctctaagattgcagctacccttaagtctgttctaggaccagtctggatgctgggtcgtgttgttactgccggctttagattgacggactgcataaacaaaacacaactcataaaattccaaatacaaaattctgttcacaggaccatctgggattttacatgatcaacatgtgctaccttgtttcgtatttgtgcaagcaacgaatctttgtcatcttgctttgatttgattggtggatggaccatctcagagactttcttcatctggcaaatcatcagaacaagtgattagagacataatcttagcaaaggcatggtattgcagacaagatgaaattttgtaccttgcgtctgtcatgagctgcaacagcatcgacaagcggacttcttggcctaggaagcctaaccgtagggaccacttctgtcttatatgtgtccaaggtaggtgccacagagaaacagctaacaggccacatagcatctcccactgaaacaggatttatcttctgaactgacgtgtttgatgattctgcagtttctgcatttgaagcatcaggaaccgaatgacccttatcttctacctttgttgattgagttggcgtcagggatttggtttcaggacaatggtgatcatcgcttgaactttgagattcatgcacatcagcatcgtccttgaaatcttcgtgtttaacctgaggcagctgcaatgacgacgcttgagagtaaacgagctcgtggttctgagctgcatggtcagccaaaagattgttctcctcagaaccaaaatcctctatgcactcctgataaggtattgtagggagctcagaactgtcgtattgactattcaaatcagtgctcatggttgggaactgaatggatgattgcaatggcttttctgatgcattgtgaacaaaccctccaggaagtcgttctgattcgtcacttcctaaagatacagatagctctgatggtggagacccaatttgaacattcaagctagaaccaatgggtggtgccgctgataaagcagaactactggtttcgactgattcccccatgaaggtaggaaaagaatgtggaacctttccaataagccattgcataggaggaaggggtggcatgtcctctggattgggcggaatagtctcagggataaaaccaaagctaggaaaagtaggatccagattcaactcttgcttaggtctgttcaattctatacctgcagattgtggtgcaaattctaagcctgctgattgtggttcaaactctaagcccctgaaaacatttgactgcagcaattcctcatctgcaacttcatggcttgcataagatgtttgctctctaactgcctggtcgatagcctcactctctaaaaggttcagattatacacttgtgtggaatctatgcaattatcatcaagaatgctctcaccaggagatttggtttctgtgtccctgttcctttgatccagagatggcttgggacttgtagattcaatactttctacgtccttgttgtctggttcagtactcagaccttctgaagacacttccagagggcttttatgcatttttatttccgactctggattattgtcttccagtagtgtcccgtcagactctacaactgtatcatggaaaatctctccagcatcagaagacgattgataagtattggtcgaaatccaaggcagagaacccttcccacgagtcgatgacagactaacggcatgattaacaccaccactggaagtgtcattgtcattatcagacacatcaagctcaacgttcgggacaatgtctgtggttgcgttgtccagccctgaaaggtcatgaaaaccttcatgagagatatggtcatcgcatttgctacaagtaggtgaagcatctcccgccaatttctctactcccgagttaaaatcagaaggcacggacattccattctctagtgtgtcttcatgggactctgaaacagacacatcagccgtgttgccaaaggcacatgaatgctcatcggagatctcagcaactgaactttgagaatcaatgtcagcaactgaactttgagaaccaacgtcggcaacagaatttttagaatcaacgtcaacaacaacattagtcactgaaacacaatcggtttcatcatccagagtatcttttaagtgaattccatcagctgaacttggaccacagactttagagggcgtatcaggggaaacttccatccccaccccagctgagcaaggtaccagctttcctgttaggcaacgaccatcacgttcttcaggatcgctgcctgagtttgctaaaacttcagaacaagcaactatagagtttgtctcaaaatcagtatcagcgataggtaactgtttaccagtttgactatcaacaaacgcttgaggactagtgcctgagtttactaaatttgaagcaaccatacagttcttctcaatggtactatcacatctgcttccttcagaagttgaactaattgatgaagtttcagaaggcaagtcagagtttttagcatcaaaagatgcacaagattttgaagaatcgaatggatccacctttcttccatcattgcctcccttcattagatcaagcctaacaagttctggagaagtttcaacgacttctgatgctaaagattgaactgtcagtgaacatgattgatcattctgagagactggccttggacttgaacatgtaccattcgaacttaatgatgtctggccatctacattgctgctactaactgattcctgaacattcaagtcatgagacactttgttggcttcaggagtaacgtgagacatagaatccaccaactcactcttaaaactagaagtagaaggtaaacatcccgaaagtttctctccatcagattgatcatcaatggatatgcttgcagtgtccgagtaagaataactagtgctctttttcccaaacgagcttcgcccattttccgaaactggtgtgtttccatttgaatgagaaaatgaaaactgaggtgggtcctccattctctcttcaaccgcatcagaatatatatgatggttcccatccttcaaagtatctgatctactcttaggtctacactcatcgtctgtttctgtttccgactccatggtggctggtgcgtccacataattgtcagcctcactggttaaatcttcagaataactcctctgttgaaaaaatcctggcttcccgttcaaaaccgtttgtgaatcctgtgtaatagttgttccacggacctcattgtatgtagattcaggcactgtctctatatctttttcaataaaacccccattcatgttaacatttgccacattttcctgctcacttgggaatgaaacctctgctctgcttcctccatgagacttatccatagcacccaccatactgatttcaggtatatcggttactacatctctagcactatccatattccatgtcaacaatccggggttttgggtaattatttcataacttatcttactatctacacgtgtctgcacaaatttctccatgtagctttcccctgattttgaaataagggaacacccatctagctttctggttttcaacttcacaacgcgcgctggatctgaatgatgagcctctaaatgctcctccaaaaacaattcatgcaatctgtgccagttgaataattgaaaccagccatttttagtcacagtcagataccaatataggaactacatatatatcataacagaaatgacaaacacacaagacataaaatagataatactcacttggcatgtgatgataatgcattttcaggtgtccctccattcctccactgagatgctctcctctacaagagaatagaaggaaaactatgagaatcacaaaatggaaggtaagattacacattcaaaacaccatgagcataagaaaatctactattcagaaaatctaccatgtaatggaaaccaaaatataaccaagaaggatcacactgcaacccataagctacaacctgaactaagaagctagtacctttgctttctgtgattttttctctctctgaatatcatcccatgattcttcatatgaagacgtttcaagcctaacaaacgatggatcggtgtagcgtttcaaacaagccccagctccggaaatatcaaacctaatcaaaaccatcagaagatgttacatatatccttctctaacaaacgactaaagaagaagtcctatcaaacaaggctaaatcatacttgtccagaagaaatagccttggaggacctcgacattcctcataagaatccatcacacaacgaggtaagtcaccacttgtaaccacactctgttccaattgtagattcggatgccattccacacctgaaatagagtcacagaatcatgttgaaataatccaacatcatagtagctgaccagatcatgaatgttcatagcaatctaacctttgttagagaaaaacggcgaatgatcggtttgacacagtaatgccttctctatagaaggaaactctgcttccaactgttgcacacgagccattaaaccatggcttctagaagcagtagccattacttcttcgtgcaagtcatgaaacatctcagcagcaaaccttcatcacaaattacatgaatttaaagacaattccatcaaaaaatcaaaactttttccacttccacaaccaaatccagattcatcaaaattgtcgctttacaacaacggattccaaaacttcgaattcgatgcgcttagagatcaattagagaaatttcgattggagagaaacttactcagcgagatcaccgagttgacgcaaaatgccaacgagaccagccatagcgactccttcaagcagagcttcagggtcatctttatcagcagcttgatacagatccggatctgctaatccatactcgttacgagattggtacctcgtcaacggcattgtttgagcttctctgtctgatcagctcgctgatacttttgttcaaattctaaaggtaagaactttagaaagaagaagactagaaaagcttctctgtcttcatttaagtagtgaccgaccaccattagatatgtgacgacatcacttagctggaaactaaaacggactttctgtggattcaagacggcggatataggtaggggcaaagagagagagagagagtctgagaacctcaacgctaaaagactttttaagaaaacatttctttttctatttttcgatagccagaaatacttaaaaaattgttacttttagtgaaaaattcttacaaaaccaaaaccttgttgcaataaaacctgcatttaagaccaaacccctcgggaacctgatagtttcaggcttgaggtttgtccaattgtgatccctatcgaaaccaaacacaatctaattaaagtcatttttgagaaacggatgagagttaattgaaagattaaaaagggagcgaagagtctatttgagtgtcactgttacttctctgcaggaatattaaaagacgttgagtttcgactacagcctacaggtatgattcgacttctctcttctcaccttaaagtttctgtctttatattcttcttcgctcgttgtaaagcaattcttatttgagctccaagtttgagatttttttgttttatcttgaaatcgtttttggttgatgttgttgtgagtttcaggtttagacatgtcttatattccaccacataagaggcattcgaaggatccgacaaagcctacccctgttccagattctcttgttacaaaattcaagaagaaccttgactttaagagtagcactagcagtgttaaacgcaacaagattatctattcaggagattccatttccaaatggtttcttgttggttcaaatggaattgaggacgatgttccttcgtatgttaagtttgtgcccttgtcctcagattctgtcgagtgtagaaaaggagaaaagccttcaatactgatgaacaacaatgtccaaaatggtaagaaactattagtagactttggctatgtgtttgacaaaatgaatatcatctagatgctgaaataaacaatactattaactattttgtttgtgctattatcgtttttgccaaaagaagatgcattgtatctatgttgagtatggttttttatatgtttatattcagtgaatatgaatattggagagaggaaggatgagagaactcagtggctattagtagctgagaaggttatggaggatcttgtgttggcatatgagcgagttaagactgaaatgaaggagcatcatcatgtatcgagactggttgctcggtttggtaaaattttcttctatgggtaagcgattcaccgtctgatctcacattttgctgttttcaggaatgggtttatattttttctaacatatacaactttaaaccaggagtcaagctggtcctgtggctgaatgttcactaaaaaacttgaataagatgttctctactgatctcccaatgtcttacttacaacacataaaatctaatgttgtaccaagccatggattctctattgataaggagaaggaaacatacactgtgaaggtactcgtttcattttcttagatttagatctatacttcgaatgtcatttgaatgtgctaatttgggtttggcttctatttttaggtatcgcattattctcgtcctaatgcaaccatcaactgtaaatgtacccgtaaggaagatggacggctcagtatgtacaaggcaagtctcgagttttatgtgtgtagtgactacaaccaatagtaaaatctcttctttattgttctcggactagcaagaaaaacaaacaagaatttgatagatgtcacatttttacttggtcttcctttaatatctaactttgaatcttgagttttgcttttatataggtcgaccttaatcctgtaaggcatttggttgttgatgtgtcatgcattgataagaatctcgacatgagactaacgctcaccgctaagagggaaataacgtatctcagtgtaagttcaagtttggtatatatattttacaatatatggataaataatatgctcttcttagacttaggttgtgtgatctttctttgatcggcaggataaagagataggtgacattaaagcgctattggaatcagcaactgttgatccaaatgtaaaaggcggtttaaggtggccgtttggtaaagctttatctgaagatggatacaaagaatttgaagtttgtcacgttagagctactatctacaaaaataaaactctaaggcttagggtaagagagactgatagattcaatgagacgactggaacaggggaaaccaagagggaggtgagtttgacgcttaaagacatcgacactaaaatacaggtaaattattgtgctcttgtactattttagaaactctaatggaagtgcgaggcttatggtgataatacttgtggtctgcaggagcagaacactgagaggggttgtgttttggagatgctacgagatgctcttggaactatatgggacttcttgcattgcgatgcctatcttacatgatgaagaaccatatgatgttgcttgttctatcaagtttctttttaatttcttttactttctactgtgttttggtacaataatgttgttttaaggttatcaaggattgtacttgtgtgtgtcaagaaaaacagaagttaagttttgttaccagtcctttcatttatgtgaacatggtgtatgaatgactcattgcatactgaaattttcttttacctaaaagctataatcggaatccaagcagtacacaatacactgaaagattcccaattatcacagtcaagtttgatggatgtgtcaactttgtatacattaaggttaaaggtaagtttcagtgatagcagtggaacaattggtgcaattaacgttgaacaaacagaaccaagctacttcgaaagtcttgccaagcaaactaatcactcttctattaagttctaacaatcatcaataagaccaaatacatcaattttacaactatttagagatgctccacattgcttaaaccaggtgtgctaaaagttcgactgcttgatccatcaaacctttctcacataatctgctaatgacttcctcaattctcgaactcttaacgaacacgttcatgttaaatgcttcttccaataaaccatgagcacaaacaacctcgtctacctcaatatatgcactaatcataatatcaaatgtgtggctgttccggttaactccattcgtctccatctctttccatagagtcttagctcgactcagatctccagcttttaccaatgccttgatcaatatattgtatgtaactacattaggctcagaacctagcttgttcattgaagacatcatctttaaggcgccttcaatatcgttctgcttgcataacccattgatatacacattataggtataaacatcaggagccaaacctaacaagagcaactcatcaaacaacttgtctgctttcgggtaatcctcatccgcaataacgccttgcaacacgattgtataacaaacaagatcaggctctactctgtcacatttcatctgattcagtacacttacaacttctttcccccttcctccttccaccaagaacctcatcacaactgtataatcccgcaaacctggcgaaaaccgagtctttcgcagatcttccaaatatccaattacatcgaaacatgacgaatccttgtgtttacatacagaactcagtaaccgagagtataatcttggatcaacaataacactatcctgactcatgtatctcactaactcagtagcacaatctacctcacctattctacaaagcgcatcgatcaatatcccgaaagtagattcctctaacctaacacccattctacaagctttcaccaaaatctcaggaaccaattcaagactctgtctttttctcacaagaactaagagcaaagcattgagcgtgtaagcagaaggcacgcacctgaaattagggattttgaagaaaacctcaatcgcctcttcgattctaccggagaagccataagcagcgatgacatctctgaaaatggattcaggtgtatcgaacttctcagagacttcaaggtggtaaagaacagatgaaatattctcaagctgagaggatttagctagggttttgataacgaatctgtaagcttgaggagtgggctcacagttatggagttggaatgagcttaagagggttcgcataacagaagcattctctgaatctgtgagaaggttgcttcttagctcttccatggcatacttctgcttgagattctcgttccatttggttttgaaagacgaatgaggaatttttcgatactttctcatgaaatttgacattcggtgccatgacgaagatcttgccatttcttcaattcgataaaactggaagacatgtcatatacgatcttgtcggtatataacatctgtaaaagcccaactagattcaaaagcccactactggcccagcttcatttagggtttttatgtatcttctattgttacgtgtgtatacactcccttcaccgcagaaatacagaattaaaaaaaaaaagttttgaacgatgatgatctcaatcttccaaagatttgatagaggagattctttctaggcttccctcgaaatctatgaaaccagtgagattaacttacaagagttggaacaatatatcaaaaagtaagagctttacaaagatgcacattttaaaatgttaactaaaatacacaaatttaagtctttataaaattggttatatgatatcaaatagagtacacatatctaaagttataagagaaattattttaaactatccttttcatctttttctaatagtatagcaccaatcaaaaacaacgtgtcaatcaattgtagataaaatgtatcccaccttttattatataccctttttatcatacatcttcttagataattctcatccaacacgtaatcgtataaatatagtattaaaatccaatctcttaagaacaagataaacaacattagaaagagaattattatccacgtaaaaaaatcattagtctttaatagttttaacgttgactacataatacaaacgcgtggtttcacgcactaaagaaagagcgtgcagcgggaaaatttgccgtcattaaaaactcagaacaaaaaaaaaaaacaaacagatcgatcagaaataaatagaaaaaaaaaagattttcccttttttaaattaaaatttctttgtttcatcctctggagatagaaaaggaaagaaacaatttacaaaaggccttaaaaaagcaaagattcttcgctgacttcgttctctctttcgctggcgaagaagattttctagggttttttgtttgattttcgtgaagtcggaaaaattattattattaatcgtgttgagctgtttgatcggtgaagactatggcgtcgtcttcagcttcggcgacggtggctgttgataaagctaccagcgatcttttgttaggtcctgattggactacgaatatggaaatctgcgattctgttaattctcttcactggtaattttttgctcgatttggtgttgggaattgttgattgttcgctgcaattggatttatcttggattggttgatgttcttatgattgcgtgataattttgataaaaaggttacaattacatgcataatttgggatttggtgttggtagtattgattggagtatgaacatcttacatatttgcatctgtgttaatggttttgtggctattgattttgctcaggcaggcgaaagatgtagttaaagctgtgaaaaagaggctgcaacataagagttcgagagttcaactacttgctcttacggtatgatgtttctagtgaatatttgggaccttgttccttggccaattattctgcgtgtagtttcggctcttctgaactctctatgtgttcttctgtgctagcttttggagacgttggtaaagaactgtggagattatttgcaccatcaagttgcagagaaaaacattttaggggaaatggtcaaaattgtgaaaaagaaggtagctcttgttcacggttctatgtgtatatttccgtactggtgattgttcgtattgctgatgatatggaggtttataggcagatatgcaagtaagagataagatattggtcatggtggactcttggcagcaagcttttgggggtccagagggaaaatatccacaatattattgggcatacgatgagttaagggtgagtaattttcttgaaatgtaaagtattttacttgaatacattttctatcacctttagtggacttgtttgttgcttgtgatattttacttttcggtcattgtttattttaaatttgaagtactgtgtattggtagcaagtctggcatttgttgccactacttttttttccgcctggtgctaaatgtaaaagttcagtgtttatagttgtggagtcgtgttgctccgtgcatttatcttcttcagatctcgatatacatggaatttgctttgcattttactgagatgctcatttgcatgatattcttattctcaaggttgctgttacatgttgcagcgttctggagttgaattcccccggcgttcacctgatgcgtcccctattataacaccaccagtgagtcatccaccgttaagacagcctcaggggggctatggagtacctccagctggctatggagtacatcaagctggttatggagtacctcaagcgggttatggaatacctcaagctggctatggagtacctcaagcggggtatggaatacctcaagtgggctatggaatgcccagtggttcttcgagaaggcttgatgaagcaatggcaactgaggttgagggcttaaggtaagtggatttgttagttcaatatgttgttgatgtgctggcagttttagatttcgtaccaaattttccactgtttcaatattcttttcttggttaaattgtagcttgtcaagtattgaatccatgagggatgtgatggatctcttgggcgacatgctacaagctgtggatcccagtgaccgtgaggtattgaaatctattatacagctatactgcgggtttgggaatgaaatctattgctttacccatgatttttctgttatgtaggctgtgaaagatgaagtcattgttgacttggttgagcgttgtcgttccaatcagaaaaagctgatgcagatgctaacctccactgggttagtcctttatttttaggatctttgtacttaaatttgttagatgtgtaatgatattgttgatctgagaggttccattgttgtgctaaaaagtcttttgtttatgtggcagggatgatgaacttttaggccgggggctcgatctaaatgacagtcttcaaattctgctagctaagcatgatgcaatagcttctggttctcctctgcctgttcaggcttctggttctcctctgtcagttcaggcttcgaaacctgctgactcgagccccaaatcttctgaagctaaagattctagttccatagctggttccagttccccaataccagccactgtttctacaggaaaaagcccaattgatgaggagtacgaagaggaggaagatgagtttgcacaattagctcgaaggtctgtcttacgagttacaattggattcagaaactgtgcatatcttaactttagtatttgacatatcactctttatcgtttcaggcattccaaaccgccagcatctgtgactacagaccctaccagtttagagtctcataatgctgcaagcaatgctcttgctcttgctctgcctgacccccctcctccagtgaacaccacaaaggaacaagacatgattgacctattgagtatcacactgtgtacaccgtcaactccaccggctccatcctctcagccttctcctcctcctcccgctggctcagatcaaaacacccatatctatccacagcctcagccacggtttgatagctatgtcgctccatgggcacagcaacagcaaccgcaacagcctcaagcacagcagggctattctcaacatcaacagcatcaacaacaacagggctattctcaacctcaacattctcaacaacagcagggctactctcaactgcaacagcctcaaccacagcagggctattctcaatcgcaaccgcaagcacaggtccagatgcaaccgtcaactcgacctcagaacccgtatgaatatccgcctccaccatgggcttcaacatcagcaaatgcatactatactccacgggctaatgcaagtgcgtcatacacagacacatcggccctagccggaagatcactacagcaatccaactcattccccacacgagctggagatcctcaggctacttcaactgcaagcaattcaggtgtatctgtaggacagaagccgtttgttccatcatacagattgtttgaagatctggatgtgtttgggagcgcagacgggaagcataataaaccggcgaacagtagtaatggttctcaaaacttgtctgggtctcagacgcagcagagtatgataggaggaaggaaaatgatttaacaatagtgtgagtgcttcgtattttcccattgtgaatataatggtgtacattttgttatccccttgtttgatcttaggatttggtatgacatattgaaacgctttgatgagactaggagatttctttttctttctaatttgcatcgtcttctgtttttgtactcttttgtggagttgtgtgaactattattggtttgggggagaatgttataaaagctgtggacaacaattcatgggaaatggaacattggtctgtttctagtataatttaatgtcttagccagttccgacgggtcagtctccagcagtcaatgctttgatcggaaacatccacaactaatttcttggtaatgggatcactacactttccaagcaacagaggtatgaaatattgctccttcaaaagaaaagatctagaaaggcattttgagttattggacttatttaggtccctttaactcaaactcccaagctttttaatgggctatggaaactaaaggctcagatgtatgtcacatgattcttcagcattcgttgtatgcagcatcggatcaatctttttgcacaaaaattcaagttatttatacaacttattttgcaaccaaactcgcttactgatttagcaaatagaaacaacatgcaagatattgcatccaaatgaaagaaaaaaagacgaacacacccgatgactcatggtcgacaacacgatttagaagtgatgtcatgtgatgctaagatgcgatttagatgtttgtaatgatgtgactttattttgacacaagcaaagttgtgaacattaagaaaacatagtgattgagaagcaacgagatgttggctcatcaatcttgtagtcgttcatagcataattacaagcattcttcaccacaacttagtaaaccatatttcataaaaccatcatctatcattttccatttcttcacatcttcgacattgagtagtccatcgcttccacgagaaaatctgccacaaagagacttttattattctgtttatttttcttctatattccttcttagcaaagaaatgaaacgacacaaacctgcatcgtccttggtgaagcagagaggtggtgtgattctaaagacatttccaaagtagcctccttttccaatcaacacacccaattctgtatatttttattcataaggcaaattaattcacctttttaatacatgtttcacctcagtaaagcgtaaacacaccaacctttcatttgatccataatgtgcagagtctcggcggttgcaggagtcttaagcttgcgatcactcaccagctccactccaagcatcagtcctcttccccggacatccccgataactacattatagaaccataaacacattgaatcaagttcaaaaaaaagtttgaagagggggagagatagagagagagagacttactctcgtgtttttctttcagctgtgtgagtttttctttcagataggatccaaccattgcagcattttcctgaagcttctctttctcaatcacattcagaacagcgagaccagctgtagtagacacagaatttccaccaaatgtattgaagtagctacggcgagtcaacactcctgctatctctggagttgtcacaacagctcccaaaggaaacccattcccaattccctattttcacaccaaaaaacaattagccaaagactgcaataaagttagcttagaaacaaaacaaacaacttggcacaactctaacctttgccatggttactatgtcagggacaacattgtgtgcctcaaatccccaaaagttaccagtacgtgcgaaaccagactgaacttcatccgcaatgaacaatccaccagctttcttaacagtatcgtaagccgctgacaaatatcccggtgctagttccacgatccctccaactccctattcacatttgcattcactcttaattctaacctaacaacactttataaatgacttccaacaatagtcaaaggttgattacctgaatagcttcacaaataaaaccggcaatgtgaccagtcgtaccatattgaataagatcttgcaaatcctttgcatacttctctccatcagaaccaaacacacctctataaggatcagggttcaaagcatgatgaacactattctgaaccacattaaacttccacatactctgaccagtagcccccatagttgcagctgcattaccatgatacccgtttcgaaccgccacaatatcttgacatccagtatacaacttagccatcataagcgccaattcattagcctctgtccctgagttagtgaaaaacaccacctttagatcaccgggaagtttagaagcaagagcctcagagaaatcagcaatggcatggttaaggtaaagaacagtaggatgctgaagcctcttgatttgattaatcactggctcaaccacatctggatgacaatgtccacaattcacaacagcaatcccagcaaatgcatctaaatatctccgaccactctcatcaaatagatactgcattttcccatccacaatgtttaactgcaacaactcccaaaataccacacataaatacaaaatagaatagtcaataaagtattgaactttaaagcctgcacatgatattgattataaagattcaacatttatatattatatatttgatagattccattattattggtcaagaatattcggataagaacatcgtagtctgaaaccaatttaaaaatgataaaaatttagctgttttcgatgagcccatcaataaagtttcaatctttttcgtcattattacatacagagatcatcaacaccggatcagagactatacgaatcaaaaacaatttcaaaaccaaacatttgaatcgagagttttgaaatggatcacgtaccggtttccgatagagacagaacatggaaggactgagaaactccttccttttgctaaggataacatcggcggaaggaccagtatacggcggaggagtgtaagcaaaaggaggaagcctcgcctgaaactcgtcggaatccttaacggaagctgtcgctgcctgagacgtcgatgagatacatcgacgccatagagagacggaaatgttttgcaccgatcttttcgccgcgaatctctgcatggttttctctgtttcgtgtctctgtttcttttctccgatgatattttgcggagagagagagagactacgacgacactgtttcgatggtaatgaagacgggagagagattacgttatttatagagaaaggaggactcgtatctattagatcaatgctgacgtgtttccggtaccgaacttgaatttacaggatggtccttaaacttcaatttaattatctattttatcgttactaccctaaagtattaaattacccctaaattgaattatacatggtttaatttgaaatcttacaagttagaatcgtaaaatttaagaatctaatggtcatatctcaaaatattgtactttttttttttttgtgaaaaatccaacctactatttctaattcagattttttccttcttgatttccgaattaatctgcaagttgtaaatgacattgtaacttatccaacgaatgttgactggcgtaacaagacatgcaagtccagaattagaaatcatgtggaaaaagattacttacattcacatgccaaaagagaaataaatcaacacaaatcaaaattttcttgtatcaactacaatttttggatttctttacaaaaataccatcaacctaaatagtttttaaaaaactaccattctttaaaaaaaaagtaaactaccattctttatatcagttactttttttttttaatcttttaactcttgtttgaaactcatttgggtgacttttaacagagttttcaaatttatttccaacaattgattgtgactaacttacacaacttctttaccttctcttctcttatatctttaaggggaggaaaaaacataacaaatagtttttagttattttatcacatcaaacatcaaatagcttaaaagagcttacgtcttggtgttcctcaaaccatttttagcttttagaaaggctaaagtttttatgcatattttggttacaagtttcacatttactaaaaatgacctaaatgacaaatccatgtcccaactcattttactcaccgcccacgatagatcaatataagtatagtagaagcaaattgtttaatgcaagttgtttcgtaagcaaatttatattataattaagtaaatgttaaatcattgttagtgtgtttggtattgtaccaaaacaagtaaataagtaatgcatttggtaaatggaatgggtgtcatgagtcatgagaatgatcacctacgtccctacaacactataaaaatttgtttttcatgataactacaaaattttaaatcatcaatcttaaagattggacatataattgtctttcctatcttttattcttaaatcaatcccaaagattggagacacacttggctctccttttttacgcgttgcgatacaataataccaaatcgtagcatacaaaaaactacataagtacaaagcatggagggaccatatgtgtatggggcacgtgttccaagtgaaagatattacataaaatgcggctaatattgtttgtcccaatgaaatccactataataaactatgcgtctaattagattttctccggcgtgggtctaaatttaaaatgtttgccgtgagccaacgcacttgaactatatgaatgagcaacaaaattatggattgtgtctctcttatctccatctgacaaggattgaattatagacattaattagtgtattgttttgaaatgacaagtggtgatatttctatatagtatttaatggctagttgtgtgattgcatattttttgtatataattatgaattataagggatagattatatatttgggatttcgtattcgtgtgaaaacatcaaattctatgaaaagagtggatatatctcattgggacgatgtaaaatggggagttgatgatgtagcaagtaaatctgcttacatctactttaaactgggctttttgtcttgttttgcttcgtttgggcttttctttgcttacaagagtataacttttatatattttctatttctttgctcaagactaaagtttgattatgtttgaaacttctattagggttgtagtttcatgactatatttaggtcctacaagctttgtttaatccgataacctcgatatttatttatagaaatggatgcatgttcgaattatatttttacacacaatttaacttctccaataacatgaaactatgtcaattgaaagttaagtgttatacaaacaccacgtatcatttcattatgaaattcatccacttttttagtactcagaaaatcgaatcaaaagtgttaattaagaccaaatttcataaatcacacaacttgtgagaactttatttagtcgaaatgttcccacaatcccacacattttatacgttcttacatatccatatatccccaacatgcataatcagatagaactcacaacaccatcgtcgttctccacaaccctaattcttggattcacaaccctacaattctgtcttatctctccttgagttccagtcaaaggtttaagatttcccatcctaatcattgcatcaacgaatgctccaaagaacacgaacgtgttgctgctgtattggtttactagtggaatcgtatcagctcctggagttgagaaaagcacttggtcactctgaatcaaacctttcccattaagaagattggtgtaatattgtctatcgaaagtagttggagtcacggaatcgaagttaaccagaacggtgccgtttccgttttgaggacacaatcgacggagttcaacgaggtaagttgggttcaaacttgggtctggtctgttggtaccgttgaagttgtaaagacgaggtgtcacgaattggcattgtgcttttccaaatgtgtgaccacctaccattttgacaaatgaaggattagatacattgtacgttttatttaattatgagtcatgctttttcattctaccaagtccttttataatccaaactcaagtggtacgtagaagatatttgtttgagatggttttctactaagtcttttttctcaagatgaagcaagagggttttctaactaaactcatgttaactaattcatatgcctcaaaaacgccttttaatactaaatatagattaattgaagttgatcattctaattataaatacaaaataattctatgaatcatcttgtaattagctagctataaatagataaaatgaattgtatctagctagatcaagaacgaaaatatatattaccggagagggcgactaaatccgaagggcggtttaggccaacgtcagcaaaagctgttttaagttgagtaagagtggaaaatggagagggaagagctgtattagccagagcgaagaaagcttctacgctgtctcttctccccaacggaactggccaccatggaccgccagactataacatataaagcattgatgtcaaattcataatatatttggattaacttcacccgatcaatatcataagtcatgtaggtatatatatgtacataccaaaagaactgatatctgagaggcgatggtgataatatctgcgcaagaaactgttcttgggcaagctctctcaatggctgctttcattctatctatgacatcgaaccctcgaaccgaatttttgtttggagcagcatctttctcggtccggaatgatgtggaattgtcaagcaagatcgatgcatcacaaccctataaaaccatatatgttacataacatgaagacattatttatcattaaaaatggatgttagcctccattcaatatatatatgtaaaagtagacgacgtagttttttttactaacaaaaaagatacgttgagtaagtccttacacgaacaaagcagtcatggaagtgaagccgaaggaggctcgcggcaatacgaggatcagtccgcagctcattgacgatggtatccccaatgatgttgaaaataggtgggcaagtcctgaagtagaagtcaggtctcaactgagcattagagtttgatgcttgaagcagaaggcaacccactattagggctcccatagcactgcaagataatgaagacgaaaaccccattttttcaggagggagacaaaaagatgatttgagttgtgagtgtgtgtattaactaagggcctagaaggaacactatatagagatgttcgagtctttctttaatggtattttagactattaggtattgtgttcttaaaaaatactattaggtctttttttaaggccatgtgttttactagagtggttgaaggataaataataattagaatttaaaataaactaatttcgacgtgctatatattctttggacagaattaaacttgctcgtagtgtttggctgtatttgtccgacgctgtgataaatcaagtaagattgatcattttaacttcaattacaactttttagaaccgtctcccctacattttttacttactacaaatcgacgtacgtatctaatgtttctcaattccgccaatatattcttattcttagatatttttcaagtttgataaataatttataaacgacacaaatttcaacagtggtacggaaaatgaaattagtacgatatttgatatcaattttggattatgtagggtcgtaaaagatatgtttgttgattcatgttagacacaagttatgtctatgtaggaaaatataatatcatcatgttaccataattacgttttatttgtgacgtgttcttgttgatatatctgaatttttgaggggacggatatttgtataaatgagtttgttgtagtttcaaaggaatgtttaaacttttttttttttaatttatacacgaggtacgtacatttataattggatacaagacaaaaaaaaaaatctcggaaaaccttctaaaaggattgtccttcctaattggcaaacattttcaaactatcttcctaattaatattttatgaaaaatagaattccttatgttttgtccttctcttccccgtgaatcccgcaaatgtagcctcagaagccaccttcacaaatcgataaactttttatacaattcttgctcaaaacaatttaatctgaaataacaatgttacctaatacatatatgatttatcaacttcatacgcgtccatgtgctagattttgtggttaacaaaagttaacctaatctaatactttagcagtttagctccttgtcttttcttctcatttataagtaacgaaagctgacaaaaactaggacattttatttcaacaatttgcttgaatatatattataaatttcgacgtgatgttaaatcaaaagctacttgaatacatgtcagaaattgaagtgttataaacaccacgtatatatgcattgtaagtgtacttaataccaatttcataaatctcataactcgtgaaaacttttattagtcgaaattgttctcacgtgcgcattttatactttcttacatatccatatatatatccccaacatggcaacatgcataatcagatagaactcacaacaccatcgtcgttctccacaaccctaattcgtggattcacaaccctacaattttgtctaatctctccttgagttccagtcaaaggtctaagatttcccatcctaatcattgcgtcaatgaatgctcgaaagaacacggacatgtcgctgctgtattggtttactaaagggatcgtatcggctcctggagtcgaaaagagttcctggtcactctgaataagacctttcccattacgaaggttggtgtagtattgactatcgaaagcatctggagtcacgacatcgaagttgaccagaacggtgccgtttccgttttgaggacacaatcgacggagttcgacaaggtaagttgggttcagacttgggtctggactgtttgtaccattgaagttgtagagacgaggcgtcacgaactggcattgtgctcttccaaatgtgtgaccacctaaaacgttttgacaaaacattaaggtttagataaatggaattagtgattttatttaaagataaacatgatttgtcgtttaccaactcagttaaaattgaaaaatcacgtgctagatgatttgtatttgattagattttctttctttttttcatttacattcggtcatgtttttcttaacagctatttggtcatgtattccaagaaaatgtttttctatctttaactcatgttaactaattcatataccttcaaaaactttctaataaataaatattgctaaaattcgaactcaaacattgtagaaaaataaaacccttaaatattataagacaatttcaaagctcaaaccaaatcatatctataagaaagaaaaaaaatacataaaaagtaaattttgtagatcactctaacaaaataatctaaaacattgagttaacattgtaattttattacttacaaattactatgtaaattctagacttagtctaggaatgtgtctgtctagcttagctagctatcaatatataaaaaggaattgcattttaaacacatgcatatcttaattagagttagatgatgtaacatgaatttttttaccggaaagagcaactagatcggaagtgcggtttaggccaacgtcagcaaaggctgttttaagttgagtaagattgaaaaacggagagggcagagctgtattagccagagcgaagaaagcttctacactgtctctcctccccaacggaaccggccaccatggacctcccgactatataaaacatagacttttaattgataacattttcgattagtttaataaaagatacgtcatgtatgtatatttatataccaaaagcactgatatttgagaggcgatggtgagaatatctgcacaagagactcttcctgggcaagctctctcaagggctactttcattctatctatgacattaaaccctcgagccgaatttgcgttcggagcagcatctttctcagtccggaatgatgtggaattgtcaagcaagatcgatgcatcacaaccctacaaaaaccatatattttacattaaaaaaaaaaaaggcttttagcaaattctatatgtaaatggtatataaagtagttttgtccattgaacacgttctgaattttttactaataaaagataagttgagaaaatccttacacgaacaaagcagtcgtgaaagtgaagacgaaggaggctcgcggcaatacgaggatcagtctgcagttcatcgacgatgatatttccaatgatatcaaaaacaaatgggcacgtcccgaagtagaaatcaggcctcaactgagcattagagtttgatgcttgaagcagaaggcaacccaaaattagggctccaatagcactgcaagaaaatgaaggagaaaaccccatatttgtaggaggaagacaaagattatttgagttgtgacttgtgagtgtgggtatatggtgaattagctaaagccaagaaggaacattatatagggaagcttgagtactatttttgattattaggtattgagtttttttttttttttttttcttttttcgttttaagactagtaggttttgttttaaggcaatatgtattttactagagtggttgaaggataataaaaattagtgaaatcataaattaaccgatccttttgacaatgctatctattatgtgcacataatttaacttattattgtgttttttcgcgcgctttaattaaacaattaagattttcatgttcacttcaattgtatatagtatttttcaaaactagctaactccatacatttttattgcagatgtagactttttacttactatgaatcgacgtatagttctatgaagagatggttctcaatttcgcctatacttctttctagatttatttcaagacatacatgactccttctgagaatagaatacgcatcattgagtttgataaataattataaacgacacaaatttcaaagtagtaagatagaaattgtacgaaattgatatcaaatttgaattcgtgtagggtcgctaaagatatggttgttgattcatgttaaacgtaagatatgtctatgtataatatcatcatgctgcgataaacatgtttttatcagtgacatgttcttgttgatgatagaattgttgagacgatacggtataaaaatatggacaaaaaaatatatgttaaatccgcgaacgccaacgtattctcagtttcaatgtccaactttatgttatatcgacgagtgcctttgacctgaattgtttttgtaaatcgtataagtcataataatgtaatattatgtgatcagtgattataaagtgtgttctattttaaccaatatttctttgattttattttcaaactagaaagcacttgtgttttgtccttccatttcccgtaaataacgcaaatgtagcctccgaagccaccttcactaatcgataaattataaacattttgctcaataatctctgagaaaacaaagttacctaatacatacaaatatcaatttcatacgagtccatatgctagactttttggttaacctaatctaatacttttgctccttgtcttttcttctcatcaataaactaactaagacaaccaaagtggacagaaatggctaaaactatcaccgaaattgaattgaaaactaattgtttcataaagtaggaatgcacataaaaggaaaagaaaaaacattcgaatgcattagtcattcctgaaaacaagatgaaagcgaagacaaaagagaaagaaacaaaatgaaaatattagtctaatggttggacaaaaagaagaaattaaaaaaacaaacaagaagatggacaaataattgacgacactctacatagctcactttattgtcaccttttaggtgagaaaaatcaaagtttaatcttctagataaaaaaactgtgtccggcacacattgttatcaagacttttttgtctcacctaaaagatgacaaatctgatgttttgggttcaaactcttaccaagtttttttttgcttgaacccttcatcattttattcttatgtgctatccatcgctcatgtatcgttgtcaccctcttctcgatggttgtcaagactggtttccctattaccggtaagctagagctcattttctaacatagcttcttccatggcaagaaagattggaacggaaataattttctgtttgtgataagaaaaaaaaaaaaacagtcacatggtaacgttttacaaaattctgtcagttaattgtgataaataacaacacgtcacttaaattgaataggcatgtgaagataaatatattgctttgtttttttttgatcactttttaacaatctgataaaatatcaaaacattcagatagttttagccgtttaaaggttattccttaatcccaatttaagaattgagattagcaattatatgatccaagaggggaaaagacgcgaaatttttgctaatttcaaatttaaattgagacaaaaaaaaaacatgactttctaacactgttcacgagacgaccgtggcgcgtgttccgacacgtctttatcaaaccagtttcaattcacaaacacaagactttggttcctccctaatctctctctctctctctttttcacttcactctcttcttccccatcgaagactcgtcttcttctgcttcaatggccgaatttccagaaccgggcactgtaaaccctgactcggatctatcgaatggtcgagctgagaagcctgagatagacacttcggctccgttcgagtcagtgagagaagcagccactcgtttcggcggttttggtttctggagaccttctctcaataaactcccagatgcttctcaggtttctttccctttctctatctccctcacttgcagtcttttctttaaattctctctgaaaaatatgatttagggttttactgttgttagattaagcgtgtttggctgttgttgtctgaaacaacaaaaagatatcatcaaactttgaaattgatgtttaatgatgtttggtttatgccttaaacgacattatgatgaagataatgatgatgacgatacttgatttccctttcatgtttagcatcaatgatgaagaaaacttaaacctcattttaaggaattgttcattacctacattttgcaacctgattcatcacatcagtgaagattttgtgttgtgtgtcatatattaaagtatcatagttgttcaaattaggatatgtaaggtaaagtttgtctttctgatattggtggcaggaaaatatccaagaacctgatatcatgggactcaaagcacaagctttcgagctacaaagagaactaattgttaaagaacgcgaaacgctagaggtgttgaaggagcttgaggcgactaaagccacagtcttaaagctgcagcagaggaatgaagcttatgaggaggacacgttgagagaagaagttgacagtcatatcaagccagcgggtgtggttctaaaggatttaagccaggcgaagatgaatttgtgcaagattgcaagtatacgcgaatctgtggagcagttgaagaataaactgaatgaggaaagagctgcacttgagaagacacgcgagagacttatggagaaatctctcaaggtgttttctttagaggaagaagaagtgagagtaagatttgccaaggagggtcaaaccggcgagaaagatcttggaatgttgaatgaggttcaaagattgagccgtcaagctcaagaggtgaagaaaaccggagagaatgcagagttggaagttgtgaaagcaatggctgagactgaaagcacaagagataagattagaacagctaagataaggttggtggctgctagaaagatgaaggaagcggccagagaggctgaggcggttgcaatcgcagagattgaggctgttactggaagtatgaatgttggtaaggccgaggctgtgactatctctgctgaagagtattctgtgcttgctcgtagtgctagagacgcagaggaagaggcgagaaagcgagtggaagatgcaatgtcgagagttgaagaagctaatgtttcaaagaaggatgttctgaagaaagttgacgaagcggctcaagaaattgaaaccagcaagagagtattggaggaagctgtggagagagttgacgctgcaaatgcttcgaagatcgaagcagaagaggcgctgcgaaaatggcggtcagagaatggacagaggagaagattatcttcttcggtgaacaacacttccaagttcaagagcagaagagagacaacaacacgtctgatggatgtaaacggtctgcatctgacatacgatgttgttgacgggtcatcatcttcttcaacggtcccagtcttgaaaccaacaatgtcaataggacaaatactgagcaagaagctacttcttgcagaggattcagatatgaatgttgctaatgagagaagaaaaatgtcgttgggtcagatgcttgcaaagaatagcagtagtgataaaactgtaagcaagagaagtgaagggaaagagaatgagaaaaggacgaagactcgaaagagaaagagtttcggatttgctaagatctctgtgttgttgaacaaagagagcaagaacaagaagaagaagaaaaagatagctttgaacttaaggtgatattttgaatctgttgatgacttctttctgttttgtacgtgaaccagtagtttaagaaaacaaagtgtatcatcaagtgctttattataatgctaatctaggctaattaatcccaatacgaccatattagcattgacagagaaacgaaacagagaagatgatgaagtatggaatttttcagtaacttaattctattacaaagcttcttttatactctgagagttaatatgtatacatagaacaatcagttaagagactaactaaatcatcatatgactcaagggactaacaaacttatcattttaaactgaggtagtatctaatatccaatgagacttggaacatgattaggaaacaatggttttgtaaacacatctcctagttaattctctcttcgtaagtgtagagccatgatcaaagtagcttggattcttcttctcacaatatgactttggtgcgttaatgaaacaatggattgttgttggcaatgtgtatagctgcagtagtagccacatatgatatagcattgacaaattgccaaaacacttgactctgcattcgcctctgttttggccaactctctgacacctctttaagccacaaaaccattgtagtagacaagagatttaaatgacttacatctcaagaaatcaacaagactgcctaatcaataacgcattgatcaaaactactgagactttccatcagcttttcattgaaagaaaacaaactgaaagatttgaataaaagagttaaaagagttcactcccaagtcccaatcaccaacctccatgtcccagaagacgccaatctcagccgcggcgaaatctcttgtggagccgggagcgagacatggttattggtgttctctgtgttgaagatgactcacccacctttgtgtaatcctctgtctcataaccatcatcgtttctgttattggttaactgaagtctccccttgaactgaagtacttgtccacttcttggtgaccagttgtgagatcccacgattgaagataggctttcctccatatgataggcttgtccaaagccacactgcagttacttgactaagaagcgattgtgataaatcatcatcatgagccaagttctcaggctgagctaagagaatattcccagtcctgcttttcatcataaacgaaagacacttgacgtacgagcagtcatctgtgattttgcttgagattaccatgagattagttggtatacgtgtccggtcaactgtccataacataagctcctccaaaaatcatagaatgtatccattaccttaataaatcttgattaaatagtaatataccgttatcggaaaaataaaattcaatataatagtttcattcacttttaaaattttggaaaaaatagatataaatataaaactctttaacatttatctccctaaaacacgagatttaacctaatatagatcataattaaatcaaataataataggaaaaccaaaaaggaaaagagtcacgtttattgtcggtgacccgtagcaacgaaagaaataggaaggtcaacaattttctcatacccgtatataaaacaaatctatctctccttccctctttaatttattaatcagatcttgcccaattcttcaatttcttcaaccctaattcttctctctttctcagatctaccaaacttgatctccaatggcttcctcagcaccaccagtcctcccaatctccaatccccaaaccgttccatccgccgctccttcctccgtcgaatctcaaccaccgatcgctactccagctttccgcaatttcatcaatcagatcaccgaaaccgttaaaaacggtctctctaagcgtcgtccttgggctgagctcgcggatcgttccgcattatccaaacctgagtcgatctccgacgctgctgttcgtatccgcaagaattactcgtatttcaaggttaattacctcaccgtcgctacagcgatcgtcggattctctctcgtcactcatcctttctctctcgtcttcctcctctgtctcctcgcgtcgtggctcttcctctacttgttccgtcccacggatcagccgatcgttctattcggtcgtacattctccgatcgtgagacgttagggtgtttgattttgttcagtatctttgtgatcttcctcaccgatgttggatctgttctggtttcggctatgatgattggtgttgcgttgatctgtgctcatggtgcttttagagctccggaagatcttttccttgatgagcaagagcctgctgctaccggattcctctctttcctcggtggtgccgcctcttcagccgcgcctgctgttatcgccgctcgcgtgtaaatgcgattccgatctaccattccctcgcctgggtaaatctttctatatgattcatttgttgaatttgatacttagattttgtttttttaatctgaaaacaataaacgtgaaaatgttgtggatctggcctaattttggttcttgttcatgggcaatagctatagatgaaatatatatctttgcatgattttgatttgatgaagttttactaccgttttgtgttaatctttagccttttttaatttacaagtgttgttttggaagatatggatttatttcatgatcaaattcaaaatgcaatggatctgtttattagaacttgtagccatcttttgatttgttatgtgactacattgcactgcgtgtatacaatcaaaagagtcaaatttggatgcatgtgcatgcaagatccatccaaatttcaccagttttcaaaagcacccatcataagacagacctggatcagagtcgtaggatttaacgaaaggaaattacttcctattgaggatgagcagcagaacaatatccacattacgcatttacgctacttgacttgacttgaaatcgtgggtcggagcaaatgcgatgcacaaataattcgatgagcagctttagtattgggcttcgtactcgagtccggcccagtataagctcatttacttcttttcgagtccagttcggcaaaggcccaatgtctatgaaatatcgaattggtggcgtataccctaagccaacaaggaagcttcgttttaaaaatgatttgttacttacctaaaattaatagtattgggtgacaatccaccttacattcttatctttttaagggttttagcttacggtataagtcaccaatttgacatcttccatcaacgaaaattagtaaattacaaaaaagtacaaagtcttagtcgcaaatatctctataaccaaaagcaaagcaatatcctaagttgtattgacctcggaaactagaatctccttgaacttgggatttgtcaatgccagtgacttagaaattgttctttgcgaaggcaaaagctacagtttgttagttggcgcgcaatttgagctgggaagagtccaatgagagtaccaaaagtctcggactaaacgtcttcaaaaaagtaaccatggaataataatttatttttatagtatagtttgaaacaaagaaaaaaagaaacacgtttgtcagaaaagtaataagtggaagatgtcaaattgctggcttgcaccgtaagccaaaaaaacactgaaaaagtaaaatttcaatttaaggtggattggtgcccaagacttacaatatctatttcttcacgatatttacgataattttcaaagtcttagccgcaaagaaatctataatgaccaaaacatattgaaaaacaaatcctagcataccagaatctgcctaaactgggaagtcaccacgtgtcttgtagccgtacatttaattgtcgtaagcaccacgcgtgttctcttagacggtatctagacatgtgttcccaccttaatttctgaaggctctggtgaattctaggacaatctatgcagacaaaaatttatagtttattgtttggttttatgttcgaaatttaatagtgattgtactgcgctccgtaatattttctacagtttgtacgtgttgtgtttttccaatggaaaaggaagataacggatcgaaacagagctcctctgcttctgttgtatcctcgagaagacgaagaagagtggttgagccagtggaagcgacgttacagagatgggaggaagaaggattggcgagagctcgtagggttcaagccaaaggttcgaagaaaggttgtatgagaggaaaaggtggaccagagaatcctgtttgtcggtttagaggtgttcgacaaagggtttgggggaaatgggttgctgagatacgtgaaccagtgagtcaccgtggtgcaaactctagtcgtagtaaacggctttggcttggcacgtttgctactgcagctgaagctgctttggcttacgacagagctgctagtgtcatgtacggaccctatgccaggttaaatttcccggaagatttgggtgggggaaggaagaaggacgaggaggcggaaagttcgggaggctattggttggaaactaacaaagccggtaatggcgtgattgaaacggaaggtggaaaagactatgtagtctacaatgaagacgctattgagcttggccatgacaagactcagaatcctatgactgataatgaaatagtgaacccagcagtgaaatcagaggaaggttacagctatgatcgattcaaattggataacggattgttgtataatgaacctcaaagctccagttatcaccagggaggtggattcgattcatattttgagtatttcagattctagcttaggatttatgctgcatcaatatactatgactatgagactatgttttttacattgttagtttactccattttcatttatcttaacttaagagtcacgcatcataccgcaaaaaacagtgatccgcttcattctggcttctctggagcagaccatagcattttccatggaccggttcttgtccccaatctgaaacatgacgcagtatccttttaagaaaaatttcggatgggttgaaaacttgaaactagaacggtctttttaattaattgtttacctccaggctccagcaaccaaccgcaacgccatgaagaggaacaaaccagtccagatcccggcaaggccaaacgttggtgcagccacaagcatgaacaaggaagatatgaatccgacaatcacctgttccaaaatgagaaataatcaactttttccaggtgaagaaaagggagaatcaaacgaccaattgatgaagaaggaaaagggaccatagaataagcggcaaatccgaagtcagagacaccataatagagcccatccaaaacaaacgctagagcattcaccggttgagatccagccacaaactgcatccagccaacattatttagatattgtctgagactacccttttcaaactctttctggattaaaagataagatcttactaaggtccctgacaaagcaatctttaaaacttctgaatccgttgtgaataagcttgaaaatggttcgaaagtgatgaacaatacagcagccaaaccagttccagttgctaaacctacctacttaaaagattgcaattgtacattataacatcgaatatatagggtaggatataaactagggatgtaatgaattatgaatacgaacttgaaggactccgaagagaacttcccgggcttgtttgtattctccttgagagtaagtggtggcaagaagactctgaaaatagaggtagaaaatataagtgaaaatcttctccccaaaaggtaatcttggatcatgctaatgggattcttatatcacagtaaatcttggtagagattgtctgtttcgaagatgatttgcaaaagatattagacctgtgcagcaatggctaaagcatcggtgagtaaagagacagccaaccagatttccaagacgatttgatggccagccatttgagtgggtccattttgagctgctaacgaagtagctaatgtgaatggcacaagcaaagccaccgttctaccaatgagaagcccacctaagcatgaatcaatacatttcatatagtagcctttctgaatcgtttaaagaaaacttgaaaattttaaggaattacctgatttgaggtactggttggctcttcccactttgatttgaggagagagcaaaactacattctcattcaacttccatagaagaataaatgcaatcaagtatctgaagaaacgttgacaagtgagaaacataagaagccacaaattaagatagatatgctttactagaaaacgagtctattaccacatttttggacatactcagaaatcacagtagcagccgcagcaccagagataccaaaaccaaggacaaatatcaggattggatccaataccgcattaagtacattccccgcaactgttgatatagagttcaccatattagaaacatgtatgtgaaactgctaatgcatatatacggtctagtgagctaatgcgcatatactatttatttcctcagatccattcatgcataaatacaaaaaaaatagatgattgtgcaatacttgccaacggcatatagaggcgttgttgtgtccttgaaacctcgaaaagctccttgcgcagccaatgcaacaacaattggtggtgcaccatacgctcgaagtctgaggaactgctctgctggtatccgcattggtgaatcctaaaaaaattacaaaccgagaaagaagagcgatcagctatacaaaacttcaaagataacagcttatataaaagaagttcaacgtgagcttagagacattacaaaaggtatagccatgacatccatcaagaaatcagacccgagagatagcgcaatggcctctgcaataccaactccagcagcaagaactaatgaagttgaaaccgaaggcagcactttcttgcctttaacaccaacaaataaacaacagattcaaagtaaagaaacaatctttgaagaaaacaataaaaacatttttcattataagctttaaggaaagtaaaatacttgtttctatagaatcattatcatccttagcagcaattgcttgctcctccgcaacaaacgatgttgtgacatttagtaaaggaacattgaagagcttcgacaccaaattgaatacagaaactgacactcctactgcagctaattccgcagaacctgtcacattacacatatgaatgttaaaaatgtgaactttcgaaaaatgtgaaattgttgaaaccaagcaaaaagtaagtatttaccaatatggccaacgaaggcagtgtcgacaagagatgttataggatcagcagctaaagctaatgcagcaggtaatgcaattgacattatctccattccaattttaccaatcctaaacccaaaaaaatcaaatacattagaaaccattcaaagttgaatacagaagaagcattattaggctaaggtacgaacccaggatccggtttgtgatcatgatccggtttattctgtgaagtcagaggattctgctgcttttccggtcgctgagaagaagtggagacggctggagattcatcgcgaggagatgatttacagacgattgttcttcgaatggatgaattagggtttccaaaacgtgacggcgatcgatggggagagaaacagaaggaggtagcgaccgccgccattgcggagaacgagagacggagaaaaatctcggcggaggaggaagaaagagagccacatgttgatgttcactctttttatctatctctactcactaactgattaaacggtcacatgtctaaactagctgtaccttatggatgggcctttaatgggctttttattgggcttttaaatagcttgtttgtttgttactttgttttttgtttttttttctgccaatgttacactttgtatctttaagatagcttcatcttttttctttgttgtgccgtgactctcatatgtaagtcatgagtttgattcgtgtattatcactcactttctcaatttagcaacaactcaaaagaaatatctctttctccagttatcttgtgacttggatttgcattttttttatacacttaaaattttgtttagttgttttttgaatggatccaaatttggattataggtccgcatattttgatttttgggagtatatttgaaatccgcatatctagtgttcaagaatcttgatatagaaagttgtaagatcatttgatatcctaaaactcagaattctttttttgggttcaaaagcaataactagttcttaagagcatatattgggaaaaaataaaaataaagatcaaggacgtgtttcatgattcagcagagttggtttttgttttgttttttgggttcaaaagcagagttggattttaatagataaagaaacatagagtacaagagtaaggcatagaattgaagtcagccaatttacatcgaaaattggagcgttagttaaaagaatttattgagagagttgcgacgccgtgcagcatcagcagagcagcctcacatgacttgcggtcccagcaaattacagaagaagaagacctatcctctctctttttgaacaacctgattatgcacgttgaaatacagtaacacgtctaacactagtatcatattaagtaaataatactaaatggaccatataactcttcattcaactttatcaataatgtaagtttgtaaggtattaattaaataccggggtttacttctcctatgattattttataacattagaattttgtagtagcattaggctgtattttgaaaagaaaaaacctttgtaatagcattactattttactcagtagttagaagatgtgttaggaacttgtatatgattggtcggatcgattactgattaaaccttaaaccgttgctcattggtcttttttataacaattcataatataacatatgaaagaatgaaatacatataatatatagcttgggaacgcgttctcctaaattccatacaacagtttgtcactaaaataccaaattagtaattctaaataccaaattatccattattgaccaatactggttatcatccattccaaatttagatatagacatacttagtggcacaggctgtatacaacagtttgtcactaaaattcattgtaaatggctactttctcctaaattcaatacaacgttttacgttgcaacctttgcaaaatataatgatttttacaacgaaaatgaatactacatatcccaacgttttgactatattataaatcccaatgtttgcagaaagtcactggactaccaagacaaactaaatagttatttagtttaaacaagcgagatgtataacttctatatacagagcaactatctttggttagaactccggaccataaatatattcgtactaaattggcaaagaaacaaacatgcatagaattcaaattagaaattaaatttccggtttcttgtattcgatctctttttcttgaatgttacataaattcatgcaattaacatattaataaggtctctgaagaagaaagtgaaaacgtagaagaagaatcaccaagaatatgcgaccaaaaaactcaccatgaagataacatacaagatactggaaaatttgcaaatgaacctactagaaaaaataaatgtaactgtgtatatgcatgttggtccacgtggttcatgcagagcatatctgttccccacttaccctgaccccaaccgcgagcactataaagtgagtaaatcctaaacaaatcttaaagaaaatgatactagtatatgtaacttttggttagtatgtaacatctccgattctactttaatgtaagaatattgtatataactgattggcgttcacccttttcagaataattggtttagaatgtttggaccgacattaattaactaattttaccaaaacggtaataagaacactaataattgtaattaattaataaaatacagatgaaacttacccgacggtggctgactgcaccggagaaagagactaaagatgagatctaatctgttctttcatgttttgttttagacaaaatactatagtttcttagtttaaacaaaagagatagaaaataagacacgtttataaaagatagcttaaatggacagtaaaaagaattgattctcaagtgattttaggcgttttgcctcggcctttttcattgtagtaagaagagccaatgaaactcaggatggatagcgccaaaaaatagataacgaatgtgatcatcatggcgctatccctcctgagctttacagattcttctctactttgtttttttgggttgtgacttagagaaagataaaaccgattatagagagatagtgaagctaaaaagatggaagtgaggaagaaggagaagagaaggtgctatttatagacgaacaaaactcgggttcgaaggaacacacgtcatctcctcttcgttaaacgtgaaattattcatttctatattttcttaccaaaatatatatctgatgactacctttttttcccccctataataatgtatttattaaatttcttagcttttttagtgtggaaagtattgatactatatagtccagatgtgatttattggatcccgttgattgtttgactttagtttcttcttctgaggccttttgattcacagaaatgaaggaagcttaattcaaaatacatgataatgcttttgttgacgaacaattatagatgcatctattataatatatgctatcagtttaacccggactttaattacgtatatgtatatatacacacattgcatatcctattgtgatttaaataaatatgtatttatataccacatattattaattatataccattggtccgatattcaaaatattcgaagaccaatgcttttttttttgtcggccgaagaccaatgcttatttgcaaactatgagacttcacaatatatattcgtggatttgaaagtataattttatattattttgttacgcggataaaattgatttctataattacacttacacaatactgaaaatttaattaattaaacagagttatattttcccgaccaaaattatatttttaggtgtatataaaatactagaggtccagaggtacaattcttacccaaataggtaaattcaggtaaataacggtgaagtttgttttttccatatatgttaacagaaaatgattaaactaatgaatgtcaagactttttagttcttactttatctttttagatggttgtttgtgtcattttcctgccgactacggtactagtcaagtaaaatatgtattcatatcaagagatatacgatgacattatttctaatcctgaagtatttacataattcatcctctttttttttcttttctgcagataaaacagagtttctaatttgactaaagttgtacggtcaatatatatgtgttttatactctagatgtgaaacaaaaaaattggttatagtccagctaacttacaaaattacctaagttataatggcttgtcgataaaagaactaacttacaaaatggcctaatttataatgattttgtcgaaagagctaacttacataatgactatattaaaaatattattttaattttacggaatatatatcttttcttgttttggtttaagattttgtaatattatagttaaaactgtaatcgatggcttgttgttttgtattagcctattaaggctattcaaataacactgcgtggttaagaaatgaggtaaaagttttcgtgggtttgaccgtttgagcctgatgtcaaaatgtcttggtcgctgaacttttttctttgttttcgttatacctggccttaaaatactagaataaaacagtcaggttggaatagatgatcagatttgagagataacaaattttattgtttaacggtgtattagattggatgcagcaaacatttgtatagctggtaagttttgattgcaattgaaagaatttatcaaaaacgaaaaaaaatattgttgtgttcatgcccaaagtttggatggttatgttatataggattttaactcttaaaaaaaaaaatatttgaattggttcttttcaaataatgattatgttcccctatagcgcatctaagctttgatgaataacattttttaagatacattttctcataaaagtgagtctgggtgttattagttaccatattcacatcaatctcacatcatgcggtgtggacaatgctttcaatagtgcgtcccatatatctcactttcatcactacatttttctcaaatttaaaattaattactgttcctaaaagaatacgatcaagagtttggccaccaaaatcaatgagggtttgggaactgaaatcaaaggattcattaccaaatagtttagcagtttctaaagtgttgataaactttccacacacacacaaattcgtttgataatctgaatattgagaaggaatcagatgaggagtcccctttccggagcaagatccatgtattcctaacttctaagtagctgaagaacgtccaaataaaagaaaacaaaaacacacacacaataataaataatcaattagatatatttatgtacatctccatatcttttactggctgagaatttacaaacattcagtctgacattaatttgggtcactctttcgttaggtcattatcataggcaacagccctctcaatcaatagcatgatacattaatgttaaaaagattttaaaaactcacataaatacatgaagatgaacgaatctaagttggagcgtacgtactatatattagtaatatatacatggaattctgtagtctctatcctctgccatctctacacagttgtgctctgatggggtgacatagaatttatgaatacggctttcttaaatatactaaatatttcattttgttagcatgttttgaatgcatgaatatagttagcttctgtgagatttagcctggtaaaaataattcgactttgatttattcaaaattttgacttacaagtgtatgttatacaaacaatgtatttaaaatgttaatttgtaatcatgtgtttgtttctttgaaaccatttaaaatcttatacagagccaagattcatagaatcagagtagtgggaagcctccatataaaaggaaccaatatacattcaaaagtattaattggctgaactttttatgcaaagacattcatctgacaaaattcaacctcatttgatcagcttttcgttaaaatggtcatcatccacacagtcctcaatcaatggggtctattgccaatttaccggtcagattttttttttttttttttttaaatgtaatgtgaagaacgagattcttcgaaaaatccaaagaaggatgattgaaatttaagtttctggttttagtaattcaagaaataatggaggaaattcggggaagaaatcaaaacaattattggagcgtcacttcagggcggctttatgattctgtatctgtcctgccaacttcccagtttctccgccttatactttgtgacacagaatttaacacacacagtttttcatgcaaatatttcttattttagttatcaactgaaaacatattcggtttaatttaacatatagttgaatgatatttgtgattaatgacaaaatgttgaatagtttagaaataaaacctttaaaatcatcatataaactaaaatacattctttttttttctatcaaccgatataaactaaaatacattcttaatcccaatttatcagaagcatgattcttaagtagttaacataaaagataaactcagtttgtatatgatcatgattatatcttgatacaaacacatattttaacgtatacacataggctgttatgcatttttcacatcatgcattgaaaagttaaaaattatttttcaactctagatagagtaaaacgcacagtttaaacataacaaaaaaaaaaaataccatttttaagattgatagattttcttggaaccatatccaaaacttgcagagcctattcaactatggcccaaaaccaaaaaaaaaaaaaactgttttgacccaaattaaggcattctaattgttgtcttttactctttttccaaactagatgtacacttgatacccctaacaaaaaggggtcaaaaaggtaacaattatgattatacaataaaaatctgttatgtaatttccaatttcaaatttaaccgattagagaagaaaacttaaacaacctcacctagcaattcattgaagaaatggcatattaagaaaaacatgttaatttttttgatagaaaagaagtgagagtaaggaaatcaactgtacaattgaagtggaataggtaaaaaaacaaaagatataatagtagttttcaactagaatgatggtcaagaatataagcataaaggagttcattccaaacatcaggaactccaggcaaacaccaatgtatacaatctgcgttactacttggattcgagatttcattttccttcactgttccccattgttttctgtagatcgaaggatgaccttcttttcgatactctgatagttgcgtaatgtttatcatctgcatgtttaatcctcgattttttagcccgtcaagcacattttctaagactctcatcatctttggatctgaccctcttccagtatatccttctttatctattagactagcttctccataacagttctgattaagtattcctccccattcttcagccctacatagatgtacttatgttaccttgttatcttgtgtaagaaaccaaataataccaatatgacaaactcattttgtcataagttgtgccgatcatatgcatcattataaaatattaggagaaataaaatatttatcggaaaaacgtaaagaatgaagatacgaatctatgagctagagggaaaaaaagaagatcaaaaaagcgttatcatgggtattgaaaagatcagttagagaaaggtacctttcatgggtgggagacatggacatgaagaaaagtttggtaatattggggttaacgtgaacctccaaccactgagacagtgtttgcaaagccatttcataaactctcaccatctccacttccttgtatattccatctaatttctcaaacgatccccaccttttatagatatttaattttttactcatctgttacatattgagtataattgagtttaacttcaagtaaaaaaacttacagtgacttgatatgaggcattctccaccataagtaagagttgaaaacaatgatatcagagttcgtccaatgccttgcatgtttttctattgattggatccgaactatccgatcggggaatctatggtttgtcgggtcgtccgagttggattccaccagcaaaggagcccaatagtagtctattgtagcattgtattcctgattatttatccacaaagacagtctcatatttattggagatcacgtttgaacattttattaaacgaatatcgttctaattattaaaggctttagtttatagaaatgttgaaagtttcttcaatataaaaaatttaaatttggattttgaacaaaagcactatttgcatgcagcttgcttgcatgttctaatgaatccacatgcatgcaccatcattcactttttttataaccgcccacttttcaaagaactaattgtaattgtgtgtgaattttatggaggacttacgagagctttgaacgtgatgaggttagagccattgttgtgcatatacatcgcctttgggtttgtaattaccgaactaaccatacacaccattgatacccattggcctctgttcagagagtctcctacgtacaccatcctcttatttcttagcctctccagcaacttcgttccattaaaccttattttttacattagaagatttcaatgacgataatattgttagaaattatggtaacaacaactaatcatgtggtatatttgttggtcgttactcgttagcccttaattctttctattccgaataataacggccggggcgatgatttgcataataataataataataaaaacaataacggcccaaattaggcccaaaacttgaaaatcacttcttctacttctttttttatttagttaattttattattattattttttggactagttctaacttctaaggaaatggcattagaaacaagaagaaaaaaaagtcttatgattatctatctaagtttcatcaatcgactgatatagaaccgtttatatatgaattgagatacatatatatgaagaaagaagaacgggaaagtatataagcagcggagataatgcgacatgtaacatctttatagtataaacttttatactaatggccatagatagagaaaggaaagacatatgtaaaaatgtgaaagtgaaaatgacaaagaaggaaaaaaacctgggaagatcacacgtgtgaggttgccacctccagaatttgtaactcagatctttcctcccaaacttctcacaagccaactggtcagacatgaacttgcaatcttcttctttataaagagggtatgatacgttatcaaatacccatttcccttcgaacaaattacattctctgccactgtcccctccgcgatccgtaacaccgtggctttgaggattttcctttggcaaactgtttctggacaaaaacacggcagtgaatattaatccggccacaagcacggcggcgatagtatgaaagctagttctaatacccagcatcaacagttgtcgctttgccattggttatgtgtctgttattgttgctgttatgatgttttgttttgggttatattgatgtgtctttctcttacttgccttttaactccagccttcttgaagttattttgttgtttggtggtcaatcaattttctgtagctgtctatatatacatttatgaatcattttcctaatataaattctaaaactttttgtgttgacagtttgccaagcaattgcccactacttgaaaaataatatttttcctaagttgattaatgattagagaggtaagctaattattcaagacaaaatcttaaaggcttaatttgaactctgagatttaactttgaatacttattgtgctttgtttgaaacatatacaaagtaggattctaatgttttggaaaattaagttactaaacattaattattaattcttgcgaaactattgtcgtcaaagtcactctaaaacattaattaacatgctcttggataagaagaaattcactcccaacaaaaaacaaaaacaaaaagtatgtccattgtgaatgcgatatattgaagttatttcgccaatagacgtgaaataaggtcgtgactctaggaaacaaagttatgtcaagactctatgagatagaaatccgacgctgcgtctataatctgaccgtaatcattcgacctgtagtttaatctgaccgtgatctcttgttaaatattatagcgattgtgtgtaaatatttgtctaggacttgcttagcaaataatcggtctttacaaaaaataattgagagaagtttgtattgtagccgtgtgtttcatgtcacgactcaagtgttttattggctcctaagttcgaccagcgttgtgtgattgtacattgtcgttctcagttgagtcaggaattgtatatgtatcgtcaactttaaagttgtcgaatagaagtagtggcctagtgggtcagacaaaactaagttgtttgttttggttatttaaataagattgtactttctcggtgtagtttcgtatctttcttggtttgcaagtgaaggcgactatcgattaatttggtgttaccgagaaacccccttggcattcttcataaagcataatagacatctgagaaaggtgtggccacagggggtcactatggtatttgcgagcgcccttttggattttcataatccaaatatggttagagatggtcaaataatataatatgtaaacgtaaggttaagttgttgacgtttccacattcatactattcgttgccttcaagttacctcaaaattcgattttccttgcttcgtagtttttgaaagtataattttatttcttgtttctatatgttctgtctttttttcttcttctatatgtttatatatttctataagtttttgttatagtagggggatagataaaactaataaaacattatatatcgtattattttataaaattattattttaatgtttttgacataatcaataaccaaatagtcgtgttaaaaaaaaaaaaatcaataatcaaatagtgaaccatttatctcattctatgacatgatacatctatttctatttgatagtttatgttttagtttgttaattgtagaaattcatcattttcttatattttttgttgtatagttttcaactatcttactctgaattagttagaattaagttttttttaacgaattgtattgaaagtttagaatagggatgacagacgggtcttcccgcgaccaaacacatttttgcccattttaatgatgaatttggttcataattgatttagatgcatatactggagactatcacatatggaaaccagtcacttgtatttttggttcaaatgtctttttggttgatatgtttctctaacacaattttgttctctctctaaaattctctcaattcactaagagtctcacaatctcacccattaatttacatatagttacatatgcaatttcttttatataaccatagtggagttgatgagaattaagttccattccggctcaccaactggttcgatatgcaacaatatcattggtgcgcaaaccttaaacaaatacataacttatgtgatctattttggactacatctaataaccttggaacgatatacacatagttaacacaatctttctcaaagaaggcattcacgaatcaaaaaaagttgtctaaaccttattaatgtgtcgtgtgtggcgtaaaagaaaataaaaatgcgtcgtgcatgcgtgaaattcatactattcatactattagttattacacgtaggttgggattgcgattcttagaaatgaccgggtccagttgggcatacaggcggatgctataggcccataaaaagaagttttaaacctttcttttggggggtttattttaagttacaaaactaatttcaaattttgttacattgtgttaggttaggtacgattgtctctatacgcttttgtggatagtatttcttgtacacaacttaacattagcagatcgatatttttacaagttaacttaccatctaaaagcatacattgcatgctttacgcgttataacaaatcaacaaatacaccaatgcagatttttcacatcgaaaacatgctgcaatcggtattttaaaagtcctataacacggatgactcaactccatgatacaaaaaagccatgtattaaaaaggctattggaaagattcttaaacaattcgtcaatacttatggccttggaccttccagatgatatttataacagaaaataaaaagaattatgaattagtacaaatgataaattaccttaacccgaccccaactacaattatggccatacgccgatgtaggtggttcggtctagaagcatcacatgaagcctctttatataacaagaagcgatatactaatatgtggcaacttgtgaattatattcatatacacttatattcgatttttatttttattttccttttctccaacgatcggaaatttgggcagaggtccaatcaaattataggaaacagtggcgtgatggatcgcaaaggcacatatactttcatttttatgttttgagaaataagaaaattcatcaatttgtaaatcacaattaatatgttttgcccaacttgcaaaaaaatcgcagctaccccacttccacttgcaccgccaactctttcccatcccttttttttgtttttacacctttcgtggccacattaagtatgtatcttatgaagttatgattagtaaagctatgctatatttgtcgatatttgacgaccacaaaaattagtaattgaaagttataacattttgtgtatttttatgctattcctattatcgactgaaaattttgtagtgatgatggttacgtaaccatagtggtgaacctcgataatgatattgcaaacatagaagtagaaggttttagatctaaggaaaatgaaatctttcatttcatacgattcatgttttgtcgatcaatcacatatctttttgtggatagaagtgtagaaacctctcgaatatattgaaaaaaacacatttatataattatattctaagagatcacttggaaacgaaacatatcgtgactctcgtgatgtaaaaggacatgcaacttgcgcttctctctattccatatttctttattattatacgaaatttaatattatatcttttggattgggaagaaccataaagaaaggaagtaaaagataaaaaaaattgcaacttgcattttctttatatcaagcgggaaaaaaaaagaagaagagaacagcttggcttgttgggttatcattcaaagcatcgtccacttgcaaatttttatttctttaaattcatcaacatgttcgttttttattttttatattttgacggccatgttcatatttttgtatacatgtatgttttgtccattttacgcaattacctttaagcctgaaaatccccaactactccctattttctaccaaatagtttatgatgacaaataaaaacttcaaatcttgaattctctatcaaatgtttgatttttaaataacaacttcacgctcaatcggttattttaattattatgaaataataagaaagtaaaaagtttgaggacctagttaaatcatagaggaaaggaacacattatattatgcccaaatttaaagttgcctttaagaaaaatcgtcgaatttcacaaaagctgtttatacgtacgtaaatttatctacacacattagatggccaacaactcaatgtaacgagttaatatacatccgagtcgaacatcatattgtaccatttcatttacgctttttctgatgaaactatagaaaaacaagattaattaaacttgaaaatcacacttttaattagcggacaacacaaccacattctttcagtttgaatattattatctttgggtggtgaaagccggaatagggctatccaaatcggttctttatgggatatgtaaaatacaaaaattaaaagaaggattatgatatgcatgagagattaattcactaatgtaacttttttttcacacataagccgaaaaaacatagatcacacgacggctaaaaatctagaaaacgacgtcggatctaacgaaactacccgacaacgacaaagactcatcacagagacatcttcttcttgctctcagccgcagtattctcggctattttcgcaagagattgaagattgcatcgtacgataacgtcaacgaagtcacaagtctcttcctttgtgttgcctggaggaacatcaacgacgtaagactcgacaacgacggtcccggagatcggagaagggtgaagggtcgttacggatcggtagttagagagccggtggtcaccaccaacaacgctgaagctgatgacgtggcgttcgtcgtcgaggatatcgagtctctcggtggagctagcggcggggagaccagagacgacgtggacttgacggaggctaccaacgttatcgccgtctccgccgatgacgctacagcttttgagaaagtgtttgtaagcttgtgggttatcaaagcggcgtacgacggaccaaacggtggagattggagcggagatctcttgaataacggcggagcaacactgattaggaccaacctcgtgtgtgtgaaaacgagcggccgtggagtcgcgtgagagagaaggaaaacgtttttgaaacgacgcgatcatcatcggaatctgaacggaatctccgtctgatacggcggaagaaggacggtgaacggcaagcatgttgatctgagtaatggtgtcttcttgatttcaaatcttgatctcttctttgagatggtattagggcttagaaaaaaaactgaggattgaagaggaaagtgtatggaggagaagtatgtgtgtatataaaaagaagcaaatcaaactttacagcgacttgcgaaaagttgggctgtgcctttcgatttgagagagatagagtttttaatgcagagttcatgtgagtggtgataacgaaaaaaccgagcaagttgcttgttgtgaaattacggttttgccccttgctatagttgttgacttgactgttttctatacacgatatttttaattgggcaagtgaccaatatataattctcgtatatcaacactagaattataatatgggtttagacttttagtttcttgaccataacttttttctcttcttcttgaaatgaccaaggtatatctaggacgagattcgtttgattgaatacgctttaagagtttcgatatttggaacgattggaatgtaagatcaaattcatcaaaacatacaaagtgagaattctttcaacttagaagttcttcaattgttatttcatagtatggctagatatatgagttttcaattgcatatatctagccatactatatatatgagttttcaattgcaaaaaaaaaaaaggttttcaattgcatcagatgcaaatctagatatttgaagtattcaacatcagagccgaataccacaaaactaaaagtggtacaaccatatatttaattacctgagagatttgatgaacaagcagaaggaggaactttttgaatgaaaagtattgtattgcttttgctttgatatgatcttcaatatacaaaaaaaggagcacacaaacaaaagggcatgaaaaaccaatcctcactaagaaacacattttaaactatacaaactaaggcccaaattgtttttagaaccaaacttttaattgggccgtattttggaaagaaaaactggtctatcacaacatacttttgttgtttggtttggttacgttggctatagtatctagcttcgttataggttgtctcttcttctacattgtaactagtattatagatttctattattctctaggatattagagtttacctaaagatgtggagttggctgatcagacacaacaaaacgttcgaagatatatttttgttgccgtcgaggaattcaatttcgaggttggggaagaatgtgtcgtctgccttgaagaatatagcgagtctagacatccattggccaagttggaatgccgtcaccggttccattttagctgcataataatataaacacaaaacatttacttgatgctctgttttcaagcattctgtcttgtttctttacattcataactctgggttttcaaacctttaacaactccggacatggacacaaaccccatcttaatgataagtcataatacaatgctattagttctttataattgctgtaaattttgaatataaatttttttgataagaatagattaatattgtgtattgagcttcacacacatcttaatatataaagcaaaattaattcagtttttgttaacttaaaattatcataaaaatcaaaaactcgcacaaaggacgggttctaatatagttgatatatatgttttacatcttttcttgctaacattctactaatatctatatatctacataaaagtactagagagaattacctgcaagtgagatttgagatatacacagatgagtgtataatatggtcagcgggtcaggatatgtaacttttgtttgattatgggtttgaaaatgtgcaaatagacagacattacttcaactaattgagaataatgttggatccgtatttgtaggaataaaaaataactgttaattagaggttgacttcacagttcacaagtcgggttcgggtgtacaagaatcttgtcaggtcacacctaactcttatgatcgtctcttagttttttttttctttttttttcacaggcttaatggacccttttgtctaatttgatggcatatctcacaaaccatccagttccatgtttttataaacatgctttttaaacctttaaaatgaaggacacaaattaggattctcggtgcaaaattgcatgtggacgtgtagaagcagaaggaagatggaaattaagtgtaaagaagaaaggagtggtgacgagaagcttgtgaaggatcgatggcaagtctctttacacgtggggggaatgacaaagttcttcttttttctacttcatcaaagcttacaatttcctctcctcaacaactttttttgttttttttggtagggaacaactttttttgtttggctagcagaattttatttactaactggaaaatatgaacttaagcctatagtttaatctcatgaactcataatctccatttaattctgcaacgaagttttattggatggcatgtacccgaatctatagtagatatatacaactggaaaacagtattgtatattgttttcgtgatgcaccaaaaacttatgattgaaatttacgtagaaataaaacagtacaatttgttagacatgttaatagaactgatcttgtgagtgctcatatttcttggaattccaagaggacttcgaaagcataattggatctaaaatatattatatcataagcatatatacgtgagaatgtatttatcttattgttttcataatagaagtggtaaaggtaaatattcaaactaattgtcgaaatatgcggaagaggtagtattcaatggcttacgatgactaaaatcgtaattacaaaaatcaccataaactcgtctaaaaagactttctttgcaattaaaattaaaccatataggacttcgatttatacggtgtcaaattttataactatgtatgttaatattacatatttttggaacgaacgatgtaaaaaaacggctcaactaacaacgctattcatcgcttcacggggtcggatgtgtaacgtaaaccaagcaaggaccactttacacataaactaattctctcatacgaatctacaaaaatacatataaagataatatataattttggggtaagagaggagcattgtcccgtgattctcgtcgaacaaaaaacagaaaaagaaagaaagaaagaggtatgtgtgatgatgtggtctacatcaaagacagctgagcagtcacacgccttgtaatcgtaatttattcgtctatctaccactctcgctcttccattttttgcctttagcattcaattccacgcaaaaccctaaacctcataatctcatcaaaaagttttaaagataaatatatatgaatctacccattaatcaatatattagttagtattgtgatttatcactttctaaatactaaaaagtactcagaagattagaaggttgattttaaaaataaattttctaactaatttgatcgctatatcaatagaaatgagaggatttaaaatccatcaagtatagttcacttcgataaattaatattttgtataaattgattcatgtcacgtactggatcttttaaatcgttgaggatcaaaaattattttgcaacaaaaagaaaaacagaaggaaaagaaagtttagttaacattaattttaaaccaaatgtcttaagaaaaagacaatgatctcgatcatcaatgatcctaattccgacaaaactactctgaggtatattataattttgtgaattcgattttgtatttaattatttttcctggaaactgcatcacggtatcaaaaaatttaaaattcttcatttttttgttttcttctaaactcaaataacgtctcaactatactaatatctttcttattttcttataattattaattttttttttttttttttttttgttgttgttgtaaatagtcttacttatactaactaattcattcatagactgttagtcccgatacatgaattttatctatatcgatctttgtaatcgaaatgtttgtttgacgaactaaggcaatctaagactactaagaatatgctatatatagagcctaatttctatcacactcatcttagcctttggtgaacaataatatagaataagtgttacttgtaatttgttggcatgttaagggtataaacaacaatttatctcatttataggagtaatagttttctccctccatggttgatattaatatgcatccacatattaaaatatacaactatttatatatagagctgtctatagtagaaaagggccgaaatcaattagctgtgaacagaaaagaaaactttttaacatatgcaacaagatttaggtgagggtttgtctacatgttccgggaagagagagagagagaatcagaagtgtatcttgatctagggttcacagacaaaatctccatgctttgaactaagcagaattcatctggtcttttatctctttcatatcaaaccaaaggattgatctatccatatcgtccaaaacctatatctagctaagcctagaacttctctatcgtttaccactttctttctatatttcttctgaatttgtaacatcagaagtaataatgattccaagtatggagggaggcgggaagactaacagagaagaagaggaggaggaagaggaagaagaagaagaaggtgaagagagtaaggtttcaagcaatagtacagtggaagagagcgacaagaagactaaggttaggccttatgtgagatctaaagtccctcgactccggtggactcctgatcttcatcttcgctttgtccgcgccgttgagaggcttggaggtcaagaaagtacgtccatagctactaacttcatctttcatcacctcctccacatatatataaaagcataagcaatttcttagttattcttaggttaactatttggtcaaaacctcatgtgattttcttttttttaatgtgtatgtttggttatgtataggagcaactccaaagttggttcgtcagatgatgaacatcaaagggcttagtattgctcatgtcaagagccatctacaggtatttgatctacatacatctaaaacgtacctatatatgtgttgtattttcgatttcgtttcaaataatctctgaaattagaaaaaaaaagaaatcactaaattgtgtattggaaaattttagatgtacagaagcaagaagatagatgatcaaggtcaaggtattgattctttctatttgtgttcattagttagttatcaagttatacatgtataggccaataaagtggggtttgaattgttggcagctatagctggtcacaaacatctcttcgagacttccacagatcgaaatatttataaactaagtcagctaccgatgttccgaggctataatcataaccatgattctccattcaggttgatataacttttttttttgaaaattttagattttatgtgttccttaatttgaatgatattccgttttaattatatttattcggaaactaaattaattgtcttcttttgtttttggtagatatggaagtaaaatttcaaatgcttctttgtggaactctagctctcaaggaacagaaaggagtttgatagaccaaattaggcccggtttaatccgcaacgcgtcggttagcaataacatccgtggtagtgattattggactaacaacaagtctttccaaaacatctactcttcttcaatttctaatcactttccgaaactacgacacgatcatcacgaacggaccaattcagtcacattcaacagcattcaaggacactcaagaacttttcaaaagttccataacggtgttgaggagaacactaatcattcttattgtagcaagacaaatggcaaaagagacgcaagtaggagcattgatcttgatctatctcttaagctaagacaaccggagaagacaattttggaagagacagaaacagcagcaacaacaacggatcaaacgttgtccttgtcgctatgtccagggtcgtcttcgtggaaaaagagccgactgatgaaagatgaagaggatcggacggttaagattggtcaggagagtactctggatctgactctatgaattatatttaagaatgagacaaattctaagtgagatcttgaggtacttaccgatatcttaatattcagtgtcgttgttgtttatcattaatcatgtattttctttattattagaaaggaaacaaaaatgtttgattatattaacggtcttgagtttgtttgataccgccaatttgtatcatcacatatataaacaaatattactagccacatcataatgattcgatcttttgtcttctcatagcaatatactatatgaaaattacatatacatataacaacaaatttacatcgattagagtatctctgctggtgagcttcattcatttgtagatgagacttttacgtaaatagtacaaaaattttggtttcgtatttatccgaacagtacatggacaattttgtagttccaaaacatgttatagttaatagtagtgttttcaataatttccaaaatccatcttcactcatttttcccttttcagagacatagtgaaacaattttacactatgcaaatccgaagccaattatttttgaggtttttactatatgtgaacaagattaatacttaaacaacaagacacacctcgttctttgtaaatattaaagaggttaaagatcataatacaaaaaaaaacatagaaaaagttcacaaatcatcaaatcttttgagttcattattctatataaaattttatctcgtgaaatgtttattgtataaggatgtgattagttgcaaaccaaaaattaatgtttaatagtatttgatagggaacttatttcaactgtgtaaaattttcccggtaaaattttcgttcaatcagtcgattctaagaacatgaatcttattgaatctctaataatttattgtataatatggtggcacctatacgtcaatacgataatgacgtcgttaatagtaacgttgagagttgagactgttgtataattttgattcgacgtgccaaatactacgttcgaccaagtatcaattttgattttccaaaaagaaaaaacaagaaacttaggatctccgttagtttgattggatacactgatactgtttcgatatttagacaaacaaatggaatctttgcttcttaaacattcgatgcgtgtgtgtacctggtcaacttcttcagacttcattatcaaacatggccgcacgatcagttttattttgctactggagaattaacttatccacctcagaatctaaactaatttctgaaactatataagtgttttttggggctaaaaataagatgcatgaagtgaaagtatcctagtggttaaaaaggggtgtaaacataacgtttaatgttgtatccctttatatgtacctctaatgtccctctttatttacttttaatgatttttaagactaaatatcttcagttgaagtaggtaatctttttgccaaattagtcttcgcaatacacggatcgatttccttataagatattaaatttaactcattcaaaaaatattaaatttgcaatgacttataagataaataaaaaccaaggtccatatcttatcccaatttgttttttttttttgtataccaaatttgtctcctatattgtttttatatgtttatattctttctcctagtaatttacacaaagaatttaagaagcttcattgaaatatcaagactagaattgaagaatgagaaacatatctatcaaacctcgaagacttttctccatcaaaatgtgcaaacaaaacaccaaacccaacttgtgtcttgtctattctacacacattattataattaaaggctttcacacctacacaaaaaaaattcgtaccattgactataaacatcacaaacccaacaaaaatttcatcaactccgggaaagatagaataacaaaatggccggagcttacgatccaagcttgccggaggttcctgaatggctcaacaaaggagacaacgcgtggcagctcacggcagcgactctggttggtctacagagtatgccaggtcttgttatcctctatgcctccatcgtcaagaagaaatgggctgtgaattcagcttttatggctctttacgctttcgccgccgttcttctctgttgggttctcctctgttacaaaatggcttttggagaagagcttttgccgttttggggcaaaggtggtccagctttcgaccaaggataccttaagggacaagcaaaggtcttgaatttggttatgcacacaaagtgttcgataaaatgcctgaatgagaatttgatttgatatttttttcttacagatcccaaatagtaatgtggcggcgccgtattttccgatggcgacgttggtgtattttcagttcacattcgcggcgataacgacgatacttgtggcgggatctgtgttggggaggatgaatattaaagcatggatggcttttgtgccattgtggttgatctttagctacacagttggagcttatagtatatggggaggtgggtttctgtatcagtggggagttattgattattccggcggttatgttattcatctctcctccggtgttgccggtttcgtcgctgcttactgggtacgtttattacataaaatattcaagttcagagtttctttagtttgttagaggttagtttatttagttagggaaactattaaattctcaggctattgtttgatatttgggtattattactagaaatataatgaaagattgaagaagatgtttgtttgttgaaaatattggaattaattaatgtacggtagtcggtagatgacatagtctcaaaaaaaattcttaagaaataattcgatgtagactggtctttaattgccaagttttgttttgctttctctttcggtatgattacgtatttaaggtccatagtttatagataagtagtaagttctatgattgtttggtccactaacaaaaggttactaatttccaagtactaagattaattaaatcaaatcaattttggatttgacaacacgatcttgatctatattgtattagcaaattagataatttagttagaggagagtaatcgaataaagtaacgctccaatattgatcacactcaactgaaatatctatttttgcctaatagtaaattcacaaaataattgaggttgattccatttttgcattttatatcttatagatatgtatacactaattaatttgtttttcttgtattctgcattttgtcgcacataagcaaaatggtaaaagtcaagtcaattccactgacgacgacataatattccacatagtaaatatataaaatcatgcaaaagaaaatgaaattaaatggttagttaaaaagcaaacactagctagttgagaaatacgattttctgacatgatgttattataggtaggaccaaggcctaaggctgacagagagagattcccaccgaacaatgttcttctaatgcttgctggagctggacttttatggatgggatggtccggttttaacggtggtgctccttacgcggccaacttaacctcctctatcgccgtgttaaacaccaacctctcggccgccacaagcctccttgtatggactacacttgatgtcatcttctttggcaaaccttctgtcatcggagcaattcaaggcatggttactggcttagccggcgtcactcccggagcaggtttcagtcatcttcttttcaagttttttgtttactctaagtctctaagtttatttatgattaaggttgaattatgtggaaacttattaatattgcattgttaatttattatactgacaaataagatatctattgcaggtttgatccaaacatgggcagctataataattggagtagtctcaggaacagctccatgggcctctatgatgatcattcacaagaaatccgctctccttcaaaaggtaatttagatcataaatcccattttaatttcataaccaacaaaaaaaaaaaaaaaatgttttaccttattagaaaaacgaaaatgtttcaattgtagaattaaggtattagtaataacaaacgaatgatttgaactgtaatattttgattgggttgaaataaacaggtggatgatacattagcggtgttttacacacacgccgtggctggtttacttggtggaataatgacagggttgtttgcacaccctgatctctgcgttttggtacttcctctcccagcgaccagaggagctttctacggtggcaatggcggcaaacagcttttgaaacagttggctggagctgccttcattgccgtctggaatgtggtgtcgactactatcattctactcgctattagggtgttcataccattgagaatggctgaggaagagctcgggattggagacgacgcagcacatggggaagaagctt

SEQ ID NO: 346 - DNA, 107541 bp, Arabidopsis thaliana
aagcttcctcctaggtttagttctcttcatcatcatcatctctggtccaagattcttgagatgttcttgcccaaaccgagtttcaggttggagattggaagaagactcgattgttagacaagtcttcttcctctgaaccatctttccttttttttgctttgcctcaagaccaagctattgtttgtttagagcagaagaaaatgggaagatttcaatagtggtggtagggtaaaaagatgcgtgtgcggttttgtctcggtgccttttgtaaactttacgtgaatttggttcaaacttaaaacaaatgaaagatttgaataacttttgtgatttggacaagcactactgatattgtggtgggtgggtctacttctcttttattattgtggccattttttaagggatgattaattattgcttcttcgtgttacacgaaattatgatcttttgtcttttctctctcaatcttttttttttaggctcctttcttatcccataaattaacaacgacgaatctcaattttttttgttattgtgaaccgacaaagtactacttttttttttttaaagttttggtttagtccacaaaggtgtgtcaagacaaatataatatgacatttcttttctcacacatatattgctttctatagagattatttgattgtgttagattcaaccatggactaaacatatcttagtttcgttgcaaactcataatctctcaaagacagaataaatcgcaattgatttatagaacgaaatcgcacaagaaagactgatgaaacatattcgaaaagaacatactagctagtttgattggatcataagccattaagcctagatcaaattctgttcaaaaatccactatcagagaaggtttgttacatctcaaatttcatgaacagcaagcaagaatcgagagagattaggctcaatgaactcttggatacaacatagaagaagtataagtgaagaacagagtatttatacactgtttatctgttatcagatgtaacaacaaaccctctgacttgttcaaagtttttttttttttttttttactttgctctcctttgaattgaagccctctcctctacttcaagtcttcttcaccaattcctcttaaatcgcagataaccagctcaggtgtataccagaccgatattgattaaatacaatggttacactagttttctaataaatgaatgtataatgcttttaattgaaagtgaaactgaaacaaaaggttataatacgaacattatcaccatatttggggtgtagagtactttcaataaacctattttgttttatcaggtttaatgttcttcagtagagttttaattgaatgtgaatttcttgaatactatatgatcgttcgtttaagtgtttaataatgttgtcacaaatccaaaattataaaaatacatgcaactttatgaatttgattacataataattatagagtttcgaaatacaagttagttatccgtgtaaactttatcttccagaacttgagctatcagaagcagataagtctccgccgttatgaatatactaatgtaatttacatgcaatctttacttcttctacacgttatgaaaaatgtgtaatgtatgcacttatctccgaagttgcagcttctcccaagaaactactcaaaatggtgacaattacatacactgtcgcttcatgattggccggaaacaaataaaaatcaaatgctttggacccatctagtcttcgttgaagaagtcgtgacaacgtcgtgttgacaagtcgggaacaagcaaaaaatcttatctttctccccattattttgcttccaaatcttcatttctttttatatctaaacatatttttgcttccttcttcagatcttgaaacatactctaaacaatacaaaacaaaagaaacaaaagataccctgctcaaaagatttggccaacttctttcttgctgttgtgattgtgaaaattatgtctatggggaagaaacatcttaacatcaattctcagaatcaccaatccacaaaggacgaagacaacaattgcaagaacagtctcttctttggattgtttgacgaccctgaatctaaaaggttgagaagtgggagtatgaagagacagtacagcgacatgggagatagctaccacagagtttatgacgaacaaaatgatgatgttgaatatgatggtgatggtgatggtgatgaggatgagggatcaaggatggacatgagagtactgatggtattagagtatatgagagagctttacgtgggacaacttcagctgcttaaaaagatgtttccaggtgcagctaaagacgagtttcttggtttcttcaacaaaatcggagacgctgtgtcccaaattaaacaagattctcgtcctcctacaaagtcaatgactatgcggaggagtctcagtgctggttcgccacgtttcacttcgaaaggggttaatttgggtccatcagatctaagacatgaaaggtttaaagttacaatggttaatgctggtggagctgctggttctgcgggaggaggtaaaggtggctcggcagctggtcagggtcagaccaagaagtagtcaagatttgtgacatgtggtgtggccatggatgatcaaatcttatgactcctcagggtttagcattgcacaagccgttactatttgctacacggaatgaaatgtgtaaagtgtggttaagacttttgagtcaacttggggattccaagttttaaagatggatttcaatttctttattcaatcatttcctagtggggtttgttttatgttttagtatctatagagatgaagtatcagactcatccaaaggtagaagaaactaggatcaactagctttgtttatttattctctttggtgtttgattctctgattctgttatgttctttcaattaataaaagaagctttgtgttattaatccttaactgtaataaaatgaattaattcataatatatacaacacttacatgtaagaaattgacaagaatttgtgtcttcagtgtgtataccctctctgtgcagctacaatgaagaccattagaatcggagaagcaagaagaatcacatataggagtgtctcatttatccccatttcctctccttctttttcctcctgcgctttgtaattcgttttatcttcaacaaaggcttcaaagtagtcctgataaccagtgtttccttcagcaaagctcgaccccttaaccttcagcatctccattgcctataagtgtataaagaaaaaccctcacatttttcagggaaaacaatttcttaagccaactctttttatcattagacacacaataagcaaacaaaaagagttgaattggctcttgtccgatcatagtcaaatatagagcaaactcaactcatctgcttgttgtgctttgttggtataatacttttgtgggtgtttgacttacctgaaaactgaacatgaactgcctcgctttcttgctcactcccgggtttggatgggaaataagcttctcatacatgcgccttgctttgtctgtcctgtcaatcactcccaaaatacgattttaacgcacaagatcccataaggccaatactcaacaagactacttttgaggatattttagaacattcacgaatgaggcatcaccttggtaggtataaactagtattttgtgtttttctttggggacttttggagcttgatagagttttgggactacggtttacaaatacaaatatatactcatgaagaaatacttgtcatcctgtagttgcatcaagcgaaattaggagagaaaaacttactttcgaagtgaatcctgacaaatagaccactgcaaagccgctagtccatgaagctcactctgcacaactaaactcggaactagttaaggtcacatctactacagcgaacataagaactttaggtgatctaggtggatcaatcgattaagatttcgataaagtgacacccaacaaagcaagaaactaattaatgcaaaataatcaggtccttaagttacttttactgattatgtggttggctgttatataagcttgttgaatttttgctccacatacatactgatgggtagatccgtagataataaacaagttttcatgttgtcaaaacgagtaaggcatatgtagaaaaggtatgagtagactaatgcataaacgtagacatgagtataagatgaataataaaccagatttgcagaaattaccttgaaaactattttctccatgaccttttcatagtatggcaaagcttccttgagtttcccagaatccataagcgagttcccctcgtctattgcctgttataattgaagtatcacaatcaagagaagaagtgaatgatgagcaaaacgattctagctaccttgaaacacagataggagccgacatgcctgtagataaagcacataaccttttctagttcttctcctttcaaatcaatttttcaactttctagaaaatgtggcaacgtgcaaatctcatattaaataagagaatctgcttgagtaaacatgagtccatatcacagtttcagctgaacccatatcattgctctatatgatctataaataagattctaaagacagcgactagaaattcttaagatatagcttgaagcattctcattgagagcaaaattattctgtaaatgagattgttttgcaatattacttcaaaattaacttcagcatcaggtctgccctcagaaaagttgtaagaacaaaaatgtatttggagtaccttctcacactcaagtttgagtttgggatcaatgttcagtccgagtgattccttgtaggctatgagcaatttttttgtcttttcttctctcacaatcctctcttcagcggtctcaactgaatcccccggtcggagtgtccttccaccaccaaacttaaacaagaaaagtatatatctcaatcctcattacttgagaccatagatgccagcaggaaaatatacactccaaaaccatcgaagttaagagctgatggttatagccaacaatccaaaatgtggaaaatacaaccaacaaatcatttttgatgcatcatatttcacagtagactaaatggtatgcgaactaaataataaacccatgaaacctttctggcactcctacctctaataatctggagtaagtggctctatataccctaacttaacaacattggacatgcaacttcttccctcttgggggtttatgaaaaaaactaatccagttgcataacacatatctttagatgggccagtcacataccgtcttagagatgttgctaggtcttgggaaaactccccatgtagaaactttgggtttatacacatcagagtttccatctccttcttgctcaacctcctttactttctccgcaaatcttgttttatcaccaacaataaactccacctcaggtaagtctccttcaggaagatagtcaacaacaggaacaagtcccgctggaagccccctcgtgctcttcttatcagcaaagccaagccccatgaaatcaatgctggagactttcaattctttcttcttaacatcattatcttcaacaaccttatttgctaatctaacgaaactttgatctgtattacctgaaacccatgagaacaattctccattaatacagctaaaaatcaaggctttactcctaaatctaatcaaaaaccaatcttttcaaggaacaggccacgaaaaacacatgaatgatgtactaaagactattagaaaagtgcattgatctacaaactcaagcaaagacagttacaagaattttgtgcaaaagatgattttttactgaactgggtttagcttttgcgacagcatcagttccaagtcctttccttttcttataatcattggctttttgcatagcagccttaacagagagcggcaattcctcgtcgccggcatttttctctggttttttttgctctgatttcgatttcttataagcttcggctttcttcaatgcgagcttcaccggatccacatcgagctcaacctctgacgagcggtccggtgaggacgagttgctccgagttcggaaaagtgagagtttcaaggattttgggtgttgagatggagaaaaaaagaaagcgggagtttcggtgagtggagaagagagccaagagtggttgaaagaagccatggtttggtggagagaagagctggttagccatttttggagtgcaatgttttcacagacttgtggactcgtggatgcaacatcaccacccatccatttcatcattggtcttggtcactagagcgcataaacagttcgttttattcggtttatattcggtttagattgatcaattatgattcgaattcgtttattttggctcagttcaatttttttttatgcacactcatatttaagttgttttattttaaatcaaaatactaatttaaaagaatgtaaagttttatgttatccgattgcataaatttggttttagtttggtttatttggtacaaattactgtttaatgttttttaatcataagaaattcagttttggttcgattcggtttacttggcttttgctcaccattatttatttatattaattttactcttaagattatttctagttccagtccagactaaaatacttctagcccaatatcggcccaagtccagctgtaattaaactagcatcactcgggtcgggtcgagtcggtcgtaaccgccttttatctttgacgtcgtcgatgaaactctcacctccgcttaagccctaaaaatcttactcttcttcactctaaatcccttctctgaacctcttcgtttgctgtatgtgttgatttcacttctctctgagcaagaagctttcgcgtgagagaatgacgaaggtctatggaactggcacgtacgacttcaagcgccacagagtggcggagtatccattggagttacctagccatcctgctgagaagcctctagagtcaaagcctggatctaatttgccgagctccatcactttatcggagattcagcaagataggttaacgaaaatcgctgaggagagctggattaagactggaggtaagctccctgagaaaccgttcgatccggaggttgtgaaggagatttatgtgacggagcttaaggtaactagtggtcgtaaacctgttccacttcagcgagttatgattctggaagtgagtcagtatttggagaactatctatggccgaattttgatcctgagactgctacgttcgagcatgttatgtctatgattcttatgattaacgagaaggtaactaatcttgctctctttcgtattggactgttggagctgtaaacagtggagtttaacattgctacatgctttgtagttccgggagaatgtggcagcttggatttgctttcatgatcgggatgatctattcaaaaagtttctacagaaggttcttcgccttaaagaggtttgtattctacctgttgttttagtttttgtgattctagtgttgttcctgtttgtgataatttggtttgtacctgtgatttataacattgtcttatgcctggaattgacttcgctatatatttggaggcatagtgataaatcataattagccattgctaaaccaatcgtatatttatatatcatttgcttaccattgtagggaagagacttgactattgctgagaagacaaactatttggtcttcatgattaatgctttccaggtttgttccgtttcttgcatgtaacttttgaataggtcgtaagtatttagaatgctgttgcgcctgtttcagatcagaaaattaatacatgatatagtaagcagtaattgcagacaatatagctgtgtgctactcagtaaattgtttgtttcacgtggaaaaccttattattcatgtttgtacacaaattatatccttgtgctattttgtttttcttcaatattcttaactgtgtgatgttacagagtttggaagacgcagtggttaatgagattgttctaagtctagcaggattacaatcttggcacagcttgtcttatggacgtttccaggtgggtgtttccttcacatggattttgttaaggatggtgaaaatattttgtagttgctctgatatcgtcattgatttttacaactgtagatggagctctgccttcaacctgatctaattaaaaagtggaagaggtcatcaaagaaatgggcagctgaggcaaagtcaaagggagagaaatttgatttatcctcatcccctgaagcaaattttgttcgaggcctaatagaagaattcgttgaggtatatagcctgtttttattgggttgtagtggtctatgttcgtcaaatatatctttcgcatagttacgcataattcataacattctgttcaggtgcttgatcatggggtttttgcggatgaggttgatgatactgctggatctcaattggtcgatgattcttctgtcttatattgtgagagattcatggaatttcttattgacatgctgaaccaacttccaacaagaaggtattaatatttccctccagggcctctatgcaagttttttgtagactaaaatatctagggtttttttttgttcctaataatatctaggtcttagtcttgttacgcttcctcattctacactgtccatttctgagccattcatttactggaccttaatttttcctttctccatctcttcatcttgattattacagatacctaagacctcttgtggcggatatagcagttgttgccaaatgtcgactgagtgccctatacaaacatgaaaaagggaagcttttcgcccaactagttgacttgttacagttctacgaaaagtttgagataaaggatcatgatggaacacaattaactgatgatgaagcacttcaatttcattacgatcgttttatggcgtttcagctacttgcctttaagaaaatacctaaggtattgtcctggtaatcatggttaattaatagataggtagttttgtgtactaggtatttttgttatgttactattggattttgaagtcattgatctactctcttccttattttctaatattttttggcaaacgcttctctagattctcacatttgtttttatctggtttgcttcagttgcaagatctgtctttggctaacattggttcgattcacaagagttctgatcttcggaggagattgtctgtgctttctcttgaagatttaagggatgttgtctgctcaaaggtatatatctggaaagcatattcttgtaggttcacaaactctgcatgggaattcaggatatgattatggaatattgctgaggcaattctatgatgatcatatcttttctgccagtttcattatgctaaggctcttatagttgtgagctttcagtgaatattattggcaaaatgcttagcaaaatcagaatacaaagtctaagttgacatgctaaaagatctatgggttgacacaaatgtagacgttatgtatctacttgtttgaattccctttaggccattacagtagtacgcagagtagtgtgagaaatcagtgaagagatgtatttgtgcctgtggagagtagaaaggagatatgtaaactgtatttgcctcttgctgttgctaattttagttttcgttaaaatatacttttgttgccttagaagttcacgtacaacaattatacaccttgccacctacattggttctcattttcatttgcttttgtgcagctcaaactggtttcaagacatgatccttgggcagatagtaaagattttctgactgaagtcgttgtctcctcttttgagaagcaacagtctcagaaagaagcaataaacgctctgcctttgtacccaaatgagcaaatcatgtgggacgaaagtgttattccaagcattaattattctggggaaggttgccttgctcttccaaagcttaatcttcagtttctaacactccatgattatctccttagaaacttcaacctcttccgtctagaatccacctatgagattcgtgaagatatacaagaagctgtaccacatcttcttgcacatataaataacgagggagacactgcttttcgtggttggtcacgaatggcggttcctattaatgatttcaaaatcgctcaggtgaaacagcctaatattggagaagagaagccttcatctgtgacagcagaagttactttcagtatcaagagttacagaacgcagataagatctgaatggaattcccttaaagagcatgacgtgttgtttttgctttgtatacgcccttcatttgagccattaggtcctgaggaagctgataaagctacagttccacagaggctcgggcttcagtatgttcgtggttgtgaaatcatcgatatccgcgatgaggagggtaatctgatgaatgattttactggaagagttaaacgggatgaatggaagcccccaaaaggtgaaatgaggactgtgactgtcgctttagatgctgcacagtatcatatagatgttacagacatcgctgaaaaaggtgctgaggatgtgtatggcacatttaatgtgctaatgaggaggaaaccaaaagagaacaacttcaaggctattctggaatctatcagagatcttatgaacgaatattgtattgtgccggagtggttgcataatgtttttcttgggtatggcaacccttctgctgcacagtggcctaatatgccaaacctgttggaaatagtggacttcaaagacactttccttaatgcaaatcatctcagtgaaagtttttcagattatgaggttagtacctatattcttttgtatatgatgtgatctagaagactagaactagttcctttccatgtctctaataatttgtgcatattaggtttctttcatcaatgctgaaggtgctgaagctctggatccaagtcctccgtttcgaatcactcttccaaagacactaaaaggaaatggtgctatttctggaaacaagatatctgaagtgaatccagcagataatgttaatatggtggatgcttccccgaaggagaaacttattgttgaggcatataccccacctgacccagggccttatcctcaggaccagccgaagcagaactcagttaaatttacacctacacaggtactacttatttctacatcctaagtgcagtatgctgatttggtttttatataattgtgctgtgctatacttgtcaacttttcgtcattcttgctatttgttttggaagatgacaaatttattatcttagaatccttcctacttttacagaagagttatgtcatacgagaatactattcatcatctttatgtcgccttattgtgttgggtacctgacacttataacccatgtaaaattttgcacctgttatttccatcgtaacgtaaatcatttggtcattgatcgatttgagtggtcaatactgttcccacatcattctgttttatttgaagaaagttttacctaatgttcaaatcactttctccctcatggtggtttggatgagaatgagaaaatataccaaaacatttggtatggattcaaaatatggatcattgttgcaagttgtaactaaaccatgtccatgcctactattttcctgcaggttggagcaattatctctggtattcagcctgggctaactatggtggttggtccaccaggtaccggaaagactgatacagcagtgcaaattttgaatgttctataccacaactgtccttctcagaggacattgataatcactcattcaaatcaggctttgaatgatctttttgagaagataatggaggtactattggcatcttcgttgcttttgttatttatatggagtcatatttaatgttttatgtttgacggagttctgagagtcaaatgctacatggatcttttttcagagggatgtaccagcgcggtatctacttcgtttgggtcaaggtgaacaagagcttgccactgatcttgactttagcagacaaggccgtgtcaatgccatgcttgttcggcgtctggaactcctcagtgaggttgagagactagcaagatctcttcagcttccagaggatgtaggatatacttgtgaaacagctggatatttctggttgcttcatgtatactcgcgttgggagctgtttctcgcagcttgtgcaggaaatgaagacaatcaatcttttgtgcgagatcgcttcccgttcaaagatttcttctcagacacccctaaacctgtttttaatggggagtcatttgagaaagacatgagggcagctaaaggttgtttctctcatctcaagactgtgttccaagagctagaagagtgtagggcctttgaactactcaagtcaactgctgatagagcaaattatctgatgaccaaacaagcaaagattgtagcaatgacgtgtactcatgctgcattaaagaggagagattttcttcagttagggttcaaatatgataacttattgatggaagaaagtgctcagattttggaaattgagactttcataccaatgctgcttcagaggcaagaagatggtcatgcacgactcaagcgctgtatattgattggtgatcaccaccagctgcctcccgtggtgaagaatatggctttccagaaatatagtcacatggatcagagtttgtttacgaggtttgttcgtcttggtattccttatattgagctcaatgctcaaggaagagccaggccaagtttagccaaactctacaactggagatacagagatttaggagacctttccattgttaaggaagcacccatcttccaaagagcaaatgctggattctcatatgaatatcagttggtgaatgtgcctgattatgaggggagaggagaatcaacaccatctccttggttttatcaaaatcagggagaagctgaatatatcgtcagtgtctatatatacatgagattgttaggatatcctgcgaataagatatcaatattgacaacatataatggtcagaagctcttaatccgtgatgttatcaaccgacgatgtgttccgtatcctttcattggcccgccgagcaaggtaaaatatcctgctcaaagttgtttttgttagttgctgatatggtatggattgtattgagagctacctgtataaataaatttcggtttggtttcgatctaggcatttaggtttcgattttggttttttggtatgcaatacccccctaagaaagttatcacagagttagttttgtgttttgactgttctaattttatttcctcaggtgactacagtggacaagttccaaggacaacagaatgatttcatattgctctctcttgtacggacacgcttcgtaggtcatctacgtgatgtaagaaggttggtagttgcaatgtcacgtgctcggctcggtttgtatgtgttctgccgccgttcgctctttgaacaatgctatgagctgcaaccaacgtttcaacttcttcttcaaagacccgatcggctcggactcaattttaatgagaacacagcatatacagatcgtgtggtggaggaagttgaaaattcttatctcgttcatgatgttgaagagatggcacacatagttgacgacaggatgaacaagttctaccaggtaatgacacaatctgcttgcttggataactgataactaagctttcttgtttagttggaaactgatttgtttcatgcattggttaggcacaaggagcttatgagcaataccaaaacaacatggcacagatggaagatggtaatcacgacatggagagtgattcagtagtagatggtgatgaatctgaaaaaaatatgcagcagctaaaccaatctccagacatagacggtgaattatcgaaggaggtggttggaatggaggtggacaataatggatttagcagtgagaatggaaaggctgatgagaagaattaggacaaaacaaactgggaatttcaaagttatcctttcgggagggtgataagtgagttgatgtttgaaacatggattttttttgctactgtaagataattttactgcatttgagtaaattctggtaagtgatacatgacatgaggaaaaaaatagcattgtctgaccttcctcaccgactttttgtaacttctagttgagtattcaagcttgtttatccttcttctttggtatctgatttcaaagtaatatgagacaatattatccatgaaagtagtaatgttaagtaacttgaaaggaagtcgagacagagctgggattcactccacacataggtctgtcttaaatcctccaaaacaagcttgagccagtcagagaggatagtcgttacacaaaagggtataccagtcttttacattcgcttagccgtttcacttcaaatacaagaataaagcaaagcagaggtgatgatgatctgtgtgagccgtattttactcgtgtcttttttttttttttaacgaattttgaaaacaaaattaaacatagatttgctttgattcaaaaatgcaagaatcaagagaaatttgattattttttaaacaattcaaactggagttggaatacaatgtattgattgattatacaagtcacaagcaaagccaagaatataacaactgacaaagaaacgaaagaacgatcagattttggatccaagtaaggtgataatgaagtccttgtagtctccagaaatatcaccagtaatagcattgtccatgcttgtattatacatgttgaaatactctcctcttactttcatcaaatcgatctctgcacgcgtcacaatcgccctcgtcaacgaatcctcatctgttccaaaaccctcaatcgaatctcttaccacctgccaaattaaaacacaaaaacttaaggaacaaacaaaacaccttcaaaatactttttgactctagtcttgctcaaatgtttagtgtagtacctttgcaaagtgtttctcaggagtatcaatacaaaagattgccaccttcaatagacttctcagatcagcatctcctggacatccatcaacatcctgtccatacaacacaacatgttataatccaagaaaagaaaaccaaacacatgagaccaaagtcaccaaaccaaaccatgagaatctgaaccttatcaattgtgaccccataattcttcttgtaagcaacaaaagtttctctgagctgatagatactacgcgttcctaatatgtacaggacatggtcatgatctaattgtttcttctctatggcttcacgtagcatagccgcctcaatagtagctacttctgcatcagtcctatctttgtcatatctgaatgtacttgccaatgtcaccagtaactgcaatttcatacaatcaacattttgagcttctcataaggcaaacaaaaccaaaaaaatgtcttatctaatcttgaagaaaggactgacctttgcaagaggaaaaggcagagaagaagcaatgtgttcttcaagagaagagtcaaagagtgaacaataagctttcctcacagcaatcaaatggtttggggaagtcgtgcaagagatctctactataaccttcaaattctctaagcttttcttcttcttctccttgttcaaaatcttgttcacaagccttgcgtctctctctgctggatcatacgtccacgaaaccacagctttctgcaattcaatcaaatcacatctttttagaaaaaatctcaagtcgtgattgagaaatgttagagaaataattaccatgaaatcaccagacagttcggaggatagaacatcgataagatctttgccataaatctctctaaaactttctctaatcttccttctctggctctggtctctttgccctaaaactcgtataatcgccttctcatctgttccccatcctacaagaatgagaaaactttcattcagagatttatgtcttaatgcatcgaatcacacaacaaatgcttgcggctatggatgtaacgtaccgcgaatagcttgtttgagagtttcagaatcctgagctggagaaggaacttcgtttggtactctaatggtggccattttcgagagaatctctctgtttcttcgtctctctctctctctctcttcttttgttttcaatttagagccgttttagttttttttcctcaaggcggagttatttacttaggaggtgtaattatgtagctggggatggtgtttgacataaatgcccccgaagacgaaactgtaatatgacgcaattagcctatttctgtcgagatttttcgttttgaggacatttaaaattagggtcatatattagttgtgtgtattgatgagttctatggagcatcttttctcctaacctattttcatatcctacatactatgtaataatttccaattaacacaaaataaccttttcatatttttactttttgtaaggttgcaaacttgcaatgaaataaatgatattacaacaggactaaaaacaacgtacaatggttttaatgaggaatttaacttgtaccgtatttaatttaagataaaataaaatgtatgatatttcatatagtactaaaaataaactaaggtagcaaataaatggacaaataaataaatggttttgatgacgaagttaacaatgtctttatataaataaatatataggttatatagtagttgattacgaaaagacaagaagaactaacaaaaagagatttcttttttttttggtaggctaaactaacaaaaagagattacaaaacttataatataatttgatatatttttaatacttaaaacctaaatataaagttatgatttagtcaactgtctaagttgtgacatgtgcgaaatagaaataccatttaagattaggaacatgatgggatgatcttatgagtgaagtctaagtataaccaaatcaaatcaaataaataaatagattgcgatttgcaaatgatacggctcaacacagctgtcctcgatccaaattattgctagtcctctcgtcgtgtaaaacgtgatcttttcttttttaaaataatcatactctagaattttttgatccttcgatggaaaattcgtgtgtagtagattaaaaactgatcactctaatgtaaacaaatgtgaatcgaccctggcgcgaaagtactggaatctacacgtaagttgattaatgattcacactttcttaatgccaataagtgagtatctcgtaatcttgtaaactttttaaaattttaatgagtgagttatctcgtgattaatattcaaattatattcttcagtatcgatcgtgtcatgtatggataattggatatacgcaagtcttatgacacacaataaaatatgaggaaatttgacgtaagggttatatgctggcggcatttgagctgtggaaaattgaactatatatgaggaacatgctaattaaacagcttcagcggaagttgtgcaaaacacgttttgatgtataaatcgcttatactaattctcatatactatataaatcgggtcttaattggttgaccaaattatattttggttaagcgacacatgtagtggttgtacaatcttctcaaatctcattgtcagattcagatagatattcagcaatatataatctataaaaaaacatgtgatagtacttgttgaatatatatatatatatatatatatatatattatagaagcttaattattagtctcacaagtcacaataatgcgaaacaaatgtgattgaggcttgccatctactacaattgtgtgcataatttatgaaatgggacagtctggacataatgagaagaaaaaaaacagagaagaagagataagctgtctcctttgcccatgatattcaaaccattatttttctgtaataggtccatgtgtgtttcgcagtaacaaaaaaaaaaccttgttcttggcaccaaagactatctatttcgtagatattatctttatatatgttttaagattcagtgagattagttgcctttaatattgacaaattcagatttgagctattcgacacatggatcttaattttgatatatgatcatatcctaaaccatcacttgaatcactttggtttatgttctttgcatctaattttgagaacctatattctgaaaacgtaatttctccaaataactttttcactttcttaattttctttagaaagtataatattctttactgtttcttttacataattctttactattttattttatactaaagaaactttcatttgtcagactctacttcttgttgtaattttcctacttttcgaaaactgtaaaagaaaataaactcttcttcttatctgtgttcaagaacctccgttttggattatagatatgaatgatgacacttaagtacaacttttatagtggtcaaacttaataaattccacttaagacaaagaaaaacagtaagtgttaatttgtcttgaacttactgaagtatgtaaattccgtttgcgtaaaacagttgttaacatatgcaattaattgcgtgggcgttactccttgttacaacaatgcccctagcatttgtcttaaatcttgtattgaatacctaaaacacccttctcttctcccataaaccacaacattacccttaatcatcatataaaacgtcttgtccctcttccatagatttccacagaaaccaaaccaagagccggaaatcaaaaacagtaataaaagatcaactgcaagaaaatggctcttcctctcgagctcgaaagcctcactgaagccatctcagctggtaattgtaatatttaattcttgattttattatggttcttggaagatacaaagaatgatttggatttgagattgaaaatctaaaaaatgtatgtttgttgtttatagggatgggaatgggagttgatgagaatgcattgataagcacactggggaaatcgcaaaaggaacatagaaaattgtttaggaaagcaagcaaaagtttctttgttgaagatgaggaaagagcttttgagaaatgtcatgatcacttcgtcagacacctcaagcttgagttctcccgcttcaatgtcagttcttttcttccattaatcttctttccatttttaacattttctaaatgtttttaccaaataaaaaatctttattttggggtcaaacctaataataaatggaaccattcttgtttttacctaataaaagtataaacccaaccatatgttacaatttaatacaaaaaactaaaacaattctaaaattgcttaatttggttaatgtaattaatacagaaactatataacaaaaataattattacagctggtttattttttctttatgaattagtatttataaaggatctcaaacatttctttaaaaataaaccaataatttactgctcaaaaaatcacagaagatgatacgatggaaatgatgaagtttttcattcataactaattggtcaatgagtagataaaattcacattctatttcaaaaatagttgacaatgagtgaaaaagtcacattctagtattgaaacgtatctccacttcagatatggaattttaagaacaatttggtgtgtgatgtgtagactgcggtggtgatgtgggcaatgcatccatgggagagagatgcaaggttggtgaagaaagctttgaagaaaggagaagaagcttacaacctcatcgttgaggtctcatgcacacgctctgctgaggatctcctcggtgcacgtaaagcttaccactctctcttcgaccaatcaatggaagaagacattgcctctcacgtccacggtcctcagcgcaaggtcaatatttttatatactctagtgtgttggtctctttcaaacttcttttatctcactcattgtctctgttttttgtgcagttgcttgtggggctcgtgagtgcttatagatacgaaggaaataaggtgaaggatgattctgccaaatccgatgctaagattctagccgaagcagtggcttcttcaggcgaagaagccgtggagaaggatgaggttgttaggattttgaccacaagaagcaaacttcatctccaacatctctacaaacactttaacgaaatcaaaggctctgatcttcttggggtaacataaatataacaacaactcacttcttgtatatactaatgttttgatattctctaatgaaaatcttgtggtttaatttggtcattagggtgtatctaagtcttctcttctcaatgaagcattgatttgtttgctcaaaccggctctgtatttcagcaaggtatatatgaaccatattcttcattgcggttgttttataacgccaatttctgcgtttgtgtttatgttttgtcgtgatttggttttagattttggatgcgtctctgaacaaagacgcagacaagactaccaagaaatggttgacaagagtgttcgttacaagagcagatcatagtgatgagatgaatgagatcaaagaagagtacaataacctttatggtgagactttggctcaaagaatccaagagaagataaaagggaactacagagatttcttgctcacacttctctccaaatccgattgatttcgtgttgagaaacctattaccaatacttttggttattgaagatttatgatttccctttttatggttttatgtttctaattcctaaatttgcgttttctctaccgtttggtaataaagacatgaaaatttgatgaactcggtgaatcgagagtaagagttttgcgattgtgacaatgagtgattaatacaaggattaagctccaataaaaaaatgttgcataaatcagaaatgaaacttgtaactcttcttttctttatgtgaaacttgtaactctatttgaaagattctatgtgaccactaaaccgaattacggattccaaccgaatttcacctctaactaaaccggttgaatgttgatgaattccggtttgaaatttcggcagtatgtgggtgacacgtggcgaagaatagtccccgaatcttcctctgacgaccatttgatacttttttttcttcagtttgttggttttgtcctcttaacaaaatattcttcaaactctctctgttgtttgtttgttgacaaatctctcaaaaccatttgttttgcaatcgcagatccgtttttcttcgggtctcatcacaatgaatggcttctctgatcttaatccttctgagaggtacgctttgtctgatcatcaatgatgcttataataatctcatttatacatgatcttgcctctatatatttgttcatcttagtaatcttcggtctcagcttccattttcgtctcccactatgtttctaggattttgtgttacttttgttagaaaactgcgatttttgtgctagtgtttgtttctccaagatcaatggaactcgttgcctaaaattcctgattatagttacataaacatcaaatggttctaattggtctttgatcttaaacccatttgattatggtatctaaagtttgatccttttgatgcactctcatcgcagtttctcgtgattttaatattattgaactcttttgatttgtggtgaagcaaaccttctctgtcacaactagctccattagaagccattctgtttgatgttgatggaacactctgtgactcagatcccatccaccttattgccttccaagaactgcttcaagaggttccttgctttttttaatgtcattataacttccaaatttacaacaagactttagaaaactgtgaataatatgctatggaaccttgctattactcagtttcaagctctcgtgtcaatcaattttgtttctttctatcattcgcagattggttttaacaatggtgtcccaatcgatgagaaattctttgttgagaacattgctggaaaacacaattctgaaattgctctacttctgttccctgatgatgtttcaagagggttaaaattctgtgatgaaaaggaagctctttaccgcaagtaagctatttttctgtgtttcctccattcttttaatgtcacaaactcttttcaggtctgagttcatttggagtaactttgttttgttcttttttcttgatgattagaattgttgcagagaagataaagccacttgatgggcttataaaactgaccaaatggatcgaagatcgtggattgaaacgagctgcggtaacaaacgctccaaaagaaaacgcagagctcatgatatcgaaacttggtctgactgatttctttcaagcagtgattcttggctctgaatgtgaatttcccaaaccacaccctggaccttacttgaaggctcttgaagtgcttaacgtgtcaaaggagcacacgctagttttcgaagactcgatctctgggataaaagctggagttgcagctggaatgccagtgattggactgactacagggaatccagcaagcctgcttatgcaagcaaaacccgcttttctcatcgagaactatgcggatccaaaactgtgggctgtgttggaagaacttgataacaagtcttaagtctcacttgtttggcttatggaaacccacacatgcatgagcagcctctgaagtttaccttatgtcttagatgatcattgttgaataattcattgggagtttatgacaatgggagctttcaaatatctgattattttgtattgatacatgcacaatgctagatttgtatccaggagatagttgcataaaccaatatactataccctcggatcttagcttattttcattgatatcttgttgttttgtgctgtaaacatatcagcttttgaatacatttggtccatggcgcaaaataagactttttttttttttttaccataccttaattagcaaagtaacaaaattgttagttttgaaaaatactcttaattaaataaaggaaataaacacttgccgacagccaaaaaaaaaaggttatgaacaaattgaaagtattgttttcatcaaagcccaaatatgtaaagcccaaaaacggaaaacatctttatttcaacaatacatatattaaggcgtaggaaaaactaataagagaggaaaagagaagaaggagcaaaaaggttttgccgaagttgagagatcaatcaaagatttgaagttccgatgaattcaggaggtggaatcgttgctgcagcagctccttcaagcggcggtggtaatgttgaatggcatgtccgaccaccgaaccctaaaaacccagttgtcttcttcgacgtctctattggtggtatccccgccggtcgtatcaagatggagctcttcgccgacattgctcccaaaaccgctgaaaacttcaggcagttctgtactggtgaactcaggtactcgattctgtttctttttaatgtttactccattcgattctctatcttcgttcctgcatcttattcgtttgaggttgaatttacgatttagtatttgaaatttagcgtcttctcaagaggttttagagctttttttttggattcatatagttttgagcttgctgcttcgtttatgcttcagtctacagattgaattgtttatgcctaactattgaactttgctagcttaagcggatagatacaatacaatggtttggactaattgagtattttttggttcttaatctaatcttctttcacgttttggttgcctttggtgcaatttcagaaaagctggaaagccgcttggttacaaagaatgtcagtttcacagagtcatcaaagattttatggttcaaagtggtgattttcttaaggtcagtaccctttacttcttataaatcctcacttcttgattgcttatgttggttctcaattggcactggcttttagttctcttgtttgtgtgttcttggttcgttacttaaatctcttcttactgcattatctaatttgtgcagaatgatggtagtggatgcatgtcaatctacggccacaagtttgaggatgagaattttactgctaaacatactggaccaggattgctctccatggtatgtaatttgctttatgaatctgagttataaatttgtgtaacttgaatcagcccccttgtgattttctttatccatgagtctctattattactcatgactttgatcactaatattatggttctcattcttttgttgtaggcaaatagtgggccaaacacaaatgggtgccaggtaatttcagtctcattatatttgtacttctgtaatgagacaaattgacacaaaaatgtagataacgaaagcattgagcatttgatgccttcaggttatcatttaggctataattattaatcgcctttgctttttgcattgcagttcttcatcacttgtgcaaaatgcgattggcttgacaacaagcatgttgtctttggggtacgttctctttaagctatttaattttcttatgcatatgaccggtaatagtattgatatatgactcattgcaatttcttcttttgattttgatgtacagagagtgcttggagatggtttgttggttatgcggaagattgagaacgtggctattggacccaataaccggcctaaacttgcggttgtaattactgagtgtggggagatgtgaaatgttttcgaatgttatgagagcccatagcttattagttttaaacttaggcattgtgacagaagccaaatcccattgtgggttatctaaaatgtcaacttcttacggcttacaaatactacagttgaggctatctatggccgttatgattgtattttaacaaaagctatttgtcagatcatgttactttcatttttaaagcagcaataacttgatggtctaatgactgaagcaaagcctctaaggctctagtaatgtgactggagcaaagcctctaaggctctagtaatgtgactggatatcaatacctgtgagtgaaatgagccactttatattaatatctgtagaacttcattagcaatggaagcataatcccaaaaagaaacacattagaagtctcagctcattaacatgtaaatgtagcttatgtaaagattctaaaccgtcaaaaccttccttttttgatttatctatcatcaatcgtctttctgaagagcaacatagttcaatggtatcaccgcattgcctctataatctttgccaccagaagtaacagaacgtccaggtgtatttccaatgcgccgaccaatgggagttttagtcacattgtctgtgttaagactctgtcccaatggcttcttctttgcagacttggaaccatactttgcttctttctctgtagcaagctgaccttgtagtcgtttctgctcctgtttatgcaaaagaggggaattttttttgttttgttagagctcaacaacacactgatcgtctacaaatgtatgtttctctgttttctaagacatactcggaattgacgcttttcctcttctctttgagcacggataacaatgtcatcttctagtgtttgtaataacggttgctggaatacaaggcataaatcatatacgtagaacataaaagaggattaagtaaatgcatagttagaattaccttatcgcataagaaggggacccctctttctttctcccaggccttcactttcgtggtcagaacatccaccattgcttagaaaagagaacacaagagagttaaatcatcataaggctgatcagttttccaacatatattgcataaagatcaactaagttttcaggatgattaagcatcacaaaaatgtctcaataaacttcactagatttggataaagcacagctagctactacattcacattctatttactcgaacaagtgcaaagaaaaacatcataaattctcaacaacttacaatgagtggtcgagttttcgcagtaatcaatgatcgagttagagaatttgaacaactgtttaggcgaaaaaagaagagcccaaaatttcttgttgaactgcttaaaaactaggtttgcatatcaagagaaatagaaatcttggcttataaaggaacgtggattattgaaactaatctaaaggagtatcaattaccgagtatagtttccagacagcatcattgtgaaatcagactcacttgcattaaccaagtaatgcaactaaagactcaccaggaattttgctgataaggctcctagctttttctgcccgttttagatttttgtgtgctcctctcacagcactgaagcgattttcatcctgataagaaacataattgaagagacaattaagaatacatacaaaaaagctagtctgtaggaagttcacaaaaaaaatgatactctctaacattaaagccataagaaagtagacacgcttaaaagaaaaagtgttctctaatagttatagactgtggttaaccttagacttagacaactctatatttttatcagatcaattggtcacaagtagtcttctcttgacctatcttcagaaaagacaactctatattttatcaggtaaactggtattcaccttttcataatcatcaagccatgtttcttcctcctttgcgtgtctccacttatcaactttgtccaatatttcctttctgcttaaagcttcttctcttgccttctcgatctgaccatctatgcttgcaagaatatcagacagatcaccatcacctgcgcatgaaaacgtgttgatgactgcacacgtgatgataggtctcttttgaaccatattttaatcgcatcagtaacttaacaatatgtgaaacagtgtagatatgccatgaagcatcttagttaaaaatcaaaaagaaaaaacattgaggcaaacttaacacatgaaatgaaatggatatgaaatgctacagaatagtcaaagagggaagtaacaaccagcaacattagataagataatcttatttggtatgagaaagtcaatatcttgaaggagagggaaccatttttaggacagaagatgattaataaggaatagaaggtaagagcaaaaatatgaatcttttatgcttgagcttcagacctccattaaatttacatagattttccatcatgctcttactaaggcgtacacacagtatacgtttggaagccaaggaaaagcacaaaagtacactgccaaactgaactactaaattaattaatcgaactactcaagaagaatgtgtatcgtaccagattcaatgagttcgacaagactctttcttgcagcatcactattgatatccatatgattccctctgcagatctcttctagttcacactgcctcttaaacaccaattccttcattttgctggacttcagggaattcagtcttctcacttcatcttcggcctacggccaaaagattagacttaagaaaacaacagatgatgactgagacatattagggtagatgataatgctaggtaaccaaaataaaaacatgatgaaatacctctcggataatgtctaggctgaggcatccttttttcaaggcatcatcaggtagactagaaagtaagctgctgcaatggtcaaatcttctcctctcatccataggtgtttccattaggttccacagctcttgcatgcttcttcccaaaccttgtagctgaaataaaagaatcaagggatcaatccgtcaagctaaggtttgctttcttggagttgatgaattcatttccgtgagaaatagtgccaggttaaatagtaggctaccaataaaaactgcattttctaattgaatgctactgtgctcattgctcaagtgcagtggtaactggtaagacatgagaaaccacataatatatgtatatatacacttcagaagtgttatttttttatcaccttaagcagcctctcatgtttctccgccttcagagactttacaagttctgtgaacctagcaagagtatcattactaatgcttttcgaatgagtctttgaaaactcagtcaagctgctatggacactattcagggccttggagaaatcaaaagacagaatctctgacagctcatggacagcactgatataagagtttactttctgcagtcgaacagcctgaaattgaaataaagatgataagcaaataactacaaacattttaaaacaatcacttcgacgtgtgtgtgtgtgtaagaacaccttttcatttcgaagatcctgcagatctgctctaagttcatccaactttctttgtgtcaagtcactttcatcaacttctgaaccagaactaacagtataatcattccctgctatgttagacgtgatctctgctatttgattcagtgtctcagagagctctttccttcttcgatcctttttcatcagtagatcttccagtacaggctttacactggaaatctgctccttcaaagagccttctttcttctcaaacaaaaacaataacatatatcagacattatataatactctctatgagacaaacatgtagtattgctaagagtatcttaccttggcaaacgaaactttttcaccaagcgcagacatgaggctggcaatctcagcttcagcttgagctaatgatcgctgtaactcagctctgaacttacgagttttctcaaccttcttattgtatatatccagacattcctgctcaagttctagcagcatcttatctctttcattgtaactttcaccaatctcatcccatatcatctacatccgaataaaaccagtggtaaacatcaccagctcaagtttttcctcaattgacacagaacaagacattatcattagtagtatcctaatcctgatttcgattattgctcatactaaaaccatcccaagaaaaagtagagtacacgtctttcacaggaaaacctaaaactgtaagcaaatgtaacagcggaggcataactcaaaatggcctgaaatcgaatctaactgacagtgatcagaagcataaaccctataaaatcaaaattcgaaattcaattgcgttacccaacgaatcaatgaatcaccggaaactcaaaccaaaagagatagatgtaatcgcaatctcccgcagtcaaaatttcgaaacaatctggagaatgtgaagaagctacggagagaaaaaaaaaaaaaaaagaagaagcgaggaatctaagaacctgcaactcttcaagaagggaagtgcaagtagtggttgaagacggagacattttgttcacgccgccggcgagtagtgaaaatgacgttgctcagaaaccctagaaggcttatctggttacagcgtgaagatcccgagagatattgttttgaaggacgagagcaaatgtcgattttggaaagaatgtgtttttggcggtaaactataaaaaaaattagtatccctctcgaatttcgtgcccggggaagtccgaatgttttttttttttgccattttctttgttgaaattctagagaggttacaaaaataccaatattctagagaataatcaaacttgatttagtaaccaaaaaaaaatgtatctatttatgttgaataaataaaaattcttatttaaaattttcctttgctttgcatttgactatatgtaaaaattgttattattattttatatttggttgtatattgcattttattttttatgtaaagtaaaccgtctaaacaaaattagacgattactaacctagtttttaggaaagataaattatctttttaacaaatactataaccatatatgttttgataaatatgtttatatcttgtctttttttttcggtaagaccaaaattcttgtcttataaaattagtttatatcgaataatttaatttttctattatgtagtaatgacaaaataagttaaatagattatatattgaatcgataacttttaatcttttttacttttgaaaaaaaaaaatcttttgtgaatctagctagggcgacgtatatatatggagaaaaacaaaaactagctgcggccgtaactaagctcaaatagtttagttaacaagtctttgagaaaaagacacaccaaccaaaaaaattgtcactatactcaaaatcaaacaacaaagctttctaattaaacaaaacgtagacacttcatcttcctctctctcctgcgcttttctttactcaggttttctccgctctcttcttcatactcagaattgattccttatctcttttggtttcaattcttcttacagatcgatccataaccttttagattccatagcttttaattgatttccctcatacaaaacagatcaatttcatcgtcgaccatcacttttaaattttcaattttttaatactgctattgctaatttgtgcaatttggtatttgatttgtgagttgcttttgatagttagctctgggtagtgtttaaaaattggtatctttaagcataataagattttggttatttcaggttcacattacttgctgatttggatttttttcatctgcggttttctcttccaagcaacaatggtgtcggcgaacagagaaatggctgtttactgtttcgacactttggtctctcactacaacaatgaagagactccaccacctgcctttgaagaggccaatcagtaagtttttttccttgcttgtgttatgacatgcaagtttgaatctttctcaaagtatgcatttttttgtaattctctttgtttggaatttggatagagtactattgaacggacgatctgttcttaaatacaaaatcaaattctttttatggtcccaagttgttcttgatactgttatgagtagtcactttgagtatgtgaaactgtctgtgatgaggatattctttcacaatctaatattcagagactgtgatcagcagatccttgcaaacattgcatgccttatcgttgtgatgctagaaactaaccattttttgttttctgggtattttgtgttgaatgtttatggatgggtgatataatctgaagcgcatactttttgtgtccattcttactgatggtccagtctttttgctttttgtgtagtccattgtttgttacctggaagaaaatagtgaatggtggagagcctcggttgcgtggatgtattggtacactggaagcacgccgcttgatcagtggcttcaaggattatgccttgacaaggtacgtactcgtcctcattcagttttttttttctgattctcatattattttcttggccatattcatgatgtgcttttcgtctgctttgcttttttttcatggttgaaattgttctgcctcaactttgcttatcatatatctgtgttcttaagtcttagatagtatctcttaacaactttgttgaatttttcttttgtctgtctgctttacttctcttctttctcatttttctcttgttgtaatgtacttgtgttgcttgatactaagagcggtttaagatagactacaaattgataaccataaggtgacaaacaacaaactaatggataagtacacatgtacagatatacttttacatatgtaaataggcagttctttgtctaatttatcaaacagacataaatggcattcccctattgttttgagctaacagatttcatatcaagtatcaaaattttcagctgtttttgtactgtgtttggtgtgtaatttatatttttgttgcaacccatctgctgcagttgattaaaattttttgctgtatctttttcgaaactttgtgtatatcgatagcatgaatagcaatagtattacagtgaaagctaatcaggcttcaacctctgtaaaggaactgagtaattcagttttagagattttaggcttgacaccacaaatgaagcacatatatgtaggtgtttattgtgcagagagagcctctattcattagcatttcccatagcttatctgccttttatgtcatgtggttggtcgtaaatgcttgtgatatctttcttttgttgtcagttttaaacgacattagttttcttatataatattgcagtgccttgagggatcgcaggttcccacctatacaggccaaagaattgccatctctgcagtgtacggtgtctgtcttgactgattatgaagatgcagaagattaccttgattgggaggtatattctcttcactcttttcttacaatatgtcaatctcacgaattaagaatatagttgccaagaaggaatgcatactattcaatgtacacagccaataaactttccgttgtcctttccctcatatcattttcccgcttagttaactgctctgccttgctcatgacattgtagtttgtcgaattcttcttgtttgtagtttgtcttatacattgtcccgttggtgatattttgttttgtgatttcactctaaaggttggtaagcatggtataatcattgagtttactgaacctgagactaatacaaagcgaagcgccacatatttgcctgaggtgccagctcatgaaggtaccatttcaatacaataattcaagtacgtgttgttgctattggtattgttgatacaacgattactttttttatccccaggctggacaaagatagaggcaatcgattcgctggtgcgtaaagcaggatacaatggtgtaataacagaagcagtgcgtaggcgaatcaatctaacgcgttaccagagtacattattcagcatgcattatagcgaatacctttcatatgtgaaggcgaccaggggcgttgttggcccggttattaatgggatcaacaagcacgcctttgcctgatttgcacctgcaaatggatgccattgattatgtttggctacctcctaatttatcctctgtcttgttgtctggctctcataaaagaaacgagacttcgaacttggctgtttcactattgtaacattaattaaatcactttcatcccttctctctttgttcctcacttcctcttaattagactcgatgttaaaatcgtatcaggtaaacttgaacttagtgttgacaatgtccaaattgaccaaccgtttatcaacctcatactacagtaacaccaagtcaactgtttttgttaaaagtcaactcaaagttggaggttacttatggttaatttaagagtacacgcttatttcgtaagaatattttaaaagttggaggttatttatggttaatttaagagtacacgcttatttcgtaagaatattttaaaagttggaggttatttatggttaatttaagagtacacgcttatttcgtaagaatatttaaaagttgggggtgtttattttgattttttcgcatattaaaaaattaagaatcatgaatcgcttacgcatgtgcagtttggacgcaactgaatcgtaccaatgagatcatcctccttattttaatctcccacctgatttgagctgtttctttctctttcgaactctccgtcacttccatttcatttctatttgaatcttctcaaagctacacagatctctgaaatcgaaaaagcttgagctgtgttaatggcggaggagaaatgggtggtgatggtgacggcgcagactccaacgaatatcgccgtgattaagtattggggaaagagagatgaggttcggattcttcccattaatgatagcattagcgtcacgcttgatcctgatcacctctgtactctcaccaccgtcgctgttagtccttcctttgatcgagatcgaatgtggctcaatggcaaggtactacttgctcttcattttctcataagcttagattcatataaattgaattgtgaaatgaacttggattaggtaatgtattgttgtgatttataagcatttgagtattgttggtttttgttgatgttgtttttttccggtttcatgctagtataggaaatctcgctttctggaagtaggtaccagaattgcttgagggaaattcgaagtcgtgctgatgatgtagaagataaagaaaagggtatcaagattgcgaagaaagattgggagaagctgcatctgcacattgcttctcataacaacttccctactgctgctggcttagcatcttctgctgctggttttgcttgcttaggtactctgattttttctctacgtttccttgtgggtgttggtttcttagcataaaacacgaaaattccgccatttttggactctttctttttttgtcattgttaaagtgaaggaacctcattgtatgtttatggatacttgaagattgctttaagctaggatgagatagtacaatcatgaaaatgtaggtgctttttgtttgttggatttatgaactttattacagtgtccgattgatcttttttagcatagattctctggataatacacgatcaaatggtaacatggctttcttctctttattcctcatcttccttctagatctgtatcttttctgcataatgtagcttagaattgctcaactttaatgacattgatcctgtctctttcctccagtgaatgattttctagattccctaagtcgatctatcttttggaatggaaattgctcaatgtagtagtatataacgcttgcttttgggtacagtttttgctcttgccaagttgatgaatgtaaatgaagatccaagccaactttctgctatagcaaggtataacttaccttacctgactcgcattttcacccttaatgatcttttttgtatcttccatgttaactgtacgagttactattatccttgttttacagtgactgttaaatatcatctgttgttattttttaagttgtgattttaattgaatcatgtatagttcgacgttcctctagaaaataagtggtaccagtatatatgattataacttatattgtcatttctccatgtaggcaaggttcaggaagtgcttgccgtagtttatttgggggatttgtcaagtggaatatgggaaacaaagaagatggaagtgacagtgttgcagttcaactggtagatgataagcactgggatgatcttgttatcattattgctgtggtatgaatcttaaatacctttaatctagtgcatttttaaattcatgcgcagtatcgatcctattcttcatcttctatattatgtcagtctctaattaactttttgttacacttccttgtctaatgatatgaatgaaggtgagctatacgaagaagtacatttctgctgcttttcttgaataagaagatcttaactctgtgataattctatgttttcttatcatttccatcatagcctgcaaaagcttcttcgttcagttgttttttttgtccatctttttcatctcatacagcttgtgttacatgcaggttagttcacgacagaaggaaacaagcagcacctcgggaatgcgtgagagtgttgagacaagtttgcttttacagcatagagcaaaggtatgttctctttttgatgattgataacagtctgtatcacctaaaattacctttgttgggttcctaaacaaagtatatgaattgttttggttgtgcttgcttaacttcaaaaatgaaaatagcccccttaacttcgtgctctaaattctccttaggaagttgtcccagtacggattttgcaaatggaagaagctataaagaatcgagatttcacatcttttacaaaattgacgtgttcagacagtaatcagtttcatgctgtttgtatggatacatctccacccatattctacatgaatgacacctcccacaggtatctttttctcttattttgtttcatttggcagtcatttgcagcttttagctatcagtgatgtggtattgatcgcaatccactaactaatgatgccaggataatcagcttagttgaaaagtggaaccgttctgccggtacaccagaggtatgtatgcttgcttactccatagctcaaaagcaagtattgaatttcatataggtttcgagattatgacgttggacaagtcttctgatcttaatctcgttgtcctggacagattgcttatacatttgatgctggcccaaatgcagtcatgattgcaagaaacaggaaagtagcagttgaattgctgcaggggctgctctactgcttccctcctaagcctgacacagacatgaagaggtgagataggaattgttattgatctgattgattgatttaattcctgactaataaaaatggtgttttggtactttgtatagttacgtactgggggatacatcgatagtaaaagaggcaggcttggaaggagagcttccacaaggaattaaagacaaaattggaagtcaggatcaaaaaggtgaagtgagttattttatatgcagcagacctggaagaggtcctgtggtgcttcaagaccaaactcaagctcttctccatcctcaaactggcctccccaaataaccatttctatgtcttgttgttacttcaactctgagatttgcaacagcttcatcttttgctttgccagctccaactcttgtcctaagagagcactcttctgaatcttttcccaattatttgtgtttacgtacaattcttctgcatcgggtgcaaaaaacaaaacaatcaatattgcaaacgaataagatcttgatgctaaatctgagtgtatcattcaaatccagaacaagaagaagttgttgtactgtagtccatatcgtataaaaacactaaccatacaagatctcgaaaccaaatcatgtgttgctgctttcacttgtgactccatcggaattcctgtttcttatttccctagtttaatctctattcactgaatttgattattgtctatgcaccatgtagtatttaatttgattcctccatcaactgtttgtttttagtccaagtttgcaactcttcaatatatggttattatggtcttgtgtgacacgaattatgaataagttaactttgtgcaagggagaaagtgtggttttttttttattggttgtgttgtaggctgctgtagtaatcctttgttatagtaatcatatgacttcccacggcgataaaaacaagtaaacttggtgatggagccagatctatgctgtagctattattattacaacgataaatcttctgctatgcccaaagcagtgtcacaacgataaatagcatcaaagccataccaagacatatcccaaccagtgcgccaaaagcctgtcaaaagcaatgcatccagaatttaattactctttcatcaccatcatcaactatctacatatgtattactcaagagtaatttaggtgcctcacttttccctgactttcaaagttgcattttactgtaaaccacgacaatcctctatcaacaataggtgcaagtgcgactgccctgcatccatcaacattcttcatgggtaacaacatcacaacaagataaggtcggcaataacaatcaaaactacaaatgcaagtgcaagtgcgactgtcctgcatccatctactatgctataactggttttgaactactttctctagcaaaatagttagctactactaatacattatgaccacttctcctagcattaccttgtcacctaagaacttaacatgttctctacacgtaaacgagaacaaacttatagttgatacattgttatgaattgttcattttgactgaatatgaaaggatttgcattgtctactaggcgccaaaggatcaaactgaaacaattacttctctcttctagacctacacatgaaaaggttgaagtacttggcactttttcaggacctactaatacaaatattttacatttatgaactttgcatatcatatgattttctgattattgatgctcaaacaataatgccatagtctgcacatctatcatgatgagacaatatgaaagattcggagtgcatcatcatgatctggcaggaagcagttaaacagcttcctccatgaaactataatgagagcacactgatgttcttaagctatagagaactaactgagtaagaaacttatattcgctacttaccctccgattctgatgagcttagtaacttggcttccagcccagaccatggccatcactttaagaaatctgtatgctacacgaatctatcacgtccctttaactctaagaaatactgaaaaatattccatacctctcagccgcagcaagataacccatttttcccggtgctggagccacataaaacctatatacaacaatatagataatcgtcattgttctggctcaagtatgttatgatggagaacaatgttcttgtagctttacacagagcatatacggtcaaaattcgattctactcaccagaccaagaggaaagctgtggagtaatagactgtattaagtaacccataggataatattccagagagtccatatctcttcaacttcttgagaagcctacaattttggtagcatatcaaggcaggcaaatttatgaaaaggaaagcatattgttaatgttaaaatcatattgattccccaaatccttccagaaatacaatgtgaaccgaaagcatcttagctaatatttggacagaaccatatccgaaatacaaatgacattgtcataattaccaaagaagtggaaaaataagtagctaaggcaaatatttgaaccaaaacattccacacataaacaagaggcagaaaacatgtttgaaattgagtattgaaagaagagataacataatcggtgatattggttcctcttgattcttaaacaaaacgtaagaaacaaacaactagtaaactccatattcaaactcacaagcaccagcatagagtcatagaaaaaatctaccaaaagaaagatttagtatatcacatactcttccgaaacaaacgggtttttcttgcttatcctattcttatccaacatttctcctagaaagaagagaacacagtgtgaaatctcaagttaaggaatgaatgtgtcaactagaggactaaagaagttgaaataggtataccttcatcacaggaacgctctgcctctgcatcagatttgttggaaacctaagaattgatgtgaaagacaagtacagataaagaggtaagagcacatttctaattcaaaacaaactgatcacaggaccaattctcaatcaaagcaaccattaagaggagaaaaaagaccaacattgtgactcaaggaggtaacaagtcggtgactttggttgaatacggagaagtgatgtggtagcagagattgagtgcgcttgccattggcgaggacgctaaaagtacggagagaacacttctgaaaagtggaaacagagcagcaagattagtaattcagctcaaacatcaggggttcgtgagagcaagagaaaataagagtaccggcgggagaggaagactaaaacggtggacgccggcgacactcatcagtccggcggtgataattcaatgttaggatgtcacaattatcgccggagtggtttttaaaccgaaattgaaccggtttaatttaatttgacaaaatttaaaaagtaaaaaatattaaatctttaaaccgcaattgaaccggaatctttaaaccgagtctatatatacttttcaacttccaagtctttcttcacattctctcaaacttattttcgttttccagagaaattattgacaatcagagaaggaaggaaggaagcaagaagacttaagaagatgataatggaagaagaacttcaagagcgtaacaacaatctcagcctcgacgacattgatctttctctcctccgtctcacttcaccaccgtacgactactctcctccatcatccttgttctccgccgatgaaatcactcctccattgaaacgcgcctcccctgtttccgacgaatccgatctccccaaacgcagaaaactctcccctcaaaacccaatctttaccacttctcctcctctcttcacttccccggaaacacaaacttcctctgttcatgacacgagccggtacacgaatctcactagctctgtttcggagaagcaagaagcgacgccgtctgttactgatacagaggttgttatataactattaagcgtttctctaatctttgttttcacttcttgttttgaactactaatgaagaatcttgaattggttttggtaaaatagacgatgaagatggttaacaaatgcgtagaggtgatgaatcgtggagagactaactatgcttatgaggtttgatgttcttctctaatcaattctgctttcttttttttagtcttaaagatcgcaagtactggttttgataagtttacggtgaaattgcagaaggagcaagaggagttggaagaagaagaagattgtggaggagggatgaggatagagagatctggagatgggtttgtaattagattgaagtgtagatgcagacaagcttttagggttcttttctctgatgatcatctctacttcaagcctctctaagtttcacttcacacacttgtggtgtgatttagtatctgcttctactcatttgttgcaacgttttttggttggacagttatggagactttgtaaataggaagtaaccaaaattaagatttacatttcgtgtagaaaaatgtgcaatgaaatggtaagagtaagagcaagaactcgttttgttgtatagagattacaaaaaggttactacttatttagagtcaaagtcaaaactttaaaattgtttatagagattatcaagaaacttttaatctcttctgaatacaaaaggtttcaacttttttttgtgtgtgtcaaaactcaaaccttttacacttgtttgggccttcttcacgggacccatggtcatctcgatcaagtcaatgttcagctcctcaaaacaagctcttgagagtggcaaagagaaattaagaccatcaaagaggggaattggcctctacagagactagctgctggcgacagagagctctcttagcactctcacatgccttgtggagcttaccataagccatgttgtctctgcttgaattctttttggtgttttttcttgattaacttcatgaactattctatgatcttgtggttaaagtccttaccttttttatacatagtagatttttttctaaaataattttcttgcttatttacatctcaattaagactttgaatatgtgatgataatttccttagttatgaattagaatgattaaaatcaattaagagacccaacagagagacaataaggctattttggcccatttagacgtaagtaatgcagaataaaattgctccgaccaaattaattgatgcgcgttatcagtttctgcacgcgctttcacgcgccgtcgtcgattcgtttctccatcgtctgccataatcacccgcaaacacattcttcttgctacttccgtcacgacgtcagtctctatctctctccctctcactctcagtttcaatagaaaaattctcaaacattgtccgttttttcccttgttttctctcagaatcatcaaatggaaccgtgtgaattatctgccaacactgtgatagctcatcctcgagctctcaccgataagatgactctaattcgtgacgcgggtccttccaaattccaggtctttcccactcctatctccgaagttttttttttttttctcaatgcttaaactttgtgctgtgttggtctatcctgcgaattttgtaaaggtaattgcagatttcgatgcgactttaacgagataccgagtcaatggacttcgaggaaggcagagtatgtttcatttgatcaattatattcttctcttctcactaaaccaaatgcaatcaaagttgaaacctttatatatagccagtcatggcctcttgcagcaaggagacgcatattacgatgctaagaggcaagccttatatgatcactatcatcctcttgagatttctcctgtgattcccattgatgagaaaaccaaactcatggaagaatggtatatactcctcttcttatcaatcacatttggcttgtcttttgatactctagtttggacaaacaagtgataaactttttgttgttgtgaatgatgaggtggggtaaaactcatgagcttctcattgagggaggtttgacatatgacgcaatcaagaaatctgttgcgaattcttccatagcttttagagaaggtgtgtctgaacttttcgaatttttggaggtaaataaatggaattcaatcatgttttgtagagttatactttaatggtgaggaacaactattagtatcttaatccaccttatttgcaatctgtttcagaaaaaggagatccctgttctgattttttcagcaggacttgctgatgtcattgaagaggtgactctaaagagtattagtttattagagttactctcctacttctgctgcctctataatgaatatgcttttgttgcatactcacattcttaccaggttttgaggcagaaccttgatagaactttcaagaatgttaagattgtatctaacaggatggtgttcaatgatgatggacagctcgtgtctttcaaaggtataatatttggttggtgtttcatcattcatttaagcgcattcatcaactcacatttgtggtttttcctctggaaaactgaaatctctctcagaaagtatcaagcatttgatttatgtcatgctattataaactatagtctctttacctttcacaatacaggaaagctaattcacgtgctaaacaaaaacgaacacgctttagacatggctgctccacttcatgatcgacttggtgttgacattggtgaggaagatgaagaaaatgtaaacatgaaagagagaaggaatgttttgcttatgggagatcatttgggggatttaaggatgtctgatggactggattatgagactcggatatctattgggtttctgtgagtttttctcttcttctattttgcctcctctctgtttcggtctcctcataactactaatcttatttctacaggaacgataacattgagaagagtcttgagagctaccgcgagtcatttgatcttgtttatcttgtaagttccatacgcaatttatatatgatctttcacaacctggaaattgctgataaaagttttatgttttgtgggtctaaaaacagaatgatgcacctatgtggggagctctggaacttgtttctcggttattctcaacagaagcgagttagctgccactgctactttaagtgcaagactatttctattgcaagtagaattcatgtgtattgctatagattataaaataaactatattgatgaaaactgtacctgttgatgaaaactatattgcaagttaatctcactgctttcatagatgtcaaggaaccctagaaagaatctcctctttcaaatcctttggaaatcgtcgtcgtcattgtttcaaccttcaaaaccctttttcagttcttctgatttcttgcgttgaagggaatgtgtacacatagatacaaaaaaaaaagaaaaccctaaatgaagctgggccaatagtgggcttttaaatctagttgggctttgaatgaatttatatacggacagtaagattcacaatctgtgcaatgaaaatgatgagactaataataagaagagcaaaaactaatttttgttgtataaaagatatgcaaaaagttacaacttttttagagccaaaagtcaaaacttttaaacttgcttataaaaaaactcctctgaaaagtagaagaggcccaacaaaacggtcacttcatggtttgacatagtattaaattaacttagttacagccaaaactaataaaatttaagtttgtaccatttattaaaggaaataaaaaggatagtagtataaccaaataatctcttatgttaacatatacaatatttgccgggcatcaagtctcaacctctcaggagagttgatcctcgtaattggatctgtgcaaaatcaatgcttgactccttgattttttatactatatatttttttttcattatttaacttgattttagtagaattaaaccacaatttgtgcagaatttttcatgattcaaattgagtaatataatagggtgtaaaattaattcaaatttacatgtaaaaaaatttatatgaactattattttcaccaaacatttataaatgtattaaaaataatatatatatatatatatatgtcataaataacatatagtttgaataagctaaaataataactcatagtccactaacctggtaagtgtatcccgtgtattacatggttgggaagaaaactatgagcggttgtgtagagaatatcttttgcaaaaggtcgatccacgcaagtatgtagatgctaaagtactacgtggtggtcaggttcataaaaaagtttggtatacctagagaacgattggagatgaacgggcaaagaccttcatgtaccacaaagtggttacctattctagacgaaaaaatgttcaacaccacatacatctataagtatcaaacccttaaacaggcattaaagcgtcttcgaacacacccggttggagcgactttagtcgcatatgaaggtctatttgactccgataaaatctatcgtggaccttttcgaaagaacgcaatattctaagattatcatgaggtgatcatagatgattataagaaaatcaacggcgaggtggttgaaaaagcagttgtggtgagcgtattggtttagagggagacaaattgtatattatgaagtgtttttagtatggtagtttgtccatttaagtcaccatgttcagtatctgtacatgacttacatcagaaatctcaatttataattaaaaatataataatatataatattaatagtattagactgaatattttagaataatcattgtatattttttaaaaatatgtatgaatttgttttgaaaaagtatagtttttgttatattgaacctcatatgtattgtatatgaaaagatgattggttggatgactctcacctaatatattgtcttcatatgaattgataacacaaacaatgttcagttcagatgaaaaattatcaaacaattgccaaaaattgtcggatgtatattcagtatctcatggtctcgtagtttttggagtatgccaaacttatgaatgtaagttaaaaatgttggtattccaaaagataaataatatacaattgttctagtagacggttatcatggatgatctaaatcaccggaaaatgataataatggttttgtatctcaattagctctcaatgccttggtggaactacgtaaaatgaatgactctatcttttagttgattaaaataatattgtaagttgaatttatgtgttttgctttagattatagaatataaaaagaatcattattgtgagtgacttataggcagcttataacttataacttataagaatctttatatatgtaacacatgcacaatctaaaatatttgtttcagccaataaggatatttgtggcagtaaataaagtaagtaaaaggtaaaatgaaagatccaaaagagtgaaaataaaagatgcaattggtactaaaaccatcaatggccctctttatgtaaagtaaaaactagatagcaaaatgtagtatgtagcatttggagtctcaaccaaaaacatcctactatagtcaaagtacaagatgtagatagatttaaaaagctaagcatatagctctatcagtctccggacacaaacgacttctgctcgtaatactttttctcgctagcttccttcttcgcattacgtttctatagattacagaacaattttgagtgagacaacgttcaagtaaaccaggaagaagaaaattaagaatgagcaaagaaaagaaacttgcctgataagcttcatggtttgctacaatcctcctgattatggtggacgttgtgatatcaagagggctatctagaacttggaatatgcccatgctaattggtacagaatacggattatcttcctcctgtcaaatcaacaaccacattctgagaaaccatagctctttgtcttttacctaatatatacacacttgaatgttgttttacctttcgaaaatcatcgctctcggctactgtcccatgtaccaccaacgagatgtcaaatgtcgtgatctgcaatgttcaaatcaatgtcaaaaatagcatttcatgaaagccgtttgggtattgttattaagcaaagtgcagagaagctcaccgtatctctcgacacttcccatggagcaccaattatcacctcatccacgtagcggcacgccagaacgcttaagctcctttcatggagattcataatagggcgatgcgctcctcgtttagcactgcacagcaacgtataccaagtacaatttggtcagacaaatttaagcagagatgaatttatgcacatttaaattttttcatacagctaagaattaagattagacaccaagacctatattttagcctaaaactaacaccaccaatcatattgatcaaaccccataatacttgccagggcatgaaagggaaatataaccaaataaactggaaagaaatcaataaagcaaattgccaaaattgagcttttttaacctgacagtctggtcattatgtataccaacaagaagaaagtctccaagctctcgagcacgtctaagaatctgtacgaattaagtaatttaataacaaataaattggcagaataaactaaatggtcgctcaatcccactcacttctacttctttactttatataagcataaaatgtatcattaatatggttaaccttacacccattgttcatgtaacggtattaaaacaccactcctcacatataaagtgaactgtatgttgtatgcaccaattaatatacctcaacatggccagcatggaaaagatcaaaagcaccatctatgtagataatgcgtgcatcaggtcctggcccctgttacaataagaatgtaaacttgatcaaccccagataaaatatgagaaggagcactgaggtaatggagtaaaatgacagaagaaagggattcgtgaatctatcaagaaaaataatcttgagatacatctagcaggtatatgacttggaataggtcataaaatgagatgtgaagtaacattctgtcacttaagaagaaaaatatacgataagcacataaaagtatccaataattggtgaaacagtcatagaaagtgtgaaccagtaacttcaagaacaagactgaaccagacagtgttccataatgatgacgaaactgctgtttgagaccgttctctttaataaccaaaacaactagaaaaacagtaagctcagactctcagagccccttgcatagctattagaaatcaagggtcatgtacttgtcctacctagtatatcataaagcaacaaacactacgataaacttgcaaatacaagtatgcaatacattaacttgaggacaagaaactcttaaaatatgcatacctttccattggagaactgaacaatcctgcgggaagtaggaagaaaatgcgagacacgagtaccagcagaagaagctccatcctcaaactttgggctactatgcccatgactaaattgcctttgcagagaggaacgactatgagtgtcactaatggatctttctcttacacaaagaagcatacgacctgctcagaaatcacaaatcgaaaatgatgaaattagacgtttcaaaagtcagctgatgcgagcttaaaatgaaatcagaaggggatacgtcaaattaccaacgatatcagtgctagaaactccttcagtgcgcttaatctgcttgtaacgaccagccttcttagcaagtgcataagcatcagtaccatcaggaagaacacaaggatcatcaccatggataatgtaatcgatctgatactcatcgaacaatttcttcatgaaatcttccgtaatagcgtaaggagcatcagatataacttcatccacccacttcacagctttcaccattgtcattctatacataacgaaatcaaaatcaaaatcaaacaaaacgcaattgaaatcaccagaaacaatgaatttgtaatctcgagaaagagaaacctttcatgaagaggagtaacaggaggtcctttgttggctataatttcttcgtcggaaacaacaccgacgaccaattggtcaccgagagcacgagcttgacgaagagcgttgcagtggccatagtgcatcatatcgaagcaaccatccatgtaaacgcgaacaggttttcgttttctcaaaatgcgccatggacaagacaaacctaaacctaatcctaacggaagctcacctttaaggaaaagatgaaggaaagaagctccgacggcgaacgcagctcctccgactatacaacttccgacgatcttctctttctcccaaaccatttttgcttacgaacacgagaatttcgaaactctctctctcagatcttttttttttttgttttcttcacatttccagacgtctcagatctctcacagatgttctcttctctttggaactagagactcggaatcagaatcctacggacaacaaaatatcttcaaaccggatcgtaattgtgtgatttagtttggttcgttttggtttaaagatatcatttaagtttcgaaggaaaaaaagaatcaaaaaccggtttcgagttttacaaaagtgatcaaagcagcaaaagagagaatctaaaccgaaccaaaaccggtttcgagttttacaaaagtgataaaagcagcaaaagagagaatctaaaccgaaccaaagcaaacaatgtaaaggtgagaaactttgagaagacgtgtaaaatatcgtaggaagcaaatatttcgtgatccttcatgtgacacctcttgcttgagtcatcttctatcgttgatgtaagacgcaacattcctcctactttagctgctagtaggaccagtgatctaactaccttaagttttaaattataactaaatggattctcatcttctaaaagccaatgaaacgaaaacatgaatacttgtttagttgaacttgatgctaaagatgctgatgagttaggataaaccatggcatcacaatcgccaggtctattatacaataattcaaaagagatcgttaataactcgaacagcatggagtctcctatctaacattacaaaatatatttagtaatagacagagataccatactcagaggaagatccgcttagcagcctccaaagtattgcatagtagcatggtgatcgtcataggtccaactcctcccggtacgggagtgatagccgaggcaacacctaacgcttcctcgtaacatacatccccgacaagacggtaaccaaactcacagctactatcctgcaatattataacacgtcatgcttcaatgtctaatcagaaacaagaaaacaatctgaaggaaaaacatttcaagctctaattcagtttaacgttttctatatcagattggattcaagctatggtataagtcttttttcattggaaagtattaagacttttgatcagttaaggaaaatagtttcgtttttacctcgactggagttgttccaacatcaatgacaactgctccaggcttaagccaacttccacgaactaaattaggtatacccgctgctgctataacgatatccgccttcctagtaatgtgctctggatcctttgtaaacgcatgcaccgtgcttactgtcgcgtcatgcctctatccgagaatttcagaaaacataaatgcatagttaattcccaaaccaaaatgtttaagcataagaatccacttgaactataaagaagaactaatacctgcaataataaagacattggtagtccaacgatgttgcttctgcctatgaccacagcattttttcctgctatttcaacacccgttcttatcaacaactccacacagcccttaggagtgcaagatacaaacagcggttccctccctctcattgcaagattccccacgtttaatggatgaaacccatcaacatctttctccaatctcaccatattcaagatttttgattcattaagatgctgtacaagatatcttccattaaatgattggactcatgagaaaaaaaaaaaaaaaggaaaggaaaccaacaaaatacaagaacgttctcctgaaaaagagctccacaagtaagatgctctatcgcataacctgtaaattaaatgctttacctaccaacgaaaaggaaaccttaaaggggaaaatgttatgcatgagtccatggtcgatgaaaatatatgaatcaagaatttctacatacaagtatgaaaacaaagtaaacgtaactacttgacctcctaacatagaactaatctttgacatcaacaacactaacatcccccatcacaacgtccaaagaaaaaaatgagaaacatacttggggtaaaggaagttgcacaagaattccgtgaatagacgtgtcttcattgaattttctcaatacactgataatctgtccttcagtacaatcctctggtaattcagccaaaacagatttaatgccagtttcttcacaagctttaattttgttgcgaacataagtttgcgagtctctttgttcaccaaccaaaacaacagcaagaccagggacttttccaacagcctttttcatcttccccacttcactaataatctttgttctgatttcctcagcgataacattaccatctatcaccacagtcttctgttcagtctctgtataaatgcatacacacagaaatcaactcatacaattagagaattttcttgtaacatatatatatagccatgaaaatgcaacaaagagtattaccaaaggaaacaggaggtggaggatcagagtaaggaatccaattttcaggcaagtcaagtgacacgagaggaggagacactaagatggaactaaagcaatgtacatcccttgttgccaaacgaaacgccttagtatgcgccgaggccaaagctttcctcgcgatcattaacatactcaaaactaaaagaacagtcactgattcaaatcaagcacaagaaaaaagtcaatgtaaaagtacagaccagacaagagaaccttagacaggtcagcctaagctagaataaaaccataatttgatccttttagctccatactcttcattacatccacacaaacaaataaagaggcgcataatacagtaaaaacaaacttgcaccagattgaacctaaatggattaaagatttcaccagactatcataagctttcactcagctaaaattcatcttcttcactcagctaaattcatcatacatagaattcttaacaaagaagaaatcggaaaataggaaaaaacagaggagagatttaccagtggtatataaagcgtcgtcaatggcgttgaaaaatatcgctaggcataccggagtttaggattcaacgagtgacaatataaaacgatgatgattaacaaaaaaagtaaaaagaattcaccaccgtgtgagaaaagacacgtgttatgatctggagatagatcttgcaagtgggttaaataataaacggcggagacatagccacacgtgtgaaaaaaaaagaggtgtgtgtgtgtgtgtgtatgtgtgtatgtgtgtgtatctctctctctcttcctccaagtagcaaaaagcaaaggggaaagagacgatgcgatcgggctaagtgcagaaacacttatacttgtgcattctgcaacacaacacacacacagagaattcgacgagagtatgatttgagtgtatcgagaacagagagagacattgatagagagatcgttggcaacgttttggggatccaatgcgttcgtaattgggaaagacatttcattcaattctaaatcgggaatatgaaaggcggaggcggtggtggaggaggtggtggcggaggaaaacgccggtggaaagttctggtgattggagttttggttcttgttattctttctatgcttgttcctcttgctttcttactcggtcttcacaatggctttcactctcctggtatctcttatcattctctctctaacactctctttgctttttttctgccgatctctgtttcagatctaatctcatctttttcactttttcaggatttgtcactgttcaaccggcttcttcagtaagcaatttctcgtttctttgtgtgtttgttttggtgtgttttgattttgttctgaatcttctttcttttggaatcagtttgagagctttaccagaatcaatgctactaagcatacacaggtaatgtcactctcctttgattgattcgattctcattttttataccaaaatctttttgctgcttttgatattctttctttggttttgcagagagatgtatccgaacgggtcgatgaggttcttcaaaaaatcaatccagttcttcccaaggttggttccacttgtttcagtgtggattaaaggccttgacctgttccatttatgttatagattagtagtttttgacagaaattttagatcttttcatgtacccatagagtcaaagcatttatggtggttggaagcacttcattatcttacacactgctctctaattgacacacacatttcagatctggtctatatatgtttaattttcaactattgaagtatgtttctgtcataattattggcattaatgtttcacatcttgtctttcaagtggtgtaaaatatataggctttgtagtttgattacagataatagggctatttgtaaatgtataggctttgtatcaggtttgccacagtattcttgcaagatgtcaatgctaacattagaaaaaacttagatgccttttcgtttcatggaaagctatgcaagatgccaatgctaatattagccagtgaatctggaaactttactggcactacaaacaaactataggtcaaaaggttgtagttaatcagttgccgtatattttgtgtgatgttgcttaaagggtagagaaattagatgaatgatctctttattttttttatatttgactatctcatgagactagaaagttgaaatactttcatgaattatgttgcttaatgtatctcaaattgtcttgggcaaggtcaagaattagttccttgggtgagatggttaaactgtttgtaacaatttctatacttatgttttgttttattgtatcacatgctagaaaagcgacataaacgtgggttccagagatgtgaatgcaacaagcggcactgattctaaaaaaagaggtctgctttacaagcttcactttcttgaaattcctcttccattattttatattgattctggtctgatactttacgtctggtctctccattaatctgcaggattaccagtgtccccaactgttgttgccaatccaagccctgcaaatgtacaaatatattaagtggtttccttagtagacatctttatatctctcaccaatcatttaacgttaaccttactctgctttcttctgtgaacagaaaacaaaatcggaagcctcatatacaggtgttcagaggaaaatagtaagtggtgatgaaacttggagaacttgtgaagtgaaatatgggagctactgcctctggagggaggaaaataaggaaccaatgaaagatgccaaggtgaagcaaatgaaggaccagctgtttgtggctagagcatactatcccagtattgctaaaatgccttctcaaagcaagttgactcgggatatgaaacagaatatccaagagtttgagcgtattcttagtgaaagttctcaagatgctgaccttccaccacagtaagttctctaccagtttgggtttaatcatttttgtactgaaagttagttccttactggaaaagattttgttggattctagtcacatgaatctctcctagtttgccttcagtttgtctggacatcctgttttctagtggtttacttgctttcagatggtttatggtatagaaaatatttatcataacattctctcttcacctatccagtgggcagcacatccagaaatatcactattttgaagccttatcggtctcaatatcttaaaccaatgtataatttagtaaactaatgtactagatgataggaggacgccatggatgttgtttgttctctctcaagagaagctttgatgtgtagaatcctatgctaatttctttaaacgtacttactgggtatctcttaacactgttgtgtcagggttgataaaaagttgcagaagatggaagctgtaattgcaaaggcaaagtcttttccagtcgactgtaacaatgttgacaagaaattgagacagatccttgatttgactgaggatgaagctagtttccacatgaaacagagtgtgttcctctaccagcttgcagtacagacaatgcctaagagtcttcattgcttgtcaatgcgactaactgtggaacatttcaagtcagattcacttgaggatcccattagtgagaaattttcagatccctcattacttcactttgttatcatctccgataatatactagcatcgtccgttgtgatcaactcaacggttgtacatgcaagggtgcgtcttaaatccagttttctttacttagtattttttttcatgcagtcatagaactctgatttctaattcttggttggttattgatgtttcaggacagtaaaaactttgttttccatgtactgacagacgagcagaattactttgcaatgaaacaatggtttattaggaatccttgcaaacaatcaactgttcaagtattgaacattgaaaaactcgagctggacgattctgatatgaaactgtctttgtctgcggagttccgtgtttccttccccagtggtgaccttttggcgtctcaacagaatagaacacactacttatcccttttctctcaatctcactatcttcttcccaaattatttgacaaattggagaaggttgtgattctggatgatgacgttgtagtccagcgagacttatctcccctttgggaccttgatatggaagggaaagtgaatggcgctgttaagtcgtgcactgtgagattgggtcagctaaggagtctcaagagaggaaattttgataccaatgcttgtctctggatgtctggtttgaatgtcgttgatcttgctagatggagggcattgggtgtttcagaaacctatcaaaaatattataaagaggtcagtttcctgaaaaaccttttgtaagagataattgggtgattctgagcaatgacttccttttttcatgtgcagcagatgagtagtggagatgagtcgagcgaagcaattgcattgcaggcaagcttgctcacatttcaagaccaagtatatgctcttgacgacaaatgggctctatcagggcttggttatgactactacatcaatgcacaagccataaaaaacgcagccatattgcactataacgggaacatgaagccgtggcttgagctgggaatcccaaattacaaaaactattggagaaggcatctgagtcgggaagatcggttcttgagtgactgtaacgtgaatccttgatgagtaagtagctacacggccaatgcttttagaagcaaggtcacacgcaaagaaaagatttagagtgcaacatctcaattttttgggtaaataaacccgaatgcattgcaggagaaatgctgaaggggaagaagcatgcagaagccataccaaattgattataagagacgtgatgatggtgatttgaaaagctttgatatgattaaaaaaaaaaaaaagaggatgtgaaagaactttgatatgttgtatatgatttttggcaaagagatgtgccattcttttcctcgcgttgtttttccaatttgtcatgtagtttctttgttattctttacttttgtgacgtaccaaaatagaaggcgataagattttttttaatctatttcttattaactagtttgcacagtacatttatccatggtgttgaagcttcttctcagaaagcaaaaacaatcaggtcttatgaaggatttctctcagacagtgtgtctgttgcaatagcggaggaggccctttcctcggtaggttaaagtttcgcatccttgctcatgcgaaactaaatagtaaatagtaaagaaactttgaccatacaatgtgtctgtagcaacattacagcaggaagctacactaaatagtaaagaaagtttcgcatccttgcacatgttaaatgattcaagcagaaacattgttataaaaaaaacacaagctgcacaaaaaccaatccacacttcacaaatccaaacgcaccaaataactttgtcgacaactatggtctcaatagtttaaagcacagaggtaaatggatccatcgcaacctttacagtccttgtactttaattttgagctgatagtttttcccctaattgaggtaacgtacaaatcaagaaagacattgattactatgtaaataaagtgcagtgtaggtataatgttatatccgtatagagataatacatataagtaaagagcatgcatgtggtataaagaaagaagaaagagacctcaagcaaaattgtaacgatgaagtcccatcttagcataaagcttgactaagtggtaaggattaggagggagataaagacagttaaccttgaccattttataaccaccgcatacacgtccatatgaccatatacaaacatactttcatcgtcgtcggatgatgacgatacagaccaaaacaaatcccaatcacaatcatggttagacatataattaacaagaagatgagagaaagaatatcgattggttttgagaaatatacgatattcggatattcccatgatcaaattttcaatatcgatcggtttgaaatctggtcgatctcaacatatatgacaacaaaatttgttgtcaacccttcattcatttgtagtaatgtatattcatcgaatggaatcaaatgtctcatagtcatattttaaaaaggatctacttagaaaacttcattcacatactgtacttacccatttagtgatgacgtacgaggtaagatgcaaattgttttctcaacacaaaaacactaaagcaaagttgaggaataagttggtgtatagagtgaggaatcagatttggtaggaagacagaattattaggttgtattacatctgtataattaaagagaaagagagagaacatattcttcaaagtgcaacgcgtaattttcaatccatttgtttttgtgaaagtgggacgtctcttacctctcaaaggtcgtaatcagctttttgtacatatgacgcagaaaccgcaatcttttgttttaaaaacaaacgatagataatgaaagaaatttaaaataaatgaggtcaacgtaagtggaatactcatgataacaatggacgtggaaaaatatcaatagtaaaataatttcagaacttttaattgtataaaatttagtggaattttgttgggatggttttatttttcttcccaccgctaattgcttctccgccacacacctccttatgtttaatcatttattatcatgaatcatgatatagtggtcctccttcatcatatcaaaattaaaaaccaaagattggttcaaaactcaattttttcttaactcggttatatttttttgtatatattttaacttttgcaatccactcgttcttatcttccactagattatcttttcctcgactcaatgttcatggtaataaattattcaaaacttgattgtcttttaaaataaattaaatcggatgtttgatatataattggactaataaggagctcatgaccaaaaatattggaattcggacacctgcgagaaactgatccacaaagtgatctttaaactttctttctttttggttttaatagaaatccttaaacttcatatcaccaatatattgattatcttagagagtagatcatatatttctttctttctttttatttcggtttaaatcatatattactttcggttcggacacatgtagtctgttgttgaaaggaacaaatcaaatactttcggttcaatatggagaggaaacaaaaacgataatcctgcagaaatagaaatataagaacatggaaaatatttcaaatagagactcctgtttcccactatgaaaagatgcactggaagtgtcgatggattatggcccgtaggttttcgttactatagattctttactttttgtgtactgatcagcacattaatattctctagttataataacaaaaatgtagagggaaaccaagagagaaagattcgagaaatgttttatttttattttttgacatcgattcgagaaatgtttaacccgggaattgataaaataaaatagaggagagtgttagtataagattttaaaacttgggttatcaattaagaaaaagaaaatacaattgccaaactatatactaagttgctaacagtatagtttctgtaaaattcatgaaaatatagagcatacgaactagagttagtgtcaaatttatattattcatgagaccataagctattttgtagggccaatattggccagaacaggaatcaaaaacaaggtttcaatataatattttgttggagtctaggtgaatgaaaaccggccgttattataatatttgattatagaaaggaatcaatccattaatttgcatgaatacataaaaaaaaatggacctaaattgaagagaagatatcttatagtaatagactgaaagtgatatctctctagtggaaaacaagaagatgagagaccattcttttcatttgagaaccacattctctctctctttctacatttgtataaataaacccaaagacctcttctcatttgtcccacattcaaacatcatcaacttatcgatcttctccaacaagaatcatcaaagcccaaagaaacacaacagagaataaaaaaagaaatgacaaaagttcacccaaaattcccaagcacatgcgaagagagcttgtgtgatagcaaagcagcagttgttttaacggtgtggaagaagtcccttctcttcaactgcgacggattcacggtttacaacgccaatggagagcttgtctttagagttgacaactacatgaattgtcctagagacaacatcgtccttatggatgcttccggctttcccctcctctccattcgccgcaaggtactttttcttcttcttcttttttggtatttttcataacaaaaacatctatatatagtgatagacctatacgtgattccttaataattggccaaaaaataacactaatagttatgaaactaatcttaagttctcttgcttgctaattgacttgaacagaagttgagtcttggagattgctggatggtatacgatggagaaacagagagagatccaatattcacggcgagaaagaacgttagcataatatctaaccggaaaagcttggcgtgggttagcgcaaagaagacggtgttgtacgagatagaaggatcttacggtcaaagaagctgcaaaatattggatgagaggaggaacaagaagaaaacggcggagatcaagaggaaagaaacggtgatcggaggagttgcctttggcaaagatgtctataagcttatcgttgaatcggagatggaacctcgtgtggccatggcacttaccatcatcctcgaccaaatgtttcgatcttcttgattttcatttttttaaggtttatttttaacgtgtatattagttcctttttgtttatgtaatttatgcaatgtgttccttcctaaatgtacacatgaatagagaactttttttttcgtattgattttggcctttgatgatactacaaagatgcaatcaatttatcgatggatatttttagagacgattcaacgatgacggcttggtagagatgctgatgattaggccgcgggctatatttaataactgtcggtcatgaaagtttgatgtcaagttaacaagaaaaataaatgtctaattttgttactgttttattgccttttttttttttttactaaacgtttcattgcaaattgtctaatatatttgctaaaataagagtttgtttctaaaatttatcgtgaactaggaaatcaatatcaaaatttatgtcgaatgatatagattccacacttcacacgaattctctctagttcttgacttggatctaaataatggaattgccaaatcacgatttagtttcaaaagcatatttgagattttgcacctaaacacacataatctggttttgcattacgtgggaagcccaaaatcaatattttgggttgaaattttgatctgacaatcgaaaattaacaccaaaaatattcttgcaatcttttataacaaaacattaaagtcaatattttgatgttaaaatggattatttagaatacagtgtaaaaaatactaaatcgcataataagtttttttttttgtttgaaaataacctaattgtgtaataaaattttgacttaaagatttaaaactaaaatttagttttaaaattttagttcaaactaaaaattagcgctaaaatgttatttggcaaaaaaattacaaaattggggtttggcggtaaattgcgaattatgatttgataccaaatttattagttgaaatttgatggctaaaattgcaaaattacatagtcatacctttttgtttgcatcttaattatgatttcataccaaatccgtaaaacagcgtaactatagttttttcaatggttgttgtccaaatcgttgcttatttatttggctttcttggttgtattagatcagtgaattaacctatcaaaaaggcttaacacctgggcttcagacactttgtttctgttttggtcaacaatgcttctgtcttcagccacttagccgataaaaaaaaaaaaaaaaaaatgttacagattcagaaaaaatatcataagcctaactttcttatgatgatatttccggtttatgcttaagaaattctgcttgatactgaaatttcgtaattagccccattggtagcctttgctgctgcaacagttgcagtctcttcttcagtgttacggattcttattcttcagccctaaaaatcatcactttggaatcagaagcttgaatgatggaaggaagaagaatcatagcaaaccctagaccgtgtagcggtagtagaagagttattgctaagaagaggtctcgtcccgatggattcgtcaatagcgttaaaaagcttcaacgccgagaaatctcttctcgtatggatcgagctttctcaatcagcactgctcaagagagattccgcaatatgcgtctcgtggtatgttgtatcagactctttctctttaaagtcctgaacttggctctccaattgctgaatttttttattttgaattcaggagcaatatgatacgcatgatcctaaaggatactgtttagtatcattacctaacttgttgaaacgaagcaaagttattgagattgttgctgctcgtgacattgtctttgctcttactctatctggtgtctgtgcatcttttagcagaggtactaactttttaagcttttttgctttgtgtgacactgtaatttgatgggtttgtttgtatgtaattgcagagacgaataaaaaggtttgctttttaaatgttagtcctgatgaagtcattcggagtttgttctacaacaagaacaatgattctctcattactgtttctgtttacgcctctgacaattacagctctttgaaatgcagatccactagaatcgagtatgtctacttacttactcttgtgatgttgttgtcttgttaagttagttctcagacttgtgaaagtaatgttttttgttttgttagatatattctgaggggtcaagcagacgcaggatttcctctttttgagtctgagtcactaaagtggccaggttttgttgagtttgatgatgttaatgggaaggtgctgacatattctgcacaggataggtacttttcttgtctttattactcaaaaggtgttgacttgaagtttctcaactgagtcatagtcttgctctgcagtgtttacaaggtgtttgatctgaaaaactatgccttgctatattcgatatcagacaaaaatgtacaagaaattaagatcaggtgacttttctacatctttctatgttttctgtttgcaaatgttgaagtgagttgctccggagtgtttttgattggattgaagacttgtcactctaacttgtgcatgtattttacctgcaccagtccagggataatgctgttgattttcaagagagctgcgagtcatgttcctttgaagattctatcaatcgaagatggcactcttctgaagtccttccatcatttgcttcaccgaaataagaaagttgatttcattgaacaattcaatgaaaagcttctagttaagcaagagaacgagaatctacaaatacttgacgtgagtggttttgtctttgtggttcaagccgctttatatatttgtgtttttatgtttctaatagagttttatgttcttaaaggttcgaaatgctgagctgatagaagttagcagaactgacttcatgacaccatcagcattcatatttttgtatgagaatcagttgtttctaacattcaggaaccgaaatgtttctgtgtggaatttccgcggagagcttgtgacctcgtttgaggatcatcttctttggcatccagactgtaacacaaacaatatctacataacaagcgatcaagatctgatcatctcatattgcaaggcagatactgaagatcagtggatagaaggaaatggtaagtagactcatcatccactcttcaaatcaagaaacctcatggtctgattttgttttgctattgagacattgtcgtgattttggttgttgatgtagcggggtcgattaacataagcaatatcttgactggtaaatgcttagctaagataaaagcaaataatggtcctcctaaggaagaggactgcagcagtagtgatttggggaattcctctcgaaggagaagtgcggttgctgaggctttggaagacataaccgctctcttctacgacgaagaacggaatgaaatatacacaggaaacagacacggcctcctccatgtctggtctaattgaagctactcatcatttgttttgttttttttacattaatacaagagatctctgtatcttgttctgtttctcaattgtgtaatatcatgagatatgtaatttacttgtgtgtttgagtagcaattgtcgttgtaatgaaacagcaaatatttcaaattcgtctctcatttatgtacactaatgatttgtctgcttaatagggttaaccatttttgctttgatagacttgtttacatgaacaaataaaattggccacttaaagaagattctctcactctcgctgaacaaacaaggttttcagattgtttagtttaagtacaaatctttctaaagcacacagcataagacaccaagacaataaacttgagccatcagcttcagaactccaaagagaagcctgatcagtaatttggcagaggtcagaactgagatttgtcaaggctgtcaaagtagggatgatcgagagctgcttttgctgaaattctttctgctggattgtacttcaacatttgctgcaattgttcaaaggttcaaaacaaattatcatcaactaggaacgaaccccaacagaaagaatctactaaagagatcaagtatgcaagagaatcttaggccacttctccaacaatggtcatattttagaaaagagcattaccgtgagaagatcaattccttcaggagatagagatggaacagcacgtgataagtcttgcggctcccactttggatagacatgccagtcacgcaatgccattacacccggccattgctgctcagttggtgttcctaacaatctccagaacccaaaacaaaaccatacttcagatatattgatactagacagtccccataatccaaatgagttcacgagtactgaacctaatgggctaaagtcctaaactggttcctgtatacatacacattggcatcaaaaacaagaagcaaatacctgaaaatatgaagtagttgctgaaactcagaatcaccagggaaaagagcttgcctcctaatcatctcggctacaaaaaaatggggaaacatcagtaatccaaacagtagaacaaaagaccattaaaagagacatagtagctgattactaaccaaagatgcatccaacagaccaaatatcaacagcagtagagtaatgagtagaaccaagcaaaacttcaggagctctataccaaagagtaacaatctcatgtgtataagccttaagaggcacagtaaaagcacgactaagacccaaatcagcaatcttaagaatccctttatccttatccaatagaagattctgcggtttaagatcacggtgaagcacaccatggctatgacaatgagccacacctttaaaaagctgaaacataaacctctgcacaagagaagcctcaagcggtctaggattcgagccctttctatgagaatctataaatttcttgagatcagtgtcgagatactcaaaaacgagatagagattggatttgggagagtgagaaacagtcgaatctttcgattgaataacatgttcgacgcagaggagacgaacgatgtagattgattgagaaagcatttggagaagagagatctcacggagagccgttggtggtataccttcttcgtccatttcgagcctagttttcttcagagcgacgagttttccggtggttttctccattgctttgtagacttttccataggttccttcaccgaccttttcgagcttctcgtatttctccattgatggaggattttgaattgagactgatgaatgttttttgtttgggtcttataaaccctaaagccccttttcgattttagatctggtaaataaaggcgcctctttgctataacgtttaacatttgaatccctcgcacgcttcacacgtaccaataatattttattagtcaaagactcaaagtcattttaaacagataagtatagtataagatatttgcttgattatgtttatagatttcaattcattatccatggtgaatgtttagttgaatgaatctatgcatgatctttgatgtaaagccggccctgagtacaaaaagctaagctcatgcttgcagccacaacccataataaagatttttcagtcatttattttgctaaactattaatattacttgaagagtcgatcatttcgcattaattggttgaaacttcgagcttttccaacttcattttaactttaatctagtatttaacatactaattaataagactataactgttttagcttgtatcccattagttttctccttatacgttaatgttcaatgtttggcacaaactcaaaaaaagaatttcttactacgtagttttttttcacttactcaaccaattggaaaaatgtttaggtttgattttttgtgttcgaatttgtaacttcaattattttgggactgtgaactcttactcattattcattaatggtgggttgtttcttgtgttctaggcttctagtatacatgattcaacttcatatgatattgattcagtttcacatttttgatttatttcaactttatattcttcttacactcattccaatttcatgtatggtaattgcatcagttttgatcgatagttacattaagaaaaccatttctttttacaataaagatactacaacaacaacaaaaattctgactaggtctacgaatgtgcaaggtatgcaatttcacaaactcataaaaatcatcataagaagttctatgtaaaggggaaagaaaaacaagattataaacaaattgtgtgtttcatgtggaaactaaacaatggctgaatattaaaaaattattggactactatacataaaagaaaattacaataatgaaaaagaaaacaaagataatattcaatgatagggcattgactaaacgaaagaaaatggcttaaagactttaaagttgattatgaaaaaccgttactgatttactagggtcaataaacttatttgcaaccattttattaagggaatttaatgaaaaaaaccgtcagctttggtcagatctatttttaaattctgaactatgtttttagtaaaacaaactctgaactaaaacctgttaataaacttaaccccatagtaattaaatattaatgggatattaatttccaaaaatcgaccaaagaacaatgacagaatccgtgatccaactgaagatcgtccacctcaaaaagttctttatacacgtgaaaaagtttaaatggtaaaatagagaacaatgaattatgtttcacaagatcttcattttcaaattattaaatttaatctttgcatatttagacttgcagcaattgtcaacaagtcggacacaacaaacgttcatgcaagtgtaaagcaatgccaaaaccacccaagaaacctcaaggacgaccaaggaaaaaacagaaaacaatggatgaagagaaccctatcactcagccaatacaatcttctcttcaaagttaatgcttgacaagtctttactttagaatatcttgtccatctgaaacgattgttttttttttgtgacaaatattgttgtgttgcaacagcttcgatagttatgttggttggatttatttaagcatgactctttggattattttaagttattgtgtctttctttcagcttttaaaatccaaactaattaagcaattcaaaattatttagaatgtttttttgtaataaattcaaaacagttttaaagaacatcacgtggtttttgcgctaaatacaaatgtctcattgttttctttttaaaaaattaatatctcattaatatttaattactgtgaagttaagtttattaacaggttttagtttaggatttgttttactaaaaacatagtttagggtttaaaaatggatcaggacaaagttgagagtttttttcattaaattcctttttattaatattttttctcttccaaaatattcataaattgctttgtcttataaaattctgtacacgtaaaatggtttaattgtgtgcgttacatttgggggacttggaagaccatgagcataataagagcactcaaaatcatcaccacctaacaaaaaattgcagaaacacatttattgttaataattaataattaaaaaatgtccaggccaaaaagacagctcaaatgagcgattgcatggttgacacgtgtaaagttttagcggcgttaaaagatacggtctacgtagtcacgcacacacaccaaagtttctctccattttcttatttccttatttatttaattataatacagaatcaatcaaacggtgacggttgaattatcaccaaaaaataatcactaaatttttcaacctttgtaacagagagatccactctgtcactttaaactttttagctgattttttctgcctgagtttaattaaaaatctcctttatggaaaataaaaataacttttaatcaaagaaacaaaaaaaaaaagagatttttcagacagaagaaaaaaagaaaaaaaaagtctggcgtcttctgcagaattcacatttggtgtctgctgctggcgttggtctttctctttctctttctacttttttttggttctgcgatttccatcaaaacccttttcccaacaatcttggttttgtacagagaagaagaagaagaagaaaggcacacaaaataacccatgtctggtttatacaataactcatcttacttctctcctgctcgagctgcttctcctcagattagaagcactcctgagatcgacaggtttgttcctaaactctgatttcgagacactctttttattttggttttatgtgaaaaccgatctgtgttctgtttcttgcttgaacagctctcagtacttgacggagcttctcgctgaacatcaaaagcttactccttttatgcaggtcctacccatatgtagccgtctattgaatcaaggttcctccttttcattctgattcggatcttaatttttcaactgtatataccctttctgttttcactagattgggatgacttaaagtccttaaaagtttctttctttttgtcagccaattttcttacaaaatgttcagttttagttaattcaattagtccatgagagtgagatcaagttcattgatttgatttcttcaatttgtctcattgaatccagcattacctacgttagtactacccttagtgtcaattgcataatatgaatctttgttgatgtgcagagatgttcagggtctctggaatgatgtctaaccaaggatttggtgattttgatagacttcgacacagaagtcccagccctatggcttcttctaatcttatgtctaatgtctctaataccgggttaggaggctggaacggcctctctcaggaggtatcatcatcatcatcatctactgtttcttaactcaaccatcctcttatattcagtttcaccttcattcacaccgtcttagtttttatgctagattactacaatcatttagtttagcttctgtctttcgcaatgctgattgatattacctgtgcttctgctaagcatgatgagatgagctaaaacactcagtttcttgcagagacttagtggaacacctggaatgacaatggattggcaaggtgcacctggaagccccagttcatacaccgtcaaaaggatattgcgtctggagattcctgtagataactatcctaatgtgagtacttctagtcatcttgatgtgtttgctcatcatttgctccatatttgatgataatatttctcaactttccattcttatttcctctgttttatcagttcaattttgttggacgacttctcggccctagaggcaactcgttaaaacgcgttgaagctaccaccggttgccgagtattcatcagagggaaagggtcaatcaaggatcccgaaaaggtgagagccatgaatgaaccatttgagactgtgtcaaacactttcacagtttaacctactggttggctctgaaatgatgttctggtaattaaaagagtattgaataacatatcgtatgattgtgtttttggatgatacaatgtaggaagataaattaaggggaagacctggctatgaacacttgaatgagcagcttcacatcttaatagaggcagatcttccagctagtattgtggagatacgtctgcgacaagctcaagaaattatagaagagttactaaagcctgtggtacattttcctcctccactactctcaattatttattctgtgatatgttttggtatcagtacaaggcattaagagaatagtatagtcttccttggagggtattaaatcgaaaggacacgtttttattttaggttcttccctagctgttttgccccattgagactctatagttattacctgtagggcctctattctttgtcttagcgttcagatttcagtaccatttttggaatttgtggctagtgttcaattatgcagacatgtgtgaccacttcaccagtcaaagtagcaattggtgtaatcggaaacgccaaaaaagccatctttttttcaaacacttcatttttatgtctttgatatattcttggttagtaccataacattttcttggttgtttgtaataatgaaggacgagtcgcaagatttcataaagagacagcagctgagggaactggcattgctaaactcgaacaacctgagggaagagagtccggggccaagcggaggtggaagcgtttcgcctttcaattcaagtggtaaacgcccgaaaacaggatgctaagtagcgttttgtacgtctcgcccaaaacgctccttcaagccttataatggttacttcaaccaaaagtacatgtctgcatgcattacacagacgcacatgtgtatatctggtttctccagtagtggctgcaatggtggtggtctggtcaaggcctgccctggtctctctcgggtgagcgaccctgtggctttcgtttttcttcttctttattttaaacttttgtttttctttttcctcatcaaaaattcattacagattatttaaaaaagattcatgcaaaaaaaaaaaaaaagagtatgagatatataatatatatagggagaaaaagatgtggtggcttgggagggcgtggactgaaaattcttattgtataaacataaacaaaaaacacatttattggattgattcttatcgtttgatttggtttatttgtttctttcatatatttttttgcctagccctatagatataccattgaacttattcctttgatttgagattccttatagtgatagtcacttttgtacattttgggaatttatgggctggtctcttgaatttgggtggtaagggcttgttggttttggatgggactaggagaaactcacatcttaacacatagcttaagttgagacataccctttgtgtatgttgtacatataattgataggaatggttatagtaaattttttgattagggaacgaagtacataggattaggaatcttgaaggtacgatcccctgaatattctccttgtaagtcactccattggtcgcctacatttccccatatcctgtaaccttcttccatcatctcctttctgattcttgttttgtatgttgttgcgctttgtcttttgttatccgctgtcctgcaagtacgtagtaatattgtcctcactgactgtgactttgtcttggtaaaaaaaagcttcaaagtaagtatgcttcgtccttttacctcataatcagcctttcataaccagtgaatccttggttatgcaaattctctagtgttgcctggcgaagggtctcttcgtctcttccggttactaggaaaactttgaagcctgtttctatcagtttatagaacaattcaagaacaggttgtattgctggagactctcctttcatcgcccatgttctaaatccagttggatcataagggtcacatctacatgttaactcatcattagccacaattttctaacttttggtatccaagaatcacaacatcttaaaactagttttagtaaaaagaaacaagtgtgtatacgtacccatatctcttaagccgatagtaaaagacgtttgagaagcaagtatcatcaacatccaagatccatgcgtccatgccatcaccaggaaggataatctcattgagataaactttgatttggtccacagtcaactggacgtctctgtcatactgaccagcaagcatatatacctcaacgtaacgcagacactgcagaggaacaatgcgccacgcacgtacattgttggtctctactgctagtctccagcttaagcaatagctagcaccataatttccatccatcggcatccatgtacttgtactggttgccactgatgatattgttataaaaatgaaaagcaacgtctctctactacacttttccattgctcttgaatattcttcctaagtacccgtgagggttttatgcaaagataggtagagatcatcatgagtacaaagtgttaggaaatactagtgactagtgaacaaaatttgttgaaaaggaaaagaacacaatacaagagagcatagagttgacataaagatagagatcaagaaagagagcttggttggtgaaacaagaaaactaagaggagaaagtagtaatgcttgaaaagggaagatcagagtaataatacctatgatgtggtggtggatcggatcagcttaatagtaatgtagccgtgttatagattagtatttaaagagttttggttcggtagaagattctggatgaggtttcatccactaagtagcaccatttttacgaccaattaacttaataattatgaagtaagcaaaagaatttattacattaaaaattatgatatggggtcaaaaccagcaccgaacatattcactaacacacatctatcgccactatatgtattccaaacacattcacgttaatcctctactatctctaataatacatcattgcatttactaagtggcgcatatgatatcttttagttagtatataacaacactaagtggatgatctcactagttttttcctcacgtataatataaatttctatgtttatgatataaacccacttaaagcaatttccatggtactattctacccaagttttaggatttcactcgagagataagctggatgctgttttgaacgatcatctagtttggttaaactagttacatgtgtaagtgtctcccacagtacatgttatatagtagacaaaccaaaaatataatcgtatagtttcttagctaactaggattgccttattgctaattatcaagaaattaatgggattgtgcacaaatgtgtcaaaccaacaaaaaatggaccgaccaactacatttatggattggatgctgacaaggaatgggattgttattagtttttgtcaacagaaaagtggatgacacgtacgtagtagtctaatggaaactaagagttgtcaacgatatactaaagtggcaattccgttaagagttgctttggtttaatcattaaaaacttaaaaagaataattcagctaaaagtctaaaacattcccattaagcacactaaccaattagctcatctcattaacactcctttagatattttttttcatgttctcctgtccctttgaattttcatagatttgaatgccactcgcaacactttcttcttctatctctttaccaaaaaaaatattgtgtgagacaatgttgaagaaaatgctttgtgctttatatttgttcgttgttggaggggcggcaacccaactcttagagatctaatcgtggtgttttagacgagttaaatatttaaataaaatcaaacaatatatattagacatatcgaattatagattcataattaataaaatttagattttcatattttagaaatagatttggagtttaaacctgtatatatatatttatatatatatatatatattataattatcaaaactaaaccattaagaaaatatttggagaaaattatcacatgtggggcagattctggttcaaaaatctattgacgtacatgccaaaataaagtaattgagaaaataaatagaagttttgtaacataataaattatatattgagacaagtcatccctttcacttctaactcctcctgcatattgcttctagaagtagccgcctagctttttaaatgcttcaagtctcaacatgttttgatcaaatagacgcttttctaagctgctttgtcttttccttttgcctcgtgcaggtttcttgatttggaccaaacttggaacataagaacacacagttggccgacattttctgtctacatgtgctttgatatccaattttcttacgtatccagcttctccaatgatgataaatgttttgcgatcgaagtcttcttcaaaacccatggcgactttcttctcctcatcaatgaagaaaccttcacatatatgtggaacctctatcctaggtcccgtatccattctcaagaacatgctccacgacaccacttcagcatcaatcttagtcgtaatccatatatcaaactcattccaatctgcttcgtaatgctgaaataaagctgcaagcttctcttctttaacataagataaagttacaatttcatattcatgttccataaccttagacggcaaaggcaaaagcggcccaaatctctcgtttgtaaaatcaaaagatatgatgtgatcgacaatatcgtcttctgctttcctttctttagcacaccagtaagtgtttccgttgagagaaacaccacggtcacaacagtatatacaccagtgtggagtgacatcaagagttgtccatgaatcagagttaaaatcgtaaatttcataccaaaaatattgatttttgggtgctcctaggaaataatctacaaacctcaataattggaagctaccacgagattccttatccttgtatcctagagcgtaaatgaacctgtctttgtgtggacggtgagaatatctgagttggatccaccttgtttgtccgcaatacggattccaaacgacaacccttgtatcgtcttcttttaagaagcataacaataaaccttcacagtgaaaaacttgagatatcttgacttgttcatcaaggaaaataggttgacgtttaaacgctatagattttttattccttttttttttaaacgctttagatggatcaacgtcgtcgtcaactacgaccctcattgaataaagatcgaaattcatcatagcgatcatcatggactcctcttctcttgttgctcttttactaatgtacaacttcctaaagctcctacttttggatagagtgttccaacttttgcaagttaatctcactgctctcaaagatttcaaaggaaccctaaaaaaaatctcctctatcaaaacccttggaagattagagatcatcgtcgtcatactttcaaattgcaacaatgatttttttttttctttctctgcggcaaagggaaattatgagagtatacaccaacacaccaattgaagatacacaaaaaccctaaacaaagctgggctaatcgtgggctttagaatctagttaggcttttaatgatgttatgtttgttttatggcttcacttttacggtcctactttgaagaaaaaataaactggaccagcttatgtaagacataattgagtttgttgcatacatcagtcttgtctttgctcagatgcttaagatttatgtttcaactttcaagattttctgaaaaagatggagaacaaaacaacagtaatcaacatcattgtcatcaccaagttatcctatcaaaaaattacaataaacatttgtgtactctaaatattgtgcaaagctaatcaatgattctcaggtcccttcaaattataaaagagagagggagacatatagatttgatgatgcatcttctctgcctccaatgtattgttgagttttacaaaaactatttctttgccgccaaatctgcaccactcacgtatcttgctacaaacgagacgagcctgaatggagcaccgataagtggagcgtccgccagaggcacaccagcatttatttcgtcttctccagctactgcaacctgtgattccacgtctacttccccattcgcgttcagagagagcggcaccgtttcttctatttcaccttctgaaaagtttctctttattgatgcagtatccatgtccctagagttatcaattctaatcaactcgtcgtgtatgggtatttcttctaaggattcagatttctctacttcaattgctaggctctcaggggaagcatgctgtgattggtttagcttaatacacaattcgttcacctgacaatgtagtggtaacaaccagtgagattttcaatcagcccacaacaaataactcagtaagatctatagtagtacaccttaccttttcaactagatcagcattttcagtgataagcttttcaactagagtacaagctgcttcaatctgtgagtttaattcttcctcagaagcaccctatatcaaccatcacaaaccgtttcatgcatttctgagtttcttgcatatttgaagtattcaaagtctaacctttgcgttactatcatggttttcatgctggacttgaagattggatatagtttccttaagactctgattctgctctagaagattactcttagatttttccaactccgtaacctgccaaactttgtttaatcttcatatcagactaaatctatgcagtattatgcgtagtagcttcctgttttacacgagtaaatcactaaacattcacttaggaggctacagtgacgtgttcagatgcaatttccttggaaatgagaaaatcagttaagtttaatgagacacatacctgtgctcgcagccttgcaatttcattgttaaggctagatatcatttctctggatgacttctgcaggattaaatgtgtatgatgagtaaaacatgcccatcttattctaactcttaagagactcaacttaaaatgagtaccaagatttttatagtgtaagatagagttacctcctcagccaccaaggattcttcatcgtgttgaagttgttgaactttcttttctagactcgcctgattgaaatcatgcaatttttacaaggagaatgcattataacagaagaagatggaacccttatctccaatgaatgaagacatacctctttctgagtgaaggtagatctttcatctagcaattgtctcatctgggcttctgtgctagactgtcaaatttctataaatgtcagaactacacagcatcttcaggcataatgaaatgtaatgtaacatctatagcgatctgaaatgtcctgacaacatgacattctttcacgttagctaagaccaagtcctagtctagaatgctaaataccggtagtaggtcctaatctacatactggggagataattaagaaacaaaccaagttgaacagataaaaggaactttcatatgatcacacaaaggagaaactgtagtactaaaaaaatgatcccagtgttgaagatctctcaccatttcacgaagaagcatgtcgttcttgtttttatactgcacaagtctttcctccaacttttcctgcataaaatacaatgttattttgacctccaacttgcagatgatcctaaaaaaataagaaagctatggatacggctttatgcaattttcttcactaacttcgttttgtttgtgagcttcattttcagttctaaaatgtaagagcctttcttccaacagtgcctgtgaaaaaccatgtaattttgaccttcagcttgcagataatccagcaaaatagtaaagttaggggtatggctttatgctatttcttcactaacctcattttgtatgtgagcttcattctctgttctcaaatgcaagagcttttcttctaacagtgcctgtaatacatcatgtaattttgaccttcagcttgcagataatgcagcaaaatagtaaagttagggataggctttatgatatttcttcgctaacctcattctgtatgtgatcttcattctctgttctcaaatgcaagagctttccttctaacagtgcctgtaatacatcatgttattttgacctttagcttgcagataatgcagcaaaatagtaaagttagggatacagcctcattatttatgttatttcttcaccaacctcattatgtacgtgagcttcattctctgttttcaaatgtacaagcctttcttctaacaatgcctgtgaaacatcatattattttgatttttcagcttgcagatgaagaaggaaacagcaaagtaatgaaaaaggtttaaatctaatcttcactagcctctttctgaatgtgagcttcattctcggtttccaagcgtctaacattttcttcaaaaccagcctatcaagacaaggcaattcattctttactcttcaactgtggaaagaaatcatgactaggtggagagattatctctatgataaaaaatatgtttgagaagagaatatcacctctttctgaaggtaggaaccattttcctcacgtaactgtttaattgtttcttccaacagcacctacaacagcattacaaactagtcttgagacccaagtgaaaagatagaaaacaaaaaaaagcagactcttcatggcagtaaggaagaaaatttgtcaatatttcactcaggaaagatgaaatatactactgttaactaaaaatttatcaaccaatttatacagatagaaatgaaaagttctctttctgcatacaacaacatagttttgttgttgttctttaacctttctcttctacattagccaatccaaatttccaaagaacaattatctactctgcatacaccacaaaaaaaaaaagtacatacaagatacagtaaaaaatctcacctcacttccctgagacttgttctcaacaccagaatcatcttcctgttttaaacaagaagattttaagagtatcagacaacgacggctcatacactatcacataatttttgtcaaccatctctacacaaacctaatgaactctctacacatcagttacaacaaagtaaacacacacgtagtaaaaggatccgttccagtatatgaatcgaaatttcattcaatcaaatcatacaatgtagcataactatgtcaacaaaaatgcaactgcattgacattataaaataagaagaaatgaatcaaattgaccccaatgtcctatcatcaaccaagagaatcaatctaatgtagcaatgttccaatcaatcttagagatataatgaactcacagttgcgacgacatcgatctgatgagatgattgcgactcatcggcatctggacctccgctaatttgaggaacgtcaccatctccgatatgattttcatcgacggaggtcgttgcaccagaagctaaagcgtcgtcaacacgtttattattctgcttattcttctttttcttgtttctcttcttcttcttgtcgtcttccatacctgatccagcttcccaacgtatcagttatcgattcaaaccccaaaacaaaaatccaaactttatctcatcaaaatccaaactttatctcaacgaagtcagatctgaatgatttgaacaataggaggacgaagaagagaaatgcgtgattcttaagcttactttgcgatgaaggcgagtgataatacgacacgaaatcgaaaccttagcgccgaacgggaaaacggagaaaggacaaacgagaaagtggtcgccgaacgggaaatgttaaagtcctttcttttagtcggagcgaacaattttattaagagtttttttttttttttggcttctctctcaatttaataagagtttagaaagaacaaaaaaaaccatcttttccttgtccacgtagagttgaatttgtagggttctttagaaatgtgcaattgctcatcttccttcttctgttctcttccagttctcaatgctcgattggtgaaacccaattcagaaacttgtcgatggaggctcaaacggattcagcattcaatcctcaattgcttttggattgattcgaaaaactctccctttctcgggcaattcagttttatagagaaaccgagagacaatttcatctgttgcttgagttcttcactatctaatgaagaagatgtagtgcatcaaactgtggggagtgatagtgtagaattacctggagaaagtgatttggttcgactagtaggtgataatgatctgagcattacgggttcgcgaggattcaagcagtcgacgacaagatcgaatcttgttgctaagcaagttgttagtatacaatcagctttgagtttaggatttatctctcagctttgggttgacactacttctgtaagttccttcttgaatccaatcaccttagcgagtctaaagtctgctcttttaccaaatttgtgactgtttaagtaagtgcaatgagctctatcattctgaaatttcagtggttggttttggtggttgatgttaaaccaagcttgctatctggagaatctgagagatttctgctcacagacattgtccgggtactactatgtttggtttctgctacgttgaaagttgtttcatttggaaatgtgtttacttacatcttagtttatattaagatctctgtaggtgggtgatgttgtccttgttgataatgagactgtcttggatactgaattcaagatggttggacttgaaacactggtatatagtctctttttatgtgatgtcttgtgaatcactggcctttaagcaagtctaagattgaattctcatcttttgtttaggtaggttacagagtagttacaccaggagggagaaacattggaaaggtgtgttaataaagatcttcttcggtaatgatatctgtctctttgcttatatcttgctattagctgaatgcacatggttggttttaggttcgaggttactcattcaacattaactcgggaatagttgaatcgcttgagctcgattccttcggggtaactattataccatcaagcctggtgggtaacttaattcccttttttctaataaagttgaaatggtttatgtgagatacaagcacaagcatttaatcttggaatagcataatgttatgattacctacctggtatgtgataatgcaggtgagtacatacagattagatgtcgaggatataatcgaggtcttacaagatatagttgtggttcaagaagatgcagcttctagaaaacagaggttgactaaggtatatatatgtcttgtaatggcatgccttgggattttcatcacttttcaaatggatgattgaagaaagacttttaattacagggactctgggatgctcagtttgatagtgaataccctgatgttgaagatcttgaaagttcatctgatagaagacggcgaaggagaaacaatcgatccaaccgaaaaaagagagatttggatgatgaagaatgggacatattccgctagaagtgatacatccatttgttgccattcatcttgacatatatcttcggctgtatttgatagtgaaaatgaaacagaaagaaacaggacttgttcgcaatgcgatgggaactttaagctgtatatgttctcttgtgttgcagttgagtcagaatcagtttcaagtaatgatacttatcgaccaatatcacatacattaggctgtgaagcttcagccgtacaagatgattaaatggaggacacaaatagcaattctaaaactaaaaaaaaaaacttcaaaatttggtaaaatctgcaagaaagttgagttgacagtttggaagaagagaagcaaaagaaataagaactacaaacacctaaattagtaaatacccctacttactaatctctaagacattgaatgatatccttaaacaaacatcggagccagagcattctaggaatgctgctagcaaatggacacgaagctcctgattaatcaatcagagcctctatgtcttaacatggtctcatgaaataaaagacacagagatctcctcaacagaacttccagtggttgtcacagttaacacatgtaacataagtcgtcattggctcatcagcacttcttgtttgcatctgatagtaggtgcatttgcgctgaccacaccgcccgcacttgaactggtcggtagatgcttttgcagcaagaccacgctcacaatcaaacagggctttctctttgatctggttgttctcttgtttcctcttgtcacttgccatatcttcggcagacaatgttatgagtttctctggtgaaatctccccagtgagaaccctccttcttaagtccgggttgttactatccctcaggttgaacattatagatctgtacttaagcttctgagctccagttgagcgacccaatttctcaaacatcagtgattccactgagacagcaacacgtaaaggatcactagcatttactgactctctctcatagtcatcagcttctccagcaaccctgcacaacgcctccacaagcaactcacggattttgtcacgcacaggatcattgcatttgagcattgcagttagttttggaggagcattagctgctttagctggagctttcatacttgattggttgtcctttgagaccttttcatctttcacagcctgaccacgataatctatcttggttccattggtgactttgatgtcaggtacctttctctctatcttgacaccggtaacaactttattgtcaggttcctttctctcaaccttgatactcttagccgaatcacccctctgaagtttctgaactttaacaggagcaggatttgaaggcttctcaacatccatcttattcaccttagcctctttacaaccgttagtgccttcggttttcttagctttggctgtctcttcaatgacaactttcttccatatctcaagcagatcagtagctacgcttttgatatcttcaacaggatgttttgcaagagacctcagcttctttcccacctggaagcaagaaaagaatataactttctcaaaagcaaatacacacactatcaacattccagaggataatgtccaaattggtttgttccaacaatatcaacggggacgtacaaacaattagtcaattatacaaatcagttagctcaagcttcttcatctattgaattaaagttactctttttaaacttctataaactttttcagatgaaattaaataaccctaattaaaaatctaaggtaacaacaacacaagtcaatgcaacgagattaagcaatcaacacctagaaaaaccctcctaaatgcaacatatataaaccttttcctaaatgcaaaataaatcaatcttttttagggttacgagaagataatcagaaacgaacctgagtcgcaacgagggtatcgtatgtgacaggaaacttcttgagctgtttaagggcatcgatacattgagaaacctcaggacctgaagaggtaacaccgtcaagagccgccgcatcggctgccttcttagctccctcgaacaaatcaatcaaatcactctccatcgttccgacaatccctagctcaaaaaacaaagcaccaacaccgatagatccaaggcgactcagaacaaagaacaatccaacaaaatctctcaagtatggagagaaggattataatcggcggaacctcgtttgagtcacgacgaagaagatagatagagattacggactgaaactgtgttcttaatttattttatacgaccgagacaaagtgatcaacggtttcagttaaaaccttgaagaatcaacggtttggatcacgtggctaggtctatggatactactagattcacgcttctgctctctttctccttatcccgatattactgcatcaagcttgggctcacccaggcccttattgggccaaagtttgatgggcttttcacaaacaaaataaaattctcgtttttattggtttgttgatattaataaacgactcactaatccaaatacaacggaaattagaaggattgatcgcaaaaattgtacacaacttaaaaagagatatcaaaagagtttggcatatatgatgctgatgttgacgacaacacttcttcctcttaccccatttttctttatccttcacttcttacaaacccatcgcttgattcatcttctccgccatcttctaaggttggtcccttttctctcttgaccaccatcttgtacaagtaaaaccctagcacaccaccactgcaacagtaatccaacaaacttttaagccttctttctgataagaatcctaattaatccattatatgcaaagtgtgttttgcttttccccgtggaatatttgaatctagcaggaagtttggtcaaaaggtatgactaatcttccttcattcagatatctctttgaattttagtttaggttcttctatcaatcatcttcctatcgtgtttcatttatcaaattgcaaatgtacaatgattaatgatatggttttcagagtgtaccttgtaagggtggtaaaaaaacctaggaacgtcgatttctataaagagaaaaaggagagtgaattatgtttcattcaaagccattcttcaaaccatttgaaatataacattgagcaatgaaagttacctgagacagtagcaaccgcaactctctcaaaaatatgattgccactatagctgttgaacataagaacacggtaacagataagcgtcactaaacatgctttacatctatactcaaccggagaatgtcggaaagcctcaaaaatcagattagtgaaaaattaatttgttgactaaactcaaaatctaggattcaacaagtatctattggaacaagactcatttctagacaaatcaataatgcaacttaaactaattcattcatggttagctaatatgcatatcagaggggttatcaaagccgttcctaatcaaagcacaattctggttgttaaaactagatttcagtaactggggctagcttttgtgaatgatatgagaaagggttaatacagattgaaaaactttactaacccatctgtccttttaagaactttgtagatgactctcctttcctatgagactttagacttgccaggctcagtgcaaaaagggctccaccaagaatgactccaaacctgatggccggaatgcttcccgataccatgaagttaataaaaccacccacaagcaagagtagacctgtaaagtatacaaacattgttatcccgttactcacgaacaatgaaagcttacaaaagatgaacaagatatacaacatgtttaccataaggtattccaacatgaaaatcattcgctcgggacacatttttcagatcctcagtggaggcaaatgcttcaacaatctctttcacatctgatggagattcttctgctgctttcaaaatatattctctaccctcttcactaaccactttcgctttagtacccaactcttctttcgccttttccgcttgaatcctaagttgttcagaagtttctttcaagaccgtcatcgccttttgggagttaacggagtatgcctccgatgacacactctgcatctttgatacctgctctttaaaagactcaagagtttgtttccatgcttccttagatgtatcatcttcaacatctatatcactcttctccttccccacctcaacacctgattctccctatttgaacaatggcgataaagggtaataatcaaaacatgttctttagctaatcacagatcatttgataatttcaaaccccaaattgcacctcacttgaaattggcagattatattgcttaatcaaataaatttcaccaaagtccaatttttttctagcctcaagcaatttacaagataaagcatctgaatttcgagatacccaacagagaaattagaagttttgagcacaaccacactactcaccgaatcctcgtgggatgcagcgaaagcaacgacggatcgattaagcaagacttccggcgaggtaaagccgaaacgtattcctggatacgaaacaacagctcgaggagcactgaaatggcgtcggctagggaggagagaacgaggtggagcacagagcttcacaggcggacgagagtgagctctatagagcaaggtggaattagggtttctgatagacattaactccattgggatactcatcatcgcctgatcaaaacgtcgccttggtgagagaagtcgtcggcgaagaagagattagagaataatagagactttaagcttagggattcctacaaaagctgtgtgttgtgagtgcttcaactaggaagcaaagaatttccgaaggactactacgcaacaacaaaaatatgtttttgaaaacgacgccgtaacatttggaaatatatacctaagaaaaatatctcgaaagttgaaaagcgtctgcgttagaccctctgagcgatatagagtctttctaaatcccaaaccgaattagaccggtcgtctttatccggttgactttaatgagctaaaaacctgacttttgttctaataaaccttgagtcaacaactgacttcaacaattttattgtttgcagaagaaaagtatcactttgaaacaatgagatgataattatagacatagttacggaatttatgtatagttcaggcaaaatttagatatttaaaattaaaaagaaatccattaagaggggacaataataccatctatctaccaaataccaatggatcgcatccatatcaatttattatggttgggagaagcagaagtgaaggcatttaaagcaggatctaccaaaattccatgtaaaggacggtaatgacgaaaatgcagatacacccaattttccatcgccaataattttctttgaacacgtgtacgtatgtctctataactaaactttggtttttcatgaatttggggttaaagagtttttaacactaattatggaaccaatccatctttttctcggttatctaaacacgtgttcaatattactacaaacttggagattatatccttttgtggaaatagaaacttggagttactttatttcctcttataaattggttccatcacgtccccaattattgacgaatatttagcttttcacaaatccgaaaattagtgtggattttggtcctcagatttccgttattacacaaaatgttgccatactcgatattgattaatcagtttcatatcgattaaactaatgcaagatttaataagtaagaatatagaaaaacttaaacttcaagtactctgaaatttcatataacgttgttgcctgcgaacatagtacagacaaacccatataacaagaacaccacaatagaaaaagacaagaaattaaaaactctaaaaacaaacattcgaacatcttatttaatattaatctcatccattatataataaggattcgaaacttccggtagtagcatcatctcaccgttgctagctcatcacctcacgctgcaaccacatatatacaaattaatataacaccgttaatataacctttcgaatatttaaccccaaaaagaaacaaattatagcttaaatatctgagagagtgagagagattaacatacgttttgcagttggtgctggtgctgattttgtaaggaatattgactccacatgccttaggaattccagctgcacggccagcgttgagaccagagcctaaggctctagcggcaccttgaatgcaattgcaagcttgctgacggtctggggtcgtcttggctatgctgttgaggtttttaacgccggagcaacacgctgggggaatgacaccaccttggagcacgtagccaatgcacgctgccaagttgctgttaactgagccacagcttagcgcagcgttcgatgtgattggaccggccacaatcatgcaggccaagagcaagcatgccaacttcatcactccagccatattgatctcttaggtagtgttttatgttcgtttgcaataggagatgtgtgtagtgatggatgatgaagagagtttggggagtgagtgttatatagagtaggtacgtatatgttatgtggtgtgaatgcgatagattatagagggaaggagtagttggtggttgtactcatttaatttagaggttcctaattcctaactatgtataggaccactcatctcttttgtttgacatgttaattcaactttatcgtatggaaagttataattcgaccaaaatacattttattaacgtatttgtagtgtgacagtgcctacgtccttctttgcattttcattgtttgtttttgtaattgtttcaaaattataggtgtgtagataggaacatagttagtttacttctttttaaaaaaaattaaaatctcgtttatctaacatgaaaactgctttacaaaaagacctgatgaaaagtgattattttaccaaaaaaatacattttactaacgtactctcatgtttttttctgaatttttatagttttgtttatttatgtatttcgaagacttaagtctagttgagaaatagttattttacaaactatagatgtgctatatattctaatcgtctagtttatcttaacaacatattattcatatatatatttgcatgtgtttatcttttacatgactctaataagaatcatgctatccattgtcaataatattttcgacacgtgtacgtgtataagttaactttgttttttttacaaaagtcatttaaataaaactgttgttaagagttagtactaagaaatcattctatctttatttcggttatctattttatttcctgttataaaattatttgaacgaattcgtttctcttcggtatcatgcaaagggtaattaatttattttaaaaactgtgtgttgatgagagattaacaataagattatgattgtttggatataatgataaagatttaaaacttagacatttttattgatcttaattataatagcaaaaaaaaagtaaataacttacatttggaaagtcatgttttcgaatatactgatcaactagtattagtagatatctgacttttatcattatatagtccaaaaactagtgtggactttggttttgagattcccgatatcaaacaaaaacaaaatgttgtttacttgatacttcccaactgtaatgcaagttaatcattttggtcatatcgattaaactaaagtaagtgttagtatagatatagagtatagaataacttaaacttcaagtctgaaattcaaagaacgttgtttgcgaacatagtacagacgatcacataatagaaacgccacgataaaaaaagacaggaaattgaaaagagtacagccattcgaacatctttatttaatattatctcatcgattatataatattcgaaacatccgctagtagcttcatttgaccgtcgctcatcacctcacgctgcattcacatacaaattaacataacaacgttaatataagtttccaatatttaacaaaataaactaaaaaatttataacatatacttataagagtgaaaagatcacatacgtgttgcagttggtgctggcgctgattttgtaaggaatattgactttgcatgcgctaggaagtccagctgcacgggcagtgttgagaccgggaccaacggctttagcggcagattgaaggcaacggcaagcttgctgacggtctggggttgtactggccatgtttttaaggttagtaacgccgttgcagcacccttgggtaagtggagcacctcgggtcaagtaggcaatgcaccctgccaggttgccgttgacggtgccacaactcataagcgcgttcgctgtgattggaccggccacaatcatgcaagccaagaccatgcatgccaacttcatcactccagccatattgatctcttagttagtgttttacgttggtttgcaagaggagatgtgatggatgatgaagagtgttaggggagtgagagtttatatagagtaggaaagtacatcttatgtaatgtgaatgcaatacctaaatactactatgagggaaggagtagttggtcgctgtactcatttaatgtagacccatacgaattttaaaattggaatgtcactaaaatatcgtcaatttaactaaaaaaggctgttttagataataacgagtgtgcagacaataatctttggattctaaatttaacgaagaagataagtctatctgtgacgtctggaaatcccaatccgacggtgtgaatctttaacgaaagcctgaaaccccaacgtgactttatgtggactactactagcttgaacaaacatttggagatgttaaaaaatttcgaagtagagatttatcgtttatgaatatctttaattgtaagatgaaaacaacgttgtataagttttttttatcactaatactagtacttatcattgtattagttttttttaataataaatttcagtggatatacacaatattatgtcggtttgtcctgccctccacaggccacgccatagattgtatgtagatggttcgtcattatgtgaaaatttgactgatacacataataaatactgaatgcatgacacatgggtaggatggggtcattgtcggtttcggcctgaaatgtacaattattggcttttgctttgcaaaaccatcactccatcgtcccataactactatagtactatttctagtcttattttggtaaaactaggtgttgtgtgttttttattggtatgatgagtcactagacttttctttggtaaaattttactttatctgtagttggagatcgagagtcaatggttgagatgatcgtcgaacaatataaaaatcataaagattgtagaaagatttaaaatattaacatatattagttttagtaatatttatatatattatttacatttatttttattttagattaggaaatctcataatatatatatatatatatatataagagagaatatatcttataaagttatttttatgagaatctattataattctttattctcatccaacttatcaagttatgtagtaaaggtgttttataagaactaaaaagtgtcaagaaacacaattaaacatggaacgatcgaccatattttcttgtaataacagacttttacaaatacattttttattttattttcaactggtgtttttccggtccggtgatgtgtttaaatgtcgtctatttggctaaagaacacgtcgtcaaaataagcttttaaaagtttcattcatgtttaatcattttctgtttaagaagaacagaaaaatcgtatttactgtttaaaatttttgtcggtgtctgaaaggctacatgattatatacttttcccttattttcggtaaaaacttgataattaggcaccgaaatgccacatgcaacatattatatgtacaccgaacacgtgtgagcataaagtacattggtataaatacattacgatatagctactcatacttattaaggacctctctatacgtgtaagaaattgcagtatatttcctgaaacatggtgaaaaatgaatgcctcaagtctgaaatgaaaatgacagtgatgtagacgtggaaaagtattaagagtgattttttatcaattaactttgattcacaaaacttatgattaagtttcaaacgtaaaatgtaaaatgtaaaatgctacacaatttatgatggatatgaagaacagttgtcaaagactcaaagtagcttatttaaactactaaaaccacatatgattaaatggggttgggtttgggccgaatcgggcttgttgcttgttctatacactattcaaagccatttggataaaacatccatcttcgtcacaactgtttgttaaacatccatttggtggtgtgtcacgtccttccatctgatcaacaatgggtttgtagtcttctggcagacccccgagaatgtaatcaacttgatcttcatggtcaatgattttgccaattaatgccaactgatcaaatcgattgataaagccttgaacgtactcgtcgatggtgcgggtgtctttcttccattgtttgatttggtgttggagctgtttgatatggccacgactcggtttggcataggtaccagcaagagtggcccaaacatcagcagaggtagcggcgcgggacaccgttggttggacggtgagagagagagtgccgatgagagcactgaagatcaattgatcttgtctactccaggcttcatactcaggattcacagaggcaacgtcgttgacggtaatctcacgagctggagcagcttttgtcgcatcaaggtattgagtgagaccgtagccgtgaaggagagcgtggacttggcggctccacattatgtaattggaggccgtaagttttgtcacattcgacatgttcatgtgaacaatggaggtgttgttgaggttgacggtttcagaagaaacattcgacatggttgaagtttgaaaaacagaggaataaaaaaatcaacgggggagaagaagaaagaaaggagagaggcggctgtttttaggttttttatttttaggtatcgatgatgctctgataccatataaagaatatagaattggatgatttgtattgagatgatttacattgtttatatacagactagatgttctagagacttctaattacagaatatatagtttacataagtagaattgtgattgatcttgattgatccttgatagattcgtcacaactgttctcactacatacttctgcgtgttagaaaaagctaagctcaaccaattaaatggctgagtcttttcacaaaatcttagttaacagttcggacacaaatctatcttcggtatttttagtttgccaaaaaaaaaaagtttcctatatcattaacaatccgttaaaaattgtcgattgataattttaacatttctagctaaactagtcaattcgtattttgtagtaaaccaatctccagatcattgctactcacatcatcatcgtcttgtacttcagcatggacggtttcgtcttccgaatggcttttgtcggctgcagcggaggtaagttcctctgcccgcttcacttgatgagaccagtccgtacggattaacgtataaagcatcattaccaaacacgtcatctgcgcagataacagtccaaaccatagcccacgaaacccaaccttaaacccaaacgtggtcgtaactgccacaggcaagcccacaatgtagaatgcgcataggttaacgcgtgctccatctttaggcctagccgtcccagtcaagactccgcaagcagccgtctgtggcgagtttccaatctcgcaaagccccaagatcggaagcgcagccgaaataagcccgagaatctccggttcgtccgtgaacatctttccccaaaccgacctaagcgcggtcacaaaaacagcagctgctaaaccgtacgctaccgcgagtatcaagccaatcacggtcgtacattgtgcccgtgttggttggccgcctccaagagcgtgacctacacgggttgcaatggcgctgctaatagcaaacgggactacgtatagtatcccggtggtctgaatcaatattcccatggcggccacgcttgctttagggttcccaagaagcccacaaagaaaaagcatgatctcataccaccaatactccaaacacaccgagatagcgcttggtgcggctagagaaagcagcggccaccagccgcggaaaagtgaccgcaaagcgagcccttcccacggtttgattagagaatccgagaagcacgtataaacgagcagtcccacgtcgatattcatagtgttgaaagccattgcgatggccacacccttaacgcctaaacgcatacgcacgacaaagacgtagttgaagagaggatgaagaagaatggatacaatggcagatatcgtgagcggtgatgttaagccttgcgttctaaggaacgttcgaagcggatggagcatggcctgagccaagagctcagggacgaagaagagcatataggttttggctaccttggtaatatctgggtcctgacccaaccgtaggaaaatgggttcgatgttgagccacgtaacggcgattggaacagagacgacaattaagagacagaacattttctgaaacgtgtggctaagtacggtccaacgtttggctccgaaggcttggccacagattgggtccataccaacggaaaggcctttaagtacggagactccagtgatgtttccaaagcccatagcgagtgcaccaccagcgagttcgacttttccgagatgactcaagaaccacattgagattattgatcttgagaatatgaggagtgatgtcatcacaatcgggcaagctatttttgtgagtgacgccatctcctctcccacctgcatgggaaaaataaaattaaaaaattatgttatttttgttaggtttttcaattgaacaactctttattttttcacatgttctataggcttctagttctagcaaaacgcactcgagaagatattagtgtatagaaagagcgcaacacgagtatgttgtatattaaaaaaaaaaaaattatcctcaaaatatgatttagtctttaatatccttttttaatcatgtttaatattttgtacgtgatttaatttcgtttaattaacgatattgcactcactaaaaatattaaattttctggtatatcatttattaatatttttatcacaataaacaaacaaatttcttttctaataagttgtatgaaaatggtatttatatgagctttttatacatgagttattaaaaaaatcattgtaccttaattgtttctttttgtcaaataaaatcttaaattaattttattgtgaaacagaaggacattacattacaatacggaaaatgatattttatcatattataaaattaagaacaatttgtaagcacgaggaagatggtcgcatcacatggccactgggactgggatgagaaagttgaaaaaggaagagaaaaaggtttaaactctataacttttagaactgaatatataatcaaattcacaagtgccagaaaagcgaatggctaactgtaccaacattctaggatctttttaaataaaaatcatcatgggtttttaaaagctcaccttttttgttttctttttgaaaaaacaaaatcagcttagatattacctttcatttcatgatatcttcattaagaatatccacattttaaaaacatataaaaaatattttacgcatagatacttgtaaaagtatcatgaactactattgacatttcataaacaatcggataaggatttcaagaaaataaatcggaaagtaactagattatatttgtactaagtaaagaaactgataaaaagaatagagtgagaggaaacctatatagaacactttcctaagtaagtacaacccaactgtcaagaaatataaagtaagtacaacacaaaaagcatctctttcagtccatgaaagtgaggatttatcatactagtagtaagtagtaacgctttaggcataaatatgaacatatatacacatatatatatatatatatatatacagagaaaacttatatataaatgaattttcaacattgtatttctcaagtacgtgaaagatagatgaagcattattcatgctatgtttttaaaagggatgcattatattcggttaaaatgctataaaaacagtcaaaagaagcattcaatccagtataagatcaatttccaagaactacatattatttaccagacccaaaaaatactgcgaaagtgactgaaaacaatataataatccatcaaaaatcaccaaattctctggttaaacgtagcaaacgtctctatattaggatggtcctgatcacgaaaactagtagtacaaacaaaaacacaagaaaactatgaaatcaaagaataagcagagtgatgacttgtcaaagctaattggaatttttttgttgaagaaaatgtaagaacaagaaaagagaaattaaagaaaaagaaacaagcctcattgaaagggatgcgacggagaccagcagagaatttggcgctgccgctattttctcctttgacggatgttgaaacatcgcattctccatttataatctctccagattcactgctttccatgttagacctgcacatgctcatatatatttgtatatactatatactatatatcacacttcttcacttatatcaaagagatttatatgttggtgactacgaaaaaagggttgccatagaagctagctacgagtttgtgtgtgtgagagagacagtgagagagaagaagaatgtcttaagttcccctcgtatttatgtacgcttccttagtcgtccactctaattaatttcatatttactcgtcttttccttatttttttgaactatttttttttttttttttttaaagttttttttattgggaacatctgtttcttcgtttatatatgtagccagttgagtttttgtattaataaaaaattccacatagtcagtctcttagactgaaccaatttactaaagtgttgcctttatacattctacttatagaaagccttgttgacacttatagtaaaaaaacaaatataatactatgagtttacacttatagtaaaagtaataatataattgccaactcttgcctttcattatattcttctctttgagattaacggttgaatatttgtttcatgtatataacttttttacagatgctgattataattttcttctttaattcatattgctttgactatcattttaggtattaatgtgtagatgatatccgggatctagtgattactatataatttgtgtttggatcttacaagtatcctaggaatgaaatactaatgtggggtatatgcttttgtataatttgggaggcgtaggatgtaatgtatgtttgatttggataacgaagagaatgacaccaaagatcaagtacaattatccactatatattatttgggaattttgaatttatatatatatatatatataagaagatcaagtaccaaccaaaggagaatgccattcatgatgaaagtggagaagtaaacagctttgcgaactctatgtatatcatcttttgagaaagcttgtataattaagaatggatgaacattcccatcgataactaggtacacaaaagatataattctaattaagtgaactgatacacatgtttgaagttatattgcttaatttttttcctaaaatataatggagacgatttgtcctggttcagtgcatataaaaatgagaagacgatgtggaatacatcgtaaatctcatgatggtcgcactataatttttgttgcagctgatgtacttgaagactcaaaacggtaatggatcaagataatgtccttcatgaatgtagcaatgagatgttatatgggggctctctacattaatgtgtgttattctgttatatatttagatacaatttttcaggcccttttctttaaaaaaactcaaaccatatacatccaatttttttaagatgttgccagaaagttgattaaactgtccactgaaatgacataaaattacatcagtaaaacgatttgtactaatgttgatgtaatgttttttaaaaattacgttatgaaatgagtttttatattctttgttacatttatgattccttctcccaatattttttatatattccgaatcattttggttaacataagaataaacatcatgattatcatacattgttgaaaggaaaaaaccataaaataaataatggtgattaagagcttctagttgcatgcaatacacaagttaactataaatttattggataatgtagaaattgtgtaaaaaacaaaaccaatgatggtgtcatcttaaaggcaatttagttgcaattctcttaagataagtaaatttcttcgataaagtgaacattttcgaaatacaaaatcattaggggagatgcggattgtcttcccagaagcatgcacaagatttcataagctatttgatacattcattacatattctttgatagcgacagctttgggtgtccccaaaacttgttccatgtctccctacattcattacctacataattttaatatcgtttgttagacaacaaacaacttccttttatatgtatttagatttaaatattattctataaatagttcttggcttcgtcttattcgttttgatagttaaaaatttgtcatttgtatatattgcccgaaaaaaccgatggagtaaaattttaattagtaatctaaaggggaccattgtcgaagcttactaacgtacggaagatgctatgactaaccaattagtgtataatcacatgcccttcaaacctcaattatatatgcacactcacaagtcacaaacctcacttatctttgcttttttttgtatcttaaaatgtagattacacacttgttaacttagttggtccacttatctaaatttttaaaaacaagtataaacgagacttggttggtacagattattactttttaattactccacagcaaaaattggaactcggagacagccaatagctattatgatatacacttgtaatacatacactaataacgacccttcaacaatcttggggtttttattaacctactttatacagtttgtttctgttagatttgatcattcatgtcaacttcgggctatttagtattctttttatatacatttcttggttagaagtagtttatggggtttaattatctttagtatcactaaaagggcagccataaaagtaagtattaaaatatttgatccaatcacatgtttccacttcgtttttgtctgttacctattttcctaatatatattctataccataaactcaataacctaaatataactaacaaacaaagacatttataaactaaatgtttactcaataatattcaaaagctatatttgtccttgagattaattgcatttaaaaagattacacatctggaccagttcaaacattaaattgtggcccacataatggcccagcccaaagtggcaatatcatttctctctaagcgcgttttccatctgacataaatcatattcaaatcttccacagcggaaatgaagttagagaaccatatgatcatcatcataaattcatcattaattatatacattcaaaatcagtaatggaccctcactttctctaaccaaagaattaaataaataaaacaacaacgaaatgtgcttcttctaataatcgaacaagtcttgttgatttttctttcttcttggggcggatcataatttagaaccgcccgaaaccttcggatcctttcgctctctccaatggctctgatgcgaaccaggagccagttgaacgtatcttcattgactccaccacctcctcctccgtctccgatccctagagccagaggctctcgttgcgctgccagcgagattctcaccgagatcattgagcgatcgattcaggttcctgagctcacgcttccggaatctcattctggaggtgaatcttgcggctcacgtcatctgatcccggcggagattgattttaggttattggcgtcgaggagagaaggttcggtggatcggttggtgcgatcggcgagagagtttggggcgtttcgtgtgagttatcatgggatatctggggaggagctgaggtctcttgtgagggaatcgggtcgggttttcggagttttggagggaagagacaccgggtttcaccggagtgttgtcggaaacagagacgagatcgtgtgggtacggtcgtggaaggagaggatggaatgggcgcgcgagtatatcggaccggaaagataccgctgcttcaggtattgggcccttaatgggcctttctgtcactctctgtttgattgtgttatggagagatctttggtagatgaagtactaactagagctaaataacaatttgtgaagaatcaatacaaaaaggctataacattcgttttggttatacaagtttcgtttgaactagtgattacattttagaaatttttgatgaacattgcatttgcaaaaaaataattagtgattgagaatttggttccaatttcttgaatctttaatttggttgcagccaagaaatggagaatgtagctgataaacttgaagatatagcgaggaaactagggcaaataatggtagagaactcaagaagaccaaatgataagaagatacaaagaggagaatctgtgcttagcgtttacaggtacaatcatgaaaatgtaactgagcaaagccctcctttgcccaaagagaggaccgaagaaatgcttcattatacactcagccttcaccttccggctaagaactgcgagttccgcgtcaactcagggaaaggtccactttctttccatgctgatcccgacactatccttgtcacttttggtcgtcagcttgaggtatgaacgaacacttaaattaatactatatatttgttatatgatgtgatcaatcaattgtatagtaattttgtaataaatctatggaactataggaatggagtttaggagaattcaaatgtcgtcaaggagaaatcatctatcatcctgatgcatatggctcgcccacttccttctccgtagagctcaagtgcatgtctcttttcttatcacacacttctatcgcaacaacctccaaaacattctctttaacccatcagattttcactgctttcctcctactttttttcttccaatgtttttggatttatggatcacgaatggccgcttagaatactcatatatgtatattttctttttgtgggagggatgcgttcatttgaatcgtggatgatcaacgggtaaaatgtgtttatctactaggtgtaagcttcggttgtatatgtaaacccaacacataaaaatttgttgctcctaaaaaaagaatgccaatatagaactgattgagtttttcctttgtttggactcatatcgactttggatattaacgcaaattttcattgtaagcaattcgtgtgttcttgaatacgttcttcctctcttctgatggggttgtgaattgagataaaataatttgtcataaaaaaaaaagatgtaatgtaatgtcctaattaaaactttgagaaaatagcaaaagcaatgcctcaatatgtgactttttttttttttttgagttagatcaaaaaatttgtctaatcataaaaccatcaatttttttttttatgcttttgttaaattcttttcgtaaacaaagacaaaatgtcgtagaaatcttctgacggttggttttacaaactttgcttcgtagagtttttttaataacatttttaaagaaatcacacaatatatgacgatgcgtgagaaagaagaaacgtcttaaattaagagtgagggtgggtgtacggacgatgtcgatggctgacgtacaccatcacggtggtaaagacggtgtctctttgaagtagatgtctttattcttgatgacgataacaatgagaagatcaatattcaataataaagcaatggtgatgtatttgtttttcaaaagaattgatgtttttaaatggatcgatatagcacataaataagttgacttggcggttgggcattatattcgatgtgatgattcgatggttggtttttccggttgggtatgactccacaatgacgcccggatgtcatagtctaaatgactgtgtgaccgtacgataaaatcgagataacttttgaagtttggttgggtattactgccgactgttaggtgttaattttcattcagataaagtcaataaactaaaaggcaaatagatagtaaataccgttacgaaagctaacacctacatattggaacacatgaatgaatgagcaagagttgttttctttattcgttttactttgtcgagtttttgcttttgcatatttcctaattctttttttagaggtttcttgtttttggtcaaaaatttacaggtttatgataatgttttgaacaagttcacgtgtaaggattaattttttggctttttcaacaacaaaaggggtactagtatgattttaatccacacacgaatgacttggatccacgaatccaacttcaaattaattataagaaaaacttaatttgcccatcattaatccttagataacaaaatttccagctattaaaaagtaattattatatgtggcattgaatttcaaacaacattcaaatttaaatgttattattttgtcactcaaatttaaaggttatttattgactggataatgttcttggtttgattgggttgctacggttggatgcggttaaagaccaacaatttcatcagaattaaggatggttgatttgtacccacgatataacattcgtgtctaaacatctttacatgcacatgcaatgttgcgagatatagttcacataaaatttggtccggttcacttgtcttgatttggttgtacacttctacctgatgaatatatattcttatgttttaagaaccaaatcatatcctcagaactaaagtaccatcttaaccggtaaagaagcttaaaacatcgtcatgtatactgcttagcattctatacaaagtaacgtcaatccacgttgtttttttctttcacattattcaaatatttttatatagacgttctttttatttttgataaagtttttatttttgtcaacgatgaacgtttaaaaaaaaaaaatatgtcgagttttcccagctcctacaaaaacaaataaattaagactttaaatcccacctggaattagaaggttttggttgacctgacaaggcagatgtttggtaacaacaacatgaaccacacattggggaaagaatcatgaaaattccttgaatcgtaaattatttcaggagaaaatgactctatctctaacctggttgatatatcgcaactaattcaaattagtaaaaatcgaaaatgttatcgcattttgaaattgtcttttgtgaagattgtttctttcatttatttgtttaatgcattttataataaagtcaaactattttaaaatctttgtttaaaataatagcttacttacgtggcaagttgaggaatttcaataagaagaggcaccgcgcgcatgtcttttacaattcctagactgtttctctttactctgtttttttgctctgttttttttgtttgtttgttaatggccgaagactctaattcttccgaatcaatcattgttaacgtcaccggagatgataataagtcggctttgttcggtaagtacgatctcggtaagctcctcggtagcggcgcgtttgccaaagtctaccaagcggaggatcttcaaaacggcggcgaaagcgttgcgatcaaagtcgtacaaaaaaaacgtttgaaagacggtttaacggcgcacgttaagagagaaatatctgtcatgcgccgcctccgtcatcctcatatcgtgctcctctccgaagtcctcgccacaaagacgaagatctacttcgtcatggagctagccaaaggtggtgagctcttctcaagagtcaccagcaaccgtttcacagagagtcttagccggaaatatttccggcaattgatctccgccgtgagatactgccacgcaagaggagttttccaccgtgatttgaagccggagaatctcctcctcgacgagaatcgagatctgaaggtttcagacttcggtctcagtgcgatgaaggagcagatccaccccgacggaatgctacatacgctctgtggaactccggcttacgtagcaccggagcttcttttgaagaaaggctacgacggttctaaagctgatatttggtcatgcggcgtcgttttgtttcttctcaacgcaggctacttgccgtttcgtgatccaaacatcatgggactctaccggaaaatccacaaggctcaatacaagttaccggattggacatcttcagatctgcggaaactcctccgccgtctcttggagccaaatccggaactgcgaatcaccgtggaggagattctaaaggatccgtggttcaatcatggagtagatccaagcgaaatcatcggaatccaagccgatgattacgatctggaagaaaacggtaaaattctaaacgcgttcgatttgatttcttcggcgtcgagctcgaatctctccggtttgtttggaaatttcgtgacgccggatcattgcgaccagtttgtatccgatgagagtacggccgttattatgaggaaggtcgaggaagttgcgaagcagttaaatttgagaatcgcgaagaagaaggagagagcgataaagcttgaaggtccacatggagtagctaatgtcgtcgttaaagttcgccggctaacaaatgaactagtgatggtggagatgaagaacaagcaaagagacgtgggcttggtttgggccgatgctcttagacaaaagttacgtcgtttgattaaccaaccggtttataaagttcctgacaaaccgtaaaacggtttcaacactaaaccaacaatccgtgcgttttacttttagaattttcaacgtactacactcgggatcgagacgcattgtggttaaccggttcggtttacattggagcagggagagtaatgggacgatccgcctctttgtatataaaaatgacaagaagaaagaaaaaaacaaaccgggattcaattatttttgtttatttattttcggagtataatttaaacacaaaaattatttgctttattcatcggagagaatttgaataaaactctgatttgaactttgtagccttttatgtgtgaccgtgtgtgtttgcaaacttgggccttattttgcgctaagggacatgctacaccgtttgtaatatttatcgttgttgattttgtttggcaatcgtacgaagtatttcaggatcttttatgtatgaatgtttatttgagtttgtattaaaaacatatatatgaatgttacagattaacgaatagttgtcactgctgattaccacttggcaattccgttaaaacatgattggtatatataaccgtacaagtctataagatagatcacaaaattctagccaaagcatcaatgttttatttgttttggggagtttgtggtccaatgctaattttagaaatacaaaaactatagcttccaacgcatacatttgatttgacatagatatattcagtaactttctataacagaactagataacctatgttatttggatagtggtgtgatcccattaaaaaacttactatgcaaattaaattagtcgacgtcatagaaaaagagagagaggattgttataaagcaatatcagctgtcggtaattacgtgttaagtgtatggtaagtctatcgaagctatcagagataagaaataagtatactcttatgaaattagcaaagttaaattgtgtgttttgaaaaacaaatgacattaaaataaacaaaaaataaatctcaaactcacgtcaaacacacgaccctaccgtaactcgacgtgacgctaacgccaagctcagaagatttagtgtggtggtggtcaatgcaaatgttgataattgtatcatcacgttgaactctataaagttttatttatttatttttcttttcgataaaaaaaaaggttgtgaaatgtgaactctaataagttcccaaagccattacaagtctctcacattaaaaccttcttcctccattaagatcaaaattgttgttatatttgttgagctaagaacaaaacagaaataactgtttttacagttattggtcggacaatagactcaaaatggattggatttgaactccgtaggtaacttctctagtggactcaacaagtcttgaatcatccccttatcattgaaagcatctttaagattttctttgccttggtcttcgtcattggtccaattagaatgggaacttaaactgcctcgaatgatttggtacttctaatgcacacatcattgatctagacttatggaagttcttacttatgctcttcatattgacaaatgacaacaatctatttccaagtaatttccaatgaacttgtttttttttgttttttttttgctaaaaagaaataacaaatttcagtttttataatgtttgtttccaactcttgttatgtaataaagttaattaacattcctttatacagaaaacacaatcttccaatgagaaaaaaaaaacaaatcaactgtccataaattctccaatcagactttgatataaagctttccataaaaagattgtgaagaacaattccattcttagcacaaaagttatggaattgattaaacatcccaaatcctaaaaccatatattaccatatagattagaaaacattatcaccatagaatagataaatagatatagaaaaatctcttaaaaataataccaatgaaacacaatgatcctgaccaatgagcatgcttcgctgtctaaatgcaagccacgattaactaacacacatgacacagaactgttagtcttaatcacattgcttaatgcttaccaattaccataaatcactcccgccaccacgcgttttcttcaatttaacatataaaactcgaaaccttaattacgttttccaaaactaatcagtttttcttttcttccaagtttgttattcctcgtcccgaatcttcgcattaaaaacagaaccaattccgaccaaagttttgagatctgtaatatgacgaatcccgataacatgaaaccggttgaagctactgacgtggaatctgcggcggagaagacgtcggagccgacgccggcatctggaacgtcgacgattactcagagatggaaaagagaggatttgataaagaaagcatctccgattacgagaggaatctgtcttttgttctctcttattgctttcttaattatggtctctaataaacatggttacggtagaaacttcaatgactacgaagagtacaggttcgatttccgttttttgatactggaatttgaaattgggtttgcgtaatatcgatcaaagttttgaaatttcttatattgcttcagatatgtattggcgatttcgattatttcaacattatacactgcgtggcaaacatttgcacatttctcaaaaagggaaattttcgatcgccggacttctattttggtcgatttctccggcgaccaggtaatgccacaaactgattatcaattctcagatttatatatgtaaagttatgatttttatgcaaaaaagtgaaatttgcagattgtggcgtatttgcttatatcagctgcatcatctgcaattccattgacaaacatattcagagaaggtcaagataacattttcactgattctgctgcttctgctataagtatggctatcttcgcattcattgctttagctctctctgctctcttctccggttacaaactctccactcattcttttatctgaagatctctttgcaataatgtgcttcagtagttatataccattgtgatctttgttatacatgtaaatgtcaattcttttatgtgttcttatagctgatatcaacttctgttatttgggtctgtcagactgtcactgtgtctccctgtgtcactgtgtgtgtgtgtgtgtgcttctttgattcattattcaaagtgaagaaactgaaaattgattggttttattccgtgttctagttctatggtacaaagtacaaacattaaacatattacaggcgtgtgaaaaaacaaatgaaaaaatttctctatggactatagaagtctgacttactatcctgcaggataactagtaagtagtaaaatcctttggtggcagaaatgtacaaaaggaacataaaaaaggaacaactggttccttttttcttcagggcataaacgaatcgaaaaatgaggtctcctcgtttggttcttcctttgctctagagaatccaccaccaacaaagttttgttgcgtttgaaggttgctgttgttgttattgttgttcatggcgtaaccaaaaggcccggtattagtgttgttgttgtgcagcatctgaagtgtatatggtgcttgagaagaagtagtgtagttggagtgaccagcaatagcagctggtctaatcgggactgaagacgaatcctgtggtgctctgtttgtggcgtaaccgctaccacgagctgcaggaacatcgtggttgtgtttcccttcgtaggttgtgattactgctctcatgtcgtgtgatgctctctccacatgtttcctcactggacaaccgatggttgtgcacttgtagtagcttctgttaagattcagcaaatgaaaagaaaacaaaaggtcagattctcaagaaccttaattctgagttattgagatgcacaattgtttatgttattaccttggatttgggtttcccttaacgactttctggccgtattttctccatctgtaaccgtcgtcaagaatgtcaatatcactcgttgtctgcactacgattctcggctctctcactgtcttgcttccaccaccattcccaccatttgtttcattgtcccctttcctgaaaacacaaaaaaacatacattttagaactttcatattcaagattgttcaaagagtagcaaatttggagggtgatgatgatctgtaccatctctttgcttcaggttcactcccacaatcttcttcgtctctgctgacaatcgatgagccttgttcgaactcatcgtcaccaacagaatcagaagtagtattatcctcttgttgcatcccaaaggaatcagactgatgaaagctattattggaattaggctgatcagaagaagctt

SEQ ID NO: 347 - DNA, 21988 bp, Arabidopsis thaliana
ttatgcaactggattagtttttttcataaacccccaagagggaagaagttgcatgtccaatgttgttaagttagggtatatagagccacttactccagattattagaggtaggagtgccagaaaggtttcatgggtttattatttagttcgcataccatttagtctactgtgaaatatgatgcatcaaaaatgatttgttggttgtattttccacattttggattgttggctataaccatcagctcttaacttcgatggttttggagtgtatattttcctgctggcatctatggtctcaagtaatgaggattgagatatatacttttcttgtttaagtttggtggtggaaggacactccgaccgggggattcagttgagaccgctgaagagaggattgtgagagaagaaaagacaaaaaaattgctcatagcctacaaggaatcactcggactgaacattgatcccaaactcaaacttgagtgtgagaaggtactccaaatacatttttgttcttacaacttttctgagggcagacctgatgctgaagttaattttgaagtaatattgcaaaacaatctcatttacagaataattttgctctcaatgagaatgcttcaagctatatcttaagaatttctagtcgctgtctttagaatcttatttatagatcatatagagcaatgatatgggttcagctgaaactgtgatatggactcatgtttactcaagcagattctcttatttaatatgagatttgcacgttgccacattttctagaaagttgaaaaattgatttgaaaggagaagaactagaaaaggttatgtgctttatctacaggcatgtcggctcctatctgtgtttcaaggtagctagaatcgttttgctcatcattcacttcttctcttgattgtgatacttcaattataacaggcaatagacgaggggaactcgcttatggattctgggaaactcaaggaagctttgccatactatgaaaaggtcatggagaaaatagttttcaaggtaatttctgcaaatctggtttattattcatcttatactcatgtctacgtttatgcattagtctactcataccttttctacatatgccttactcgttttgacaacatgaaaacttgtttattatctacggatctacccatcagtatgtatgtggagcaaaaattcaacaagcttatataacagccaaccacataatcagtaaaagtaacttaaggacctgattattttgcattaattagtttcttgctttgttgggtgtcactttatcgaaatcttaatcgattgatccacctagatcacctaaagttcttatgttcgctgtagtagatgtgaccttaactagttccgagtttagttgtgcagagtgagcttcatggactagcggctttgcagtggtctatttgtcaggattcacttcgaaagtaagtttttctctcctaatttcgcttgatgcaactacaggatgacaagtatttcttcatgagtatatatttgtatttgtaaaccgtagtcccaaaactctatcaagctccaaaagtccccaaagaaaaacacaaaatactagtttatacctaccaaggtgatgcctcattcgtgaatgttctaaaatatcctcaaaagtagtcttgttgagtattggccttatgggatcttgtgcgttaaaatcgtattttgggagtgattgacaggacagacaaagcaaggcgcatgtatgagaagcttatttcccatccaaacccgggagtgagcaagaaagcgaggcagttcatgttcagttttcaggtaagtcaaacacccacaaaagtattataccaacaaagcacaacaagcagatgagttgagtttgctctatatttgactatgatcggacaagagccaattcaactctttttgtttgcttattgtgtgtctaatgataaaaagagttggcttaagaaattgttttccctgaaaaatgtgagggtttttctttatacacttataggcaatggagatgctgaaggttaaggggtcgagctttgctgaaggaaacactggttatcaggactactttgaagcctttgttgaagataaaacgaattacaaagcgcaggaggaaaaagaaggagaggaaatggggataaatgagacactcctatatgtgattcttcttgcttctccgattctaatggtcttcattgtagctgcacagagagggtatacacactgaagacacaaattcttgtcaatttcttacatgtaagtgttgtatatattatgaattaattcattttattacagttaaggattaataacacaaagcttcttttattaattgaaagaacataacagaatcagagaatcaaacaccaaagagaataaataaacaaagctagttgatcctagtttcttctacctttggatgagtctgatacttcatctctatagatactaaaacataaaacaaaccccactaggaaatgattgaataaagaaattgaaatccatctttaaaacttggaatccccaagttgactcaaaagtcttaaccacactttacacatttcattccgtgtagcaaatagtaacggcttgtgcaatgctaaaccctgaggagtcataagatttgatcatccatggccacaccacatgtcacaaatcttgactacttcttggtctgaccctgaccagctgccgagccacctttacctcctcccgcagaaccagcagctccaccagcattaaccattgtaactttaaacctttcatgtcttagatctgatggacccaaattaacccctttcgaagtgaaacgtggcgaaccagcactgagactcctccgcatagtcattgactttgtaggaggacgagaatcttgtttaatttgggacacagcgtctccgattttgttgaagaaaccaagaaactcgtctttagctgcacctggaaacatctttttaagcagctgaagttgtcccacgtaaagctctctcatatactctaataccatcagtactctcatgtccatccttgatccctcatcctcatcaccatcaccatcaccatcatattcaacatcatcattttgttcgtcataaactctgtggtagctatctcccatgtcgctgtactgtctcttcatactcccacttctcaaccttttagattcagggtcgtcaaacaatccaaagaagagactgttcttgcaattgttgtcttcgtcctttgtggattggtgattctgagaattgatgttaagatgtttcttccccatagacataattttcacaatcacaacagcaagaaagaagttggccaaatcttttgagcagggtatcttttgtttcttttgttttgtattgtttagagtatgtttcaagatctgaagaaggaagcaaaaatatgtttagatataaaaagaaatgaagatttggaagcaaaataatggggagaaagataagattttttgcttgttcccgacttgtcaacacgacgttgtcacgacttcttcaacgaagactagatgggtccaaagcatttgatttttatttgtttccggccaatcatgaagcgacagtgtatgtaattgtcaccattttgagtagtttcttgggagaagctgcaacttcggagataagtgcatacattacacatttttcataacgtgtagaagaagtaaagattgcatgtaaattacattagtatattcataacggcggagacttatctgcttctgatagctcaagttctggaagataaagtttacacggataactaacttgtatttcgaaactctataattattatgtaatcaaattcataaagttgcatgtatttttataattttggatttgtgacaacattattaaacacttaaacgaacgatcatatagtattcaagaaattcacattcaattaaaactctactgaagaacattaaacctgataaaacaaaataggtttattgaaagtactctacaccccaaatatggtgataatgttcgtattataaccttttgtttcagtttcactttcaattaaaagcattatacattcatttattagaaaactagtgtaaccattgtatttaatcaatatcggtctggtatacacctgagctggttatctgcgatttaagaggaattggtgaagaagacttgaagtagaggagagggcttcaattcaaaggagagcaaagtaaaaaaaaaaaaaaaaaaactttgaacaagtcagagggtttgttgttacatctgataacagataaacagtgtataaatactctgttcttcacttatacttcttctatgttgtatccaagagttcattgagcctaatctctctcgattcttgcttgctgttcatgaaatttgagatgtaacaaaccttctctgatagtggatttttgaacagaatttgatctaggcttaatggcttatgatccaatcaaactagctagtatgttcttttcgaatatgtttcatcagtctttcttgtgcgatttcgttctataaatcaattgcgatttattctgtctttgagagattatgagtttgcaacgaaactaagatatgtttagtccatggttgaatctaacacaatcaaataatctctatagaaagcaatatatgtgtgagaaaagaaatgtcatattatatttgtcttgacacacctttgtggactaaaccaaaactttaaaaaaaaaaaagtagtactttgtcggttcacaataacaaaaaaaattgagattcgtcgttgttaatttatgggataagaaaggagcctaaaaaaaaaagattgagagagaaaagacaaaagatcataatttcgtgtaacacgaagaagcaataattaatcatcccttaaaaaatggccacaataataaaagagaagtagacccacccaccacaatatcagtagtgcttgtccaaatcacaaaagttattcaaatctttcatttgttttaagtttgaaccaaattcacgtaaagtttacaaaaggcaccgagacaaaaccgcacacgcatctttttaccctaccaccactattgaaatcttcccattttcttctgctctaaacaaacaatagcttggtcttgaggcaaagcaaaaaaaaggaaagatggttcagaggaagaagacttgtctaacaatcgagtcttcttccaatctccaacctgaaactcggtttgggcaagaacatctcaagaatcttggaccagagatgatgatgatgaagagaactaaacctaggaggaagcttaaagacaatcatgtttcttctcaatcaggtaagtcacaagaactaccaaagcatgaccttgttgttaaagtgataggtggttcacctaattacatgaaaggcaccagtagttctgaggcaaggaaggagaacaagaaaaaatttaatctttctaggaatcagaagaaccaaaccggttcaaaacatgattctcgttatggagttaacaaggaaagaagttgtaacaagtcgagttcgaggaacggtagaggtttgacaaaggctccgattttcaagagatgttcacagagagctacttgttcttcaactctaaaagattccaagtttccagagtatttgatgcttaaccatggcgagacttttgaccaagttaatggaacctctgtcttgaaagtctgtccttacacgtattgttcactcaacggtcatcttcatgcagcgcagtatcctcctctgaaaagcttcatatcgttgaggagacagagtttgaagtcacaaaagagtgtgaaaatggaagcttctgaggaagagtttgtgaagatggatgatctagaggagaagaaagagtttgagaatggtaatggaggttcttgtgaggttgatattgatagtcaaatatcggaaactgtttctgaaggagcacctcgttctgaaactgattctgatgattactctgatagtgctgagatggtgattgagttaaaagaatcttgtttggaggagactttggtggatgactctgagaatgaggtccaagagaaagcaaacagagatggagatacctacctattaaaagaatctgacttggaggagactttggttgaggattctatgaatcaagatgaaggaaacagagatggagatgctgatcactctggttgctttgattctgaagttattggtataatcaagaactcagaagcagatattgttattgatgagactttgatagatgactctgtgaaagatttcgaagatacaacaaacatatatggggatgctaatgaatttggttgctttaattctgaagttatcgatatgatgaagaacacagaagcagatactgcaatcggggagactttggtagatgagtctatgaaagagatccaggagaaagaaaacaaagatgaagatgctgatgaatctagttgctttgtttcagaacttatcgatatgataaagaactcagctgcaagtgatgctattgaggataaagatgctactggtgaagagacactaaaggataaagctgaagattgcaaagaggtgtctaaaggccagactgaagttatattgatgacagaagaaaatgcaaaggttccatttaaccgtacacgaaaaccctgcaaacaagaagagtcaggctctaccatttcatggactatcatcaaatgcaagaaacccgttgcagagaccgaggatttaagagaatttaatccaagagaaccaaattaccttccagctgtaatggatgaggatgctgaaaaagtggacctcaagcatcaagacatagatgagaggagaaattcagaggattggatgtttgattatgctctgcagcgtgctgttagcaaacttgccccagcaaggaagaggaaagttgcattactcgtagaggcatttgaaaccgtgcaaccacatggtagagaacctgaacaggttttaagttatggaagacaccttcaagcctgcaattaacgaaggtgaaataacaacatttcttataattcggctaataaaccaaatatgttgcaagttctgcttatgaacaccttttttgctgcaggtccagggatgatccaaggaagccaactaaaggaaagatgagtgacctttgtttatttacttacaagaatcaaacccaagtgtaaactttgatggtttatttcctagttctttgtgtggtatttatgctcttcaatgtattaatgactctgtgtgtgcttttgcttgtggactaatttctgggacaatcatatgcgtttgtctagttctatataactacttgaaaattgtgaaacaatcaaacgctgttgtcatcagttgctacatagatgttgaatggttttcatcatctaatcgaggatttctattgtccggggttagctagaagaggggcatgcaacagtataggaaaccaagaaagcaagaaccatcatcctcaatcatgtaagcattagcaaaataacaagagtatgagtctaaaacgagagacctaagagatacaatgaacccatatacacatgagggcgtctagaaaagagcacatagtataatagagacttaggactcagagagcgaaactcaatccttggtgactttgttgacaagggacttgtggatgtgagggatcacacctcctcctgcaatggttcctttgatgagagtgtcaagttcctcatctcctctgattgcaagctgcaaatgtcttggtgtaattctcttcactttgagatccttgctcgcatttccagctaactcgagtacttcagcagtcaagtattctagaattgatgcagtgtaaacagcagcagtggcaccaactcttccatgtgctgaaactctttgcttgagttgacgatgaatacgacccactggaaactgaaagaataccacattgagaaaacaaaataagcacataactttagggcacagagaaaggcttcccattaatcagactgagacagatcttcttgtagatagatatatattaataagacacttaaactaaccacacagtcctttaatttgcttgatcattcacttactacatcttatagatagatattacaacgtatcaagtgattatcataataaaagacactgcagcaataagccatataagtaacatggattcaatgatatgtacaattcggctttaacaaggaagaatcccaaaagtaaactaatgacaataacaggacaatgtttggcttagatttccagaacacacacacagagaggacaagtagatgctcccattaaggctcagtatcaattggtagtactctattgtatacaaattactctagaatctagatagatagcactgtttttcttcatacgcaactacaagaagtgcacacagagaaatcaagcttgtgtgtatcaaccgtatagaacatgcaagctaccatatcacagtcataaaatgagacacaccaaaaataatgctacttggcatagagtcatagagacaataaaagtccagtatcaagcacacattgtaactttaatgaagaaacacagagtaaaacatatttccagaaatcagagaggaagcaatttcccaaaaatgcattaaacacagaacgaaatacaaatctggttcccaattcacaattgaacataatcaaaaaaacctaacgcacattcaaactccgagccactcgattctcaaaaaaggagctagggtttgagggatacctgaataccagcacgagaagagcgagagatggatttcttcttaacactgtctttgtttgcagctgctgccgtcgtcttcgcagctagaagccctttcccacctttaccagccatatctacagaaaccaaacaaaaagaaaagagcttcacaaaatttcagaatttccagatccgtcgtcgaaatcaaagaagataattaaccgatagagaagaagcaaagaacagtagagaaataagatctcaagcttatggtgaagaacctattcgaaattcgcggcgagaaaatcgatacagagacaaaagagagacgtcgaattaaaaccctagctcagagagggaagtacctgaaaacgagagcgggatgctcgaaaattgtgcgggagagcttttaaagtttggacttattgttgggccggattttgtttagctcttgtggatcttgttgggccggcttttctaaattgttataattcttcattttttgggtcaacatgttaaatttatatttagatatctttacaaaattcgttcaaatcttgtgttgttggaaaataattattttactaaaaatttatatcacataaaattgcaaattattcaaaagaagatttgtagttaaaatatagtggatattcataccacctctcatgatggtatttaaaaaaaataatgaaacgtattctctctttcaaatttttgattatactttttattaaacaaagaaagatttaagtgtggatgatacatcactagtttttttttttttttttttttttttttttttgaaaaacgatacatcagtagtttaattttaaataaacgatctaaattcttgaaaaaaatttcctcaattttatcaatatccttagatttatactaaaaggtatatgtacggagatactacagaatatgccaaaatacgtatacgcagcaaaacgtacgtgcattagatacggaggggtgttttcgtcatcttaaccattcaacttattccgggcgaatttactaactgactccggccgaagtggactcgcagacacgtacccagcagagaagctttgagggtagtgtcgacttttctcaattcaatagtatcgtatcttagccacatgttaagaacgaacaccgttgatctcacgacacgtgcccttgatcattttacagatttagctatttcgaacacgtaggatacacacgtgtacatcaaatctctttccctttataaaacctccccaaaacaaagcttatcctctttagtctttactcttcgccacatcacagattttgttttcttccgtttctcgaaattcagtttcatcatcatcctctctggatttataaattttcaatctacctttcaatcgccgggggataatcgaaacccgatctgtgtaaaaaaaatgatgaaatcgacggcgagatttgcgtctgattgtcgttataatgatcacaaaagcataaaagcgtgacgtttccgcgtcttcgcgtatctcggaaactttaatccgtatctaaagagctaaatttgaagcgatctttctctttttcttttaatattgttttttttccttgaagcttgcctagtttcgaagttattccatgttttatcttcaattctagatcatagtttttggaaatttaggttttagttttttttgttaagctcgatctggatttgccgatttgaaattttgagtaaatcgcaatgccattacatatgaaaatccaaccgatcgacgaatccgatgtatcggaagaggtaccttacccggagacgatgagacagatgccgaaatcgaggctgaagcgtctctttgagcgtcagttcactaataagaacgtttcggagaaatttaccggctcagatgttgaggcaccgctttcgagaggtaactctggagattttgagccgagctctgtttgtttggccaagatggttctaaattttatggaggacaacaacggcggcgagaaacagcggtgtggacgtagccgatgtaactgttttagcgggagtggtacagagagctctgatgatgaaactgaatgttcttctggtgaagcttgtgagatcctcaaggtatgattcttcaattttgttctggattctaggttttgttagaaaagcagaacttgatatatggagattcgattttgtagagtttggttctctgtaagagcatccgtgtgaggaatttgctgactgatgtgaccaagattgcggaaacaagtaagaattgcaagcttaaagatggatcgtgcttgaaaagtgtggctaatgggttagtgagtttaggttatgatgcggctctatgcaaatctcgctgggagaaatctccttcttgtcctgctggtatagtctataactctttatcttctgtgaaaaggcaaagttgtaaagccaagccatttcttaggcttcttgcttgacagtagagttgattgttttgtgaaatgaaacaggggaatatgagtatgtggatgtgataatgaaaggtgaaagactgttaatcgacatagatttcaaatcgaagttcgagattgctcgtgcaacaaaaacgtataagtcgatgctacaaactctgccttacatatttgtggggaaagcggataggctgcagaagatcatcgttctaatatgtaaagcggcaaagcagagcttaaagaagaaaggacttcatgtaccgccatggaggagagctgagtatgtgaaatccaagtggctgtcttctcatgttcgtgtagaccaaaactcaaatggagaagtcaagcaggaatcagtagaggtgatcgctgagtcggtcagttccatagtcttcggtgtctgaaggtttatatatatggcataaccttcaagagaggtgtgagatataggagtattcgaatcccttaaagtttttgatattaagggtatgttacaggatccatgcatacgtagaagtgtctctcccttgtcttttttttgggtgtaagggagagtgtgatcccactctatggttgttgctctatatgaggattaatagtattttaattactacgatattatacgtttttgtgacatttggtaaatcagagagaaatgtagtgttgatctactacttaattatgctctacaagtcgtgatcttgatgtggtcgtttctggcattgagagtagttgaaattgttttggttttaagaggaaaatcatgtaccaaattattttaattgacttttgcataagctaacaagttacctaatttccaaattagaattgactttggcataagcttaaataagctgacctaagcatgtcttaaaattacaacagtacccttgagagccaaattgtattaagttatgaattaccttggcgtggggagcaagatcctcgttaatcaatttaaaattggtttgtgctcagattctcaatttttataaacgattatataagaagactgcacttgagaggtaaagatcatctcaacacattttattaacagaaattacaaatcagttctttggggacgacccataaaacaacagaacgccaaaaaggctatggattatccccaaggcatcaacaaagtctccacttctgttattgattatgacaacaacttgaagaaacataacttagaagctgagaagcgactcaaaaaggtggaacaagattatctacacacaagtcaaaagtacacagaaacaagagtaagtttttaaaacatgtaatcctgaagacacataccacccaaaactcattatggtcactgaaatgctttatctatttttgtgggcagtcacagtggtggagcttaaatgatgagagataccgcgctgtcaatagctgttactgggctgcaaacttcattaaccgctgcaacaagctggtagagcaattgcagaaggctcttgacaagctacctaaaggagaaacaaccgaagaaaccattgatcatgtaaatgctcaatatcattatgagaaccagctcaatatatagagcaattctatatcatatttaacataacccttaaactttatctgcatgtttagagcctgcagttctcgttactccagcagaaagcacaatttcaagagctagactatcatggaaaatgcgaattcagagaatttagcagagaggtactattactagtgttaagcttaaatccacctcaagattcatcaaagtttatttactagaaccattctgaaattttcacttaccatataaatagctagactgcattcggaaaaaaatgcctaggagtgaccgcagaaaagctgcacatgatctcctaaaagatgtttgtaaccccactagtcatgacagtttgagaaaatctgtggagctggaaataaaagtaagatctctcatcttctttcatttgagcactagtctatcttactttaaactaaccaatgggatgatgtttgcaaattaactaggctttgaagaagctgatcagagagcttcaaaaagactgggaagaaaaacaacatgtaaagcaatatacaaagaataaatataaagatctcgaacaaaaggtgaagcatctagagaagaaaaaggaacaacttgcgggactgcgggacgaagaaagaaaaatcatgttcgggacgaagaaaacgcatgataggaagataggtacataccctgaggcttattatatcaaaatgttgaatgataaattaccatgatgagttgtaatgaattaatttggggattgatcaaagcattaatgttccttcaaacaaagaaaggcatagcaatctccagttatttcgtcattcaagtgattataaggaaaaggtttcataagaagttaatttccagaattaaatctctcatattgaaactcccacaatgaacagcaaattcaagtcaaaaagccttttagcatcagactaaagtattgagactaaattagtgaagttagaaccaagccaaaatggataatttaatttaatacatacaaacctaatcaatgatccagtgactaataatctaacataaagacaattagcaaaagtgtttttctttccaagaaggtaaacttccacgaaacaacggaacaaaaactatcccttgttccctaagcttgagtgcttgacccaaaacatttcaagtcatttctcaatataaaacaataaaactgaagaactcaaaaccaaagaaacgtcataaatatcacagaaccagcttaagcctcaaagtcactaaccttttgaatggcggcatcatcatcatcttcttctcaagtcaaattcatagaaaaagctcttctcgccaccggctccttcgctctatcatacacagatcctgatcaaaaatggctcatcagaaagcacctaacttcactcctccaagattatccaaacttcgaactctcaaccgatactttcaaccacaacaacggagccaaagttcaactcttttgccttgaaggatctctacgtattcgaagctccactacacaactcccaaccgtacaattaaccatttggattcacgaaaactacccattaacccctcctctagtgtttataaaccccaattcaatcccaattcgcaacaaccacccattcatcaattcttcaggatacacaaagtctagatacatcgaaacatgggaacacccacgatgcaatttactcgatttcattcgaaacctcaagaaagttctcgctaatgatcacccatttctacacactgattcattaatccctactcggaatcaatccgtttccagaaccgaagccttagatcgattagccacgagtctccactacgacgttctaacaatcatggagagatcagaggaagagattgaaaacctatggaagcttcaatcagaggtgaagcaaagatctgaatcggttaaatcaatcatcactgagcttgagattgagagagggacattaaaggtgagagctttgaagctcaaggaagattccgatgttttgacgacatgggtagagatgaactatttgaaattgacgtcgatggatatgggaagaattgaagaaatgttcgaaattgaatcggaagtggagggattggcgggagatgacgccattgaagatgtgttgagagtattggaagaagctgcggagagaggagagttggagattggttcgtatctaaagcaagtgagagtgttggctagagaacaattcttccttaagcatttatcatcgtttaaaactcagaattttcatatttgagtatgttgtgattttttttgtttttttttcgtattgatggattgattttgttattaaaattcgtctaaagttgatgaaattgatggtttataagagaaaaatcatataacaaagttgtttaactgacatttatttggataagctatataaaaataagtgatctaattggcaaattagaattgacttttgcataagctaaataagcttacataagcatgtaagcaaattactataataccctcaagagccaagtcagcagatgttaagattgtaaaattggtaagaacgctaattgggtcaaatcgacaattgattgatttgggtttgttcattacattacccgctttgctaggaagcctgcgatccagtgttcctcatctctgcgggtgcaccgattcttaacgtacacccacttccccaggtttccaagatcccttcttcttcttcatcctaattcctacaagtctgggtcctgtctcaattcaattcccacgtttttgactttaaacggcaatctggttttgataacggatcgtgttctatcttggtcaaaatcatggagattcctcgccggacctttgttttcttcttctctctttgtctcttgtcgtcaacgtctctctccatcgataattttcaccaagcgtaagtctaatttcttcttctcttcttgccattccctcagatttgtattcttctaattggcaaattatcacaatttggctttaaagtcttgatttttatctttgtttctggactattatagtaccgcatcttgtagttgtagtaatggcaatgggaaataaatacacaacattgtagcaatggatctgatatttgattgaaagacaggttttttgtttttgtctacatgagaacctatgaatcttcttgataatgtattgtctattgccagttgtttctcaagtcttaggtttgttataagccacattgttgctagagaatgttaccactgtataccagtagcaatttcctgtcatcaactgtagcaaacagctcctgatgattgatcagttgtgatgggcaaacactttttggaaatcatttgtgcttgttttttatgcagttttcctattgttgaacctgctccgggtcatacaaagcttcagcttagcagagaaggtctggaagcaattagcagaattacaactcctatttctgctgttgcggtatgtgacagtgatgtttgactcattatcaattcttcgtatgttctttctatctgaacctggttttctcggaccaagatatttgttactttgtttctcacgatttgcttgttatttcctttggtgttgaaatactaggtgattggcccatatcgttctggaaaatcatttctactcaatcagcttctttctctttcttgttatgaaggtgcttcttatctcatatactcgggctctgcggtttacttactttttgctactcaacattgacttccaatattttcaaattcatcaggttttggtgttggacacatgcgtgataccaaaacaaaaggtatagcaataatgtctagaggacactaccatctttcaactgcatatatatatttctagctaataaaggtttaactttttggttcggaatccacttcattgttgcatacaggtatttgggtctggggaacaccattagagctggagattgatggagtaaaaacttccgtaatttacctcgacactgagggattcgaaagtgttggaaagtcaaatgtttatgatgaccggtacccagacagttgcaacatttgcacatttaaacttttctttgcggaagctctgaatatctaatcaatttctgtgtaaatattcaggatttttgccctggcaacggttatgagttctgtgcttatctataatctgcctgaaactgtaagttgtcctacctctttgtttgctcagattgcttatgcttctagatacattatacttataatcaaagagagtaaatccttacaggggtttctttatatcaatatcaactatcaagtcattagtaaaaccaaagaccaaagtgttttcgaagacctaggtagttcagacctaggtagttcatatggtatcaaacaatcccttgtgatgtttagttagaagtatacaaatatggatgtgtaacagagtagctagtatttaaaagaacttcatctacaatttctctctctgatatgagctctcatcagatccgtgaagctgatatttctcggctctcctttgctgttgagcttgcggaagaattttatggaaggtttgcccaattgtactctgcatttctgtcttgtttaatatgattgcctgcctctatgaatactgactgggttctgtttgattggctcatgcaactcaattgacagagtaaaggtataccctaacggaatggctgttattcttgatccatggcatccttcaaaacttcgtttctgatttttatatatcctgtagggtgaagatgttgcttttgaaccgtcaaagcttctgtggcttatccagcgtgattttctgcgtaagtgcatggtgcttttgactacaacattcataatagttccatttaaacagtgcttatattctatgtaatctctgcctgttttgaaatgcttttctttctcttctctgatataacaagcagtatttttgtgtgctcctggtcctgtgtgatccatttcaatgttccagttttctctgtgttttatgcaagtgatctggtcatgattaacactattccaagtttccaactttatgcagaagggaaatcggtgaagcaaatggtggatgaagctctcagacatgtccctaatgaagatggttagcgctcctttttgttcttcaactaatgtctcctagacctttgttaattgtgttttcttgtttcttatgttttcaggtaacaaaaatattgaccaggtatgttctcttgtgttctgcatcgtacaggtaatcatcattattatctcagaaatcattcttgttgtctcctttttcaggttaaccagattcgggactccttggctataatgggtgacaacagcacagcctttagcttaccgcaggtaaggcatttgtgtgttctactttgcatattttccagcctttctttcagaaagaaaatacagagcatgaaactttaatcaaaatggctatctttgtgcatgaacatttatggttatctttgaatatctttgctgaatcatgcgcgaatacaaaactttcttagtgtggttgtggtggttacctttaactttaagtcatcctgaagtgtgcacaaaatccttagatttcagtgcttgtgtatccttgaagtatagcttttccaaagttcttgggaggaaattttattttttcttccatgtggaacattatgaaatcattgtctgatctgactcagacgtggaatctttgttgctgccttgatagggtggtcttcgttttgataactttgttcttgtttttgttatatagcctcatctcatgcgtacgaagctgtgtgatctgaaggatgaggacctggattctacatatgttgcaaggcgtgaccaattgaaaaagctcgttgctagtattatccgcccaaagatagtgcaggggaaaacactaaacgggaaggaatttatttctttcctggaacaggtgagtgtcaatttctttttctgtatggttgtatgctttaaatatctcaaaccatttatatgactgagtggaagtgtgtcgttgaaagatcaaaaggaataagtggctgctttctctggtgctcttacatactttatcaagtaaatagacatgttttctcttctcatggatggctgtgtttccttgctactttaagttatccagttagcttgttcttaaaatttgtataaacaatggtagagaactttttttaatgtggtcattttgattcatgttgtccttgatacttatagtttcataccctttggtgctatggtggtatcccattacgtatcaatttatgagtgcgtgtttttataagtgatgtatttgttactagaaatctgatgagcataagtacacgttgttgatatgtaacactattggcttatatgatttctataatatgccttatatgcttacgaaatggtatgttgatatattccaattctgattgctagatattggatgcgttaaataaaggagagatcccatcaacaggatcactagttgaggttttcaataaagatattgttgagagatgtgtgaagctgtacaatgagaagatggtaagagtgcgactacctatgtccgaagaatctctccaaagtgcccatgaaatggcgcataatgaagctatcaaagcatttgatgcacaacattttggcagacaacatgcaaagaaatctgtcgatcagttggatgaacaaatgcaggaggtatgaattcctatgctaatatagaatttctattaagtgtggcttagtggatgaaacaaagggatgattctgaatttcgtgttggcaaatttggtagtctacggaaaaataagatttccaaaattactttcttattcattcttgtgcacttgaaatattgtccaggtatataagaattttgttcttgcaaatgaataccaatcgtcgaagctctgtgaggcgctatatacaagttgtgaagatgacatggaccacttacaggctctccgactcccttccatggctaaatttaatgcaggttttgtgtactgcaacaaaacgtttgagcagcaatgtgttggtccttcaaaacaaaattatgagcaaagattaactaaggtaatatatacatgtctatgttatgtgataagtattgaactgtaatttgatatgagaacttgtgtgcagatgatgggaaagtcacggtctttgttcatcaaagaatacaataaccgactgttcaactggctggttgggttctctcttgtaatggtggttgtgggccggtttatcataaaattcattttattagaaatggcggcgtggatacttttcatattcttggagacatacacaaggatgttctggacagcagaagctctttattacaacccagtctggcatttcatcgttgggacatgggaaaatgtcgtgtatagtcctgttctcgacttggacaggtaacagaaacaagtcttgagcaaacttctctcaatctctttgctcacctaaatttgtttgtgtttttggtaaatagatgggcgattcctatagtctgcataattgcactttgtgtgctatattggcggtgttatggaaagaggaaacacggggctcgctggcttcttccgctgtacaacaaccagaagaatggccggaatagggaacggtctgagtaaaaacatgttcctcgtcgttcccattatacttatagcatcttctcgggcatgctcgttgtttttatcatcagaagctctctgcccgttactaccaattttttggacgcagaagaatgaaagaggatgattgatcgatccaagttggtttgattgtaccatttacatagaatgcctttgtaatgtttaactcttcatatacataaatggttttatactctctcaatcacagctaatttgagctaacaaaccttagagtctgtttttattttgtttatttattcaaagtagtttgtttatgttggtatattataaatttatgaaagcagaaccttcgtgttgcaattttgattgttggattcatgaatcgttgtgcaaagacatattttataaaatcttcttctgtttttgctgttcttagatttctcttttaatctattctttagattataaggccaataaaacagaacaagctatagctcaaaacaaggccctaaaaacaaaaccataaatgaaatagttaaattttagaagcgaccaagttacattagtagtagaacaaaaaaaaaacatgaacaaaccactagccagctagcagctaaacattattacatagggaatcgctatgatatcaattttgggtgactttggggaatcgctaacaagcagtccatcgttcgtatcctccatcttctcgacatcggcacggaatctatatgtaaccgtatttggatgaacgagaaatatgactacacataagatatcaaggtctaaacaaattctcataacaaacgccctgataagagaagttttggtatgattacgtaagacaaaagtaatgtccaagcgcatcaaatctgctatttcaaaaaggatgaacaagtagatgacgacgtgttcccttctcactgcaaatagtttggattcctcatattgctttcttaaaaaaacacttaatcttagggaaagatgaagtgatccagtagtcaagtacttcttggacaaagattttcatccatatccaggcgagtattagaagtagactttgaggtgacttaaaagtttccatcgacacaaaacgtagaagagacatggctaaaacccagtgaatgatgatatagaagagaaaaaaagattatggtgtcacaagcaatccaagaaagaaaaaaagagagtattcaagctaaaagatattaacttttctaagaaatattcttctgttttgatctaatggttttgagtaggggttcaaaagttagtcactatatcctatgcaaactaaatcttttatgtggtcaaaaagaagcagcagctacacaaatcagcttgatcaccaaactacatgcttttatttccaagaagcagctacaatatagtttgttaggagtgccatgaactcatgaaagcagagacactacaatcgagctcttttgtttttcttttcacttcaattgagcaaattgaagatatgattttattactcaaactatcttttatgttttttagttgcaaaatcttagaacatgacagttagaccaagagcagttgataaatcaaacaaaaaggcaggcagatccgtggctgatgctgccgtcacaaccttcccatcagttacacatcccttttccatcacagcctcacctccagccaccttcaccatcaccttcatccctttcccactcgcgcatcgcttcccctgcaaatccataaagagaaacaccacatgaacaaaattagttagttactagatt

SEQ ID NO: 348 - DNA, 96827 bp, Arabidopsis thaliana
aagcttcagcttagcagagaaggtctggaagcaattagcagaattacaactcctatttctgctgttgcggtatgtgacagtgatgtttgactcattatcaattcttcgtatgttctttctatctgaacctggttttctcggaccaagatatttgttactttgtttctcacgatttgcttgttatttcctttggtgttgaaatactaggtgattggcccatatcgttctggaaaatcatttctactcaatcagcttctttctctttcttgttatgaaggtgcttcttatctcatatactcgggctctgcggtttacttactttttgctactcaacattgacttccaatattttcaaattcatcaggttttggtgttggacacatgcgtgataccaaaacaaaaggtatagcaataatgtctagaggacactaccatctttcaactgcatatatatatttctagctaataaaggtttaactttttggttcggaatccacttcattgttgcatacaggtatttgggtctggggaacaccattagagctggagattgatggagtaaaaacttccgtaatttacctcgacactgagggattcgaaagtgttggaaagtcaaatgtttatgatgaccggtacccagacagttgcaacatttgcacatttaaacttttctttgcggaagctctgaatatctaatcaatttctgtgtaaatattcaggatttttgccctggcaacggttatgagttctgtgcttatctataatctgcctgaaactgtaagttgtcctacctctttgtttgctcagattgcttatgcttctagatacattatacttataatcaaagagagtaaatccttacaggggtttctttatatcaatatcaactatcaagtcattagtaaaaccaaagaccaaagtgttttcgaagacctaggtagttcagacctaggtagttcatatggtatcaaacaatcccttgtgatgtttagttagaagtatacaaatatggatgtgtaacagagtagctagtatttaaaagaacttcatctacaatttctctctctgatatgagctctcatcagatccgtgaagctgatatttctcggctctcctttgctgttgagcttgcggaagaattttatggaaggtttgcccaattgtactctgcatttctgtcttgtttaatatgattgcctgcctctatgaatactgactgggttctgtttgattggctcatgcaactcaattgacagagtaaaggtataccctaacggaatggctgttattcttgatccatggcatccttcaaaacttcgtttctgatttttatatatcctgtagggtgaagatgttgcttttgaaccgtcaaagcttctgtggcttatccagcgtgattttctgcgtaagtgcatggtgcttttgactacaacattcataatagttccatttaaacagtgcttatattctatgtaatctctgcctgttttgaaatgcttttctttctcttctctgatataacaagcagtatttttgtgtgctcctggtcctgtgtgatccatttcaatgttccagttttctctgtgttttatgcaagtgatctggtcatgattaacactattccaagtttccaactttatgcagaagggaaatcggtgaagcaaatggtggatgaagctctcagacatgtccctaatgaagatggttagcgctcctttttgttcttcaactaatgtctcctagacctttgttaattgtgttttcttgtttcttatgttttcaggtaacaaaaatattgaccaggtatgttctcttgtgttctgcatcgtacaggtaatcatcattattatctcagaaatcattcttgttgtctcctttttcaggttaaccagattcgggactccttggctataatgggtgacaacagcacagcctttagcttaccgcaggtaaggcatttgtgtgttctactttgcatattttccagcctttctttcagaaagaaaatacagagcatgaaactttaatcaaaatggctatctttgtgcatgaacatttatggttatctttgaatatctttgctgaatcatgcgcgaatacaaaactttcttagtgtggttgtggtggttacctttaactttaagtcatcctgaagtgtgcacaaaatccttagatttcagtgcttgtgtatccttgaagtatagcttttccaaagttcttgggaggaaattttattttttcttccatgtggaacattatgaaatcattgtctgatctgactcagacgtggaatctttgttgctgccttgatagggtggtcttcgttttgataactttgttcttgtttttgttatatagcctcatctcatgcgtacgaagctgtgtgatctgaaggatgaggacctggattctacatatgttgcaaggcgtgaccaattgaaaaagctcgttgctagtattatccgcccaaagatagtgcaggggaaaacactaaacgggaaggaatttatttctttcctggaacaggtgagtgtcaatttctttttctgtatggttgtatgctttaaatatctcaaaccatttatatgactgagtggaagtgtgtcgttgaaagatcaaaaggaataagtggctgctttctctggtgctcttacatactttatcaagtaaatagacatgttttctcttctcatggatggctgtgtttccttgctactttaagttatccagttagcttgttcttaaaatttgtataaacaatggtagagaactttttttaatgtggtcattttgattcatgttgtccttgatacttatagtttcataccctttggtgctatggtggtatcccattacgtatcaatttatgagtgcgtgtttttataagtgatgtatttgttactagaaatctgatgagcataagtacacgttgttgatatgtaacactattggcttatatgatttctataatatgccttatatgcttacgaaatggtatgttgatatattccaattctgattgctagatattggatgcgttaaataaaggagagatcccatcaacaggatcactagttgaggttttcaataaagatattgttgagagatgtgtgaagctgtacaatgagaagatggtaagagtgcgactacctatgtccgaagaatctctccaaagtgcccatgaaatggcgcataatgaagctatcaaagcatttgatgcacaacattttggcagacaacatgcaaagaaatctgtcgatcagttggatgaacaaatgcaggaggtatgaattcctatgctaatatagaatttctattaagtgtggcttagtggatgaaacaaagggatgattctgaatttcgtgttggcaaatttggtagtctacggaaaaataagatttccaaaattactttcttattcattcttgtgcacttgaaatattgtccaggtatataagaattttgttcttgcaaatgaataccaatcgtcgaagctctgtgaggcgctatatacaagttgtgaagatgacatggaccacttacaggctctccgactcccttccatggctaaatttaatgcaggttttgtgtactgcaacaaaacgtttgagcagcaatgtgttggtccttcaaaacaaaattatgagcaaagattaactaaggtaatatatacatgtctatgttatgtgataagtattgaactgtaatttgatatgagaacttgtgtgcagatgatgggaaagtcacggtctttgttcatcaaagaatacaataaccgactgttcaactggctggttgggttctctcttgtaatggtggttgtgggccggtttatcataaaattcattttattagaaatggcggcgtggatacttttcatattcttggagacatacacaaggatgttctggacagcagaagctctttattacaacccagtctggcatttcatcgttgggacatgggaaaatgtcgtgtatagtcctgttctcgacttggacaggtaacagaaacaagtcttgagcaaacttctctcaatctctttgctcacctaaatttgtttgtgtttttggtaaatagatgggcgattcctatagtctgcataattgcactttgtgtgctatattggcggtgttatggaaagaggaaacacggggctcgctggcttcttccgctgtacaacaaccagaagaatggccggaatagggaacggtctgagtaaaaacatgttcctcgtcgttcccattatacttatagcatcttctcgggcatgctcgttgtttttatcatcagaagctctctgcccgttactaccaattttttggacgcagaagaatgaaagaggatgattgatcgatccaagttggtttgattgtaccatttacatagaatgcctttgtaatgtttaactcttcatatacataaatggttttatactctctcaatcacagctaatttgagctaacaaaccttagagtctgtttttattttgtttatttattcaaagtagtttgtttatgttggtatattataaatttatgaaagcagaaccttcgtgttgcaattttgattgttggattcatgaatcgttgtgcaaagacatattttataaaatcttcttctgtttttgctgttcttagatttctcttttaatctattctttagattataaggccaataaaacagaacaagctatagctcaaaacaaggccctaaaaacaaaaccataaatgaaatagttaaattttagaagcgaccaagttacattagtagtagaacaaaaaaaaaacatgaacaaaccactagccagctagcagctaaacattattacatagggaatcgctatgatatcaattttgggtgactttggggaatcgctaacaagcagtccatcgttcgtatcctccatcttctcgacatcggcacggaatctatatgtaaccgtatttggatgaacgagaaatatgactacacataagatatcaaggtctaaacaaattctcataacaaacgccctgataagagaagttttggtatgattacgtaagacaaaagtaatgtccaagcgcatcaaatctgctatttcaaaaaggatgaacaagtagatgacgacgtgttcccttctcactgcaaatagtttggattcctcatattgctttcttaaaaaaacacttaatcttagggaaagatgaagtgatccagtagtcaagtacttcttggacaaagattttcatccatatccaggcgagtattagaagtagactttgaggtgacttaaaagtttccatcgacacaaaacgtagaagagacatggctaaaacccagtgaatgatgatatagaagagaaaaaaagattatggtgtcacaagcaatccaagaaagaaaaaaagagagtattcaagctaaaagatattaacttttctaagaaatattcttctgttttgatctaatggttttgagtaggggttcaaaagttagtcactatatcctatgcaaactaaatcttttatgtggtcaaaaagaagcagcagctacacaaatcagcttgatcaccaaactacatgcttttatttccaagaagcagctacaatatagtttgttaggagtgccatgaactcatgaaagcagagacactacaatcgagctcttttgtttttcttttcacttcaattgagcaaattgaagatatgattttattactcaaactatcttttatgttttttagttgcaaaatcttagaacatgacagttagaccaagagcagttgataaatcaaacaaaaaggcaggcagatccgtggctgatgctgccgtcacaaccttcccatcagttacacatcccttttccatcacagcctcacctccagccaccttcaccatcaccttcatccctttcccactcgcgcatcgcttcccctgcaaatccataaagagaaacaccacatgaacaaaattagttagttactagattccacaagcatgacttgatataaacattgggatcaccattgtatcctcaacatcacattttctatattcattacaagattagtgaatactatttcctccaagtacattttctgttttgacagagctcataacctcccaaaagaaaagacaggtgatgattttaccttaagaacaccagtggctgcaagaagcaatttcccctgtccaatagctgcaaacaccttatctttctctgcaaaactcttaaccaaagcaacagccttttcattcatcaccaatagctcaggtgatctccctcctggaaccactacacagtcataatcatccacacatatatcatcccacgatgcagtcacaaagaagttatgtccacgcttctctgcaggaatctgccgtccatcctcaaggtcataaaccgccgttgcacacacttctcccttcttcttgttcggtgtcacagcatccactttacaacctaaagcttgtagtgctctaaacggtacattgatcccataatcttctacatagtcctaaaaacagagtaatgctcaacgagtctgatgatcaaaacaagattgatataactaaagattacgccttttactcaccccaatgaggaaaagcacagaagcttgcttcttctccaagctacagactttgccaccaagagattcaagcaaaagcttaatgccgtgaccaagcgttggccaaccaaccgtactcatgaaattcccgtctttaacgcaatcggtgatctcgaacatgctctgaatcccaggctgttgccaccactcaccgccggagagttcgatcaaaggctttatgctttcaaacgccgtgcatttcacaccaccggcgaggattccggccgccatcagcataacctggctatgacagctagtgaagatcagcttcttggattcggcgaatcgcgccacgaggtcaacgcatttctcgtcggcgctgagaagctccgtgaatcggcctcctgggatgatgatgacgtcgtaattctccggagtgacgtcatcgaagtttgcgtttaaagtcaactggtcaacgacaagctcggtgtatagcttttttagaacagaaaaacaaaattaagcgaattatcacaaagaaaaagaaagttcgaaattcgttttagtgggaaaattggaacctcgaggcccaagaaatcgtgggcagacataacgcagcgatcgccggcgttgcggttgggtgaaacgcaatgaacgctaaccccaaacgattggagaacatagagaggaacaatcgtttcataggcttccatgtagtctccacataagagcaacgctgatttctgaaccgccgatgccattttgggtaaatgtttgtgtgcattgaataagacaatataagaagaactaatcttatttatactgattatctatttgtcatgtggaacttttgaatccccccaccaactcactttcacctactttttttggtggcttcaaagtccaactggtgaaaagtccttattacaaatatataaactagctataactttgaatggtatgtagtttctgctaactattatatgtggctgaattggtatacttatgaaatggacattgaattggtatacttatgttgaatagttccattttgtattattttacatccatttggttggtgtaaaataatacttttggtagattgaatgtgatgtatacaaaacgtcgtgtatgtatttcatttaatgcacatgactcgtgagttaacgttcagagtacggtctctcggaagctagaatctagaaaatctaaagaatgatatgtagccatgtttaccaaagcctggactatggagaacttgagctacatgaatctcatgtttgtggagtcaggattctagagcatattggctacaaggagcatgtatgcataagctaagcttgggcctcgataaacctagactatgcatgggacccttgggttgtggaaagcttggatttaggagagcttctgggatgtgtatgtgtagaaaaatccatgtgtattttgtagaaaaatccatgtgtattttgtagaaaaattcatgtgtatgatgatcacactagtcactaacacgtgtaatagacctctacaagatgatcacactagtcactaaacggtctattagcttaaaatactcttgtaaaattttgttaatcatatgactttttctaaaatttgtatatatcataagtgctttaatttatttattttggcagcaaaacaggcctgctttaatttattaatttgtacttcacttattattttatttatttgaaatggtccattatccattatttgctaatttttggttttcctgattcttgcttggaagagcttcaaggcggaggactaggtcggggtgctccttctcccctcaaccatttgttgtctacacgttgccacttgccacacgtgtttttctcttagaaatcgttatcacaatctgttcttttgaactttaaatcaaaaaatttggctgacaaaaaaaaattgaaacattacaaattgaaatataggatactattttcattcataactttaggcatcagtaacacagaaattatgaaggcaaacgattattattttacatgattgattactaaccaaccacgactcgtctatagctttttcattatgaatatagaaattatacaagtctagccggatttgggggttttgacgacgatacggtttccatcaacaaaaactctgacccggtcgcacctgaagtctgcggtcaccggactcccatccaaaatcacggcagcattgacggtggggttctctctctctatcaccacggccgcatagtcaccatttgttcccgtaagctccggccacgagttcttccctgcgatcacgttacgttagatcggtcaatcatttacgtttgggattttggagatcaagaagctcatatttgagtaaatgaaaacaaaagaactagaaacatcaccatggattgaccatatgtaacataattaaccttctaacagactttagaaaatgtaatcatatatgttatagctattgaattacaattttaaatgccttgaatccatatctaattgaacattagctaactatttacaaacatataaaactttaattatgaactatacaatacaaatacaaaaacttactaggacattcggtcgacatttttcttcactcttgtatatatttatgtagtcttctgatgtatttgtatgctcacctttagagatttgagtcccatttatagaatcggatacgtacgttacgtcttggtgtcggtgtcgtcggtgaggttgcagattcaaaagtcaaactttgacgaaaccagcttttaatagccccttcgttgacattattaatttgtttggtaaaagctttgacacttctgattttgttttataaagctttgaaatgtacatatttatatcacgatgttcaaaccttatcgagaacaagataaggtttctaaggctaagataatgtcgaaatttgaaaaacaaacgaaggtgaaaaatatttctagcgtcgactgaattctgtttgcatgcaaaaaaacgcttctgccaaatttggcacttagccgacaaaaatgaccaaactgtccttcataaaattcatgtataaaaatactataatcaattgttgtcacacacacaaacaacgataatgtcaattatgttgaattgttgacgtacataaaatttgacaaacaacatcacaacttagtcatatagttttttttttgttcccgtttgataatcttgtcatatagttaatattcaatttgatatgtatatacagtttaaaacacgtatatacagttcaacttagtcatagtttttcttttggtctgtttaagattggtaaaagcacgtatccggaataaagatttaggtattaattggtaacaactctatatgcgggtttcgaacaaaattacaaaatcacatattatatgagaccaagtcaccatcacacttaaatatttgtggttgagaattaattagtgtttagttttgtgtatgtttcacactgcccaatgttacaaacttgtgtgtgtcaagaagacgaggccgcctgaaaacaaaacatgtaagcccattgaaacagacaccaaaagacatatggtctataagcctctccttgtgctggagctggacacaaattctttaagaccgaggttttcaaacgtaggcccaaataaatagaaccaaatccagttagaagcccaataaaatgttaattacttatctttgtattttaatttttgttctttaaagtttaggattttttacataagtaaaagaatttgttctttaggcactttgaatccacattgtcgttggtattgttattagagtatcttaattttctatgatttatttacgtagataattcattgaaaaattaaatgaatttatgtttaaattctcatctaattattatacaatagattgaaaaagtcacccttagtcaaattgttcatatagttttcttaaattgtctaattaattaccaaattaatccttgtctgaaaacttttacaaaagctaatacagaacaaatacaaaaaaacgtgtaatcatatcatataaacaccagtcgcagcgtttcgtagaaaaattcgatttctctaaagccctaaaactaaaacgactatccccaattccaagttctagggtttccatcttccccaatctgtacgccattttcgatttccttttttgttgtttactttagcttcatcgaccatgtttaggtttcaaattgagtgtttgttctgtttctgtagagtataaatggcggatacgccttcgagcccagctggagatggcggagaaagcggcggttccgttagggagcaggatcgataccttcctatagctaatatcagcaggatcatgaagaaagcgttgcctcctaatggtaagattggaaaagatgctaaggatacagttcaggaatgcgtctctgagttcatcagcttcatcactagcgagtatgcattcccaatttttcttctttcaatcgaatttgttggaaaatattttgctctttggtgaaaaaaattgatcatttgttggaactttgggtttgtgagagatagttttcttaaactagctatggattgagtttagctcagagagttttttgaagtttatagagcaaagattatgtttttttttttgtcacaatgttaatcaaccattgtttggtatgggtttaccttaacctagttcctttcctatagaccattttgcagattatttcacatgcttctactgtgttatatcttaactctgtcaaataaattgttagatttttttcttcatttaaccatcttagggtataaaagccgtatcttgatcatgtttcaaagattcttttatctttaggatctgtttgtttttgttcctttttgttcatttaaggcaaaagatatgtttttcatcatgaaggaattgcttgtgttgaatgcgttttaggtctctgattgatgagttttatgtttcttataacatcagatgcccccgttctttgttaggaagaaataagttatcatgtatgaaactatgatttatctattggttcaagataagcttgtctgatgttgcgcttaagtctcttttgctggtcttatgttgattcgttgactgtaatggccaattgactggtatctgtttctgctaatcagggccagtgataagtgtcaaaaagagaaaaggaaaactgtgaatggtgatgatttgttgtgggcaatggcaacattaggatttgaggattacctggaacctctaaagatatacctagcgaggtacagggaggtatgttgctttgactccctaatcatgtgttctgaaatccttaatatcctagtcaagagattagtagctgtgagtaacatcgaagcttgccatgatagcagttttacaatcccttcaatacgtcttgtgtagaatttttgaagcaagaaagataaatctagaccaacagtcaggatgcatattagtaaattttgaaagacatttattactctctcttttgtgcttttgttgttaacatacataataaaatcaaaatgtttcttattaagttgagactaattcggttcttttcattccctgggattggttgctgacacaccacctgctgatgcagttggaggtaaataaaccacatacttatttctactttatattccattccagtgttgcccattggcttcttacgttttgttgtgaaattatgatagggtgataataagggatcaggaaagagtggagatggatcaaatagagatgctggtggcggtgtttctggtgaagaaatgccggtatgattttgacaagtatagatgataccaatgctatacagcctatattgtacttagctctgacttcatcattttgattcaatcacagagctggtaaaagaagttgcaagtagtgattaagaacaatcgccaaatgatcaagtaattcttctctctatcacacggcctcatgtacacaaatgaagagcatagtctatatgcatgtaggttcatatccaatcttcacttcgttacaactgatgatagtaggacatgccttgtaaacttgctgatcatgttatattttgctgtgtgaatgaactatggctagtttcaaaattgtttgtctaacgtgaaattctctaaaacggtgcaggggaaattagagatcagtgagttgtttatagttgagctgatcgacaactatttcgggtttactctcaatttcggttatgttagtttgaacgtttggtttattgtttccggtttagttggttgtatttaaagatttctctgttagatgttgagaacacttgaatgaaggaaaaatttgtccacatcctgttgttattttcgattcactttcggaatttcatagctaatttattctcatttaatacaaaatccttaaattaaatttgtacagtacctttgttttgggtatagacaattacattttaagtcagttgatctgtatcaaatactacacttacaaaatcacaaagtaaaggcagcaattaattttgctttgaattgaaaagctttgagagagtaatcaaatgcttaaatcacgaaaacttacaaatttcaaaattttgtctctccataaattctcttaataaaggctgttgtttttccaatttgaaaattctatttttcaaaatcaagaacaggctatggaatttcaagaagctggttcatcatcaagtagaatcatcttcctctgtttcctctcctatctaaaatctctttagtcttcagaaactgattatactttgtgcagcagcaagagtaaagattgactttgtgcagccgatggcacacaaagagagcaaatggaaccatcgcaaaagcttggcctgggacactgctttttccaccaaccctggtttcttcctatttcctatagattggttttgtgtagaaacaaaatgttaaattatatgattccaatgattttaccactttggtttgtaggagtgttagatcctgaagaattgtttgggagcttaaagattgacgagaatgagattgaagttgaagtaaatcataatcacacacttccttcgaaaaccgatgctcgtccaagttttgcttgggacaatgctttttttaccgatccaggtctcatctttttacttcaaagttctttaccctacttgattagtcaattatttcacactattccactattcctctcatatataacaatcaaaccttataatttagctttgactctgtatattcaaggctgacattgtctatatttatgctaaggtgttcttgatgctgaggagttgtgtcttgtgaacaatggtttcaccagtaacacgcagcttcgtaagtctgctgatacgacgacaactcaaggaagcagattttctgtggccagcattgagtttgatctgttccacgacctgagagcctctttacgtaattcaccgaatgtgaagcagacagtaactcaagagacccatcgtaagttaccagatggtataaaggtaaacggaaaacctcagaaactgtttcaatcatttgctttcatctaaattttacttattaattggttttgtttgtcaagaggactaaaggatacaaacagaaagttcaacctttgagtctcattcctcaaccaaaagtgtcttcttcttcttcttcttctttttctttatcatccatctccaaatctttgactcctagtcaagctatacgcgagaagaaatgtgttgcaagtgaactcggtgaggacatgattgatgatacatcttattctttcttcaaaacgagaagaaaatcaaaacatctttaaaagttgcacatctttgttttattttgaagagaggaataaggaaaaacacaagaatcatggttttgaagaacaatctggatcgaaatctaacataaggtcatcgtattcaagttacgcagtcaaggacttgacatcatcctactctggtctgaggttaccacttccaaagatgggatttttcgactcggtatgcttcctaagaaattcgttttattgaacctagcaaatatcttgtaatgtaagattcctgagatgatgaagaaaaaacaaacttttgttacagcaggagaacggagagaaagaaaacagagaaccaaatgctcttgaagcaaacagaagaagaagacacaaatccaaacttgagacttcttctacaccagaaaaccgcagcattctgggacaacgcaaaacacgaaagtgaaacgggcaatgatatatatgtcttgggtgcgttacaaggcatcgtttgcatgttgagttggataagtcaactgtcttcttttcttttggttgtagtagctgccttttttttcctttgttgctttaagaaatagcccgaaaaaaagaatgttctacatttcggagcagaaaactaaccgaatgagtttttggtcggatcatcggatcgatcagatatattttgagttacgaactgttataaaaaaagccataattttgtgttgagtttgcaaaataccttataacttgttatttgagattgcacctccatatatattaattcgtaagagtatttattaagtaagctttagtataaatccttttttcctttaaagtaagttaatgttctactaaataatagtaaagttgaagaaccgctccgttttacaccatgcacgtgttatctaacaaagaaaatatggtacacctaatggctaatgcaaaggacaacacaatgaaactaacttgactctgtgttatacaaacccatagacatctgcatacatcctagtatttgtataaattggactcaaattcctgaggacaatcatagcaaacaatcacatcatcgcaatatacataaacaaaagaggaagaaaaatggcaaccgagtggtgtagttatattggttcgtctttcatcctcaatttctacttttcattctttgatattggtaccgccctttatcgattttctttaatcttttctcttctcgctcacgtcaaatcgtttactattatttaattctcatgtgtcagtttcacatagcacattcttgaggaaattaattataatttggagcatgcattgtttatcgattgacacagatttatgtttcatctattgtttgaataacaatggattacacaacaaatccccaatatatgatatttggagagccatatagtattagtagggatatatagtttgattccataataaccgttggacctactgttttaccaaatgcaaatgatttaccaatctgatgtggttgatttgaccacacacagggaagaactcatggccggagcttttaggaacaaatggagactatgcggcttcggtgataaaaggagagaactcgagcctcaacgttgtcgtggtttcggatggaaattatgtgactgaagacctcagttgctaccgcgttagggtttgggttgacgaaatccgtatcgttgtcagaaacccaaccgccggctagacatgtatatggaccaccattatgctatagccatgtaggcgccttactatgaataaatgaaactatatataatgcatgcatagttggttggttggtcataatgtaacatctattgtttgcttgaatgattctggtgtccgatcatataacgcatttgaatggatgatgtggtgtatattttggcagccctggtgatttaggaactaagcaaaaatagtattttatttagcgaaaacgcaagagttgtttattacaaagagcgataagaaaagaacaacaaaggctaaataaagattatgaaaaatttacaagagaatttggtcatcatccgacaagaacgtagatagcatagatgatcccagggatgtaacccagtatcgtcaacaagagacagatccagaactctacctgcattcattaacacattaattatcaataatcaattaacgattcattcattaatcataaaactaagtaaagatgtaatttagtgcttaccccacaaccatatcgaaggaaaacgccgacgggaggtagaagaatcgccagaataatttccaagaaagtttctgatcccatttttgatgttttggagaagaagagaaacagaaacagaaacaagaaagagaggttttgtggacagaagggaagtggtgtgaaagtttggtcaagaagtaaaagaagtggtgtttgacacgtgtactgcttgcagtgtatcacgtgacacgtggagacgctttcgtagcgatgaacacgtcaaacaaactgctttacttcaaaactgcttccactaattccacggaaatctcacagatattttcaatttctccttttttgagaggccaagaagataacattttaatgtttatgattcgaatctgtttactccatcccctcttttcaaagaatttttagttttattgtgaaaagattaataatttatcactcactagatttacatattaaaatcgatattgtgtaataatttacataaacattttcaataatttctagagttttacattgacctactaaaagtacatataagaaaaatgaaattacaatctttggttatcttccaaagtgaaacctatacattttttctcctagttgagtaaagggagagttaaaggacatgactcatgagaaacttaaatacaaaaaaaatgtggaacagagaggacaaaaacctgctcaagaatgctaatgctaagcagtaagcagcccatatacatatatccacaaagattaaattatacttaaaaagagaaaagaaaaaataagtgttggaaaaaatggggtcattgaggttttgtttcttcaactcacctttaaacccattttgccaaaaccagtgtcttgcatcatatccacaaactcgctgtagtctattcttccatcctgacaaaaacaatcatataacatcattataaagaacaatgttcttgcaagtaactataggtaaagcatatcaattgcatattaatgagttgttacgttgtctttatcgacttcgcgtaaaatgtcgtctaaatgaacatccgctaagccaaattgcttgcaagcttgttggagctcgtctctggttatataaccacttccatcttggtcaaagtaagagaatgctgtgaacaaatggtcttctttctctattttgttcaaatgcaccattgctgctataaactctccatagtctattgtcccactgttatctatatccgcctgatcaaatgttcatatttttccaaattattatctcacacatctcacatcatatagtaaacaaaaggtgatttcagtataaaaatggacttactgcttgcattaatcctagtatttctgaatctttaaggtcagcaccaactctgtccaaacctttcttgagttcttcgagagtgatgtgtccactattatctgtatctatcatcttgaacatttccttcaatcctgctatttcttcctctgacaagctttctgctattacctgaatcaaatacatcacgtataactctctatcttgcacataatttggtatagatgatagaaaccaattcaaaatgtttaccttgatagctattttcttgagcttgttcatggctgaaaattgttgcaaacgacttaggacagcagaatcaagaggtttatcaagagcaacaccatctactctggcccatggatgacctaaaatataaattcaacattttacaaatctttatagtacttactcttatcaaaaagatataacttatttggaaacaagaacactaacagagaacttcatgagtagtcattcgcttcttagggtctctgattagcatccgacggaccaaatccttggcactttctgatacactaggccatggttctgatataaaatcaaggtcacctttcaaaacctgctcaaagatcccctgttccgtttctgacatataagcacaatccaatcagtctctttatcacttcaacatacctgaaacaatgaatcaacaactgtctcttaccatcccaaaacggagggacgccacttagtaaaatgtaaataataactccggcactccaaacatcacattcatgactataatgtttccttaaaacttctggtgccacataataaggactaccaacgacatcagtgaatgtttctcctgtaatcaccaacatatatagtcaagatcatattgtatatgggatctgttaaaagtagcattggggacatatactatacctggtttaaagaaaacagagaggccaaaatcaatagtcttgagagcagcttcttcatctccactaacaaataaaaaattctcaggcttaagatcacggtgcattacacctaaagaatgacaagcttctataacaccaacaatgatcctagcaagctcagcagcttttttctcagtataatgccctctctgtataatcctatcaaataactctccacctgcacaaatctccatcacaacatgaacagctactgcatcttcatacgcaccaacgatctgaatcacgtttggatgaccagacaaatgatgcattatctgaatctctcttctcacatcttcaacatcctcaggtgttgttaatttcctcttagctatcgttttacaagcgaactctttacctgtcttcttatccacgcaaagaaacgttgttccaaattgtccttgacctaattttctcccaacactgtatatatctttgagattctctgtttttctcccaagaactgagtctatttgtagacctgcgcttgccatacgtttcatgtgcgcttctttcttctgcggtttcgaattcggatcttctttgttctctgtgataggttttggtggtggttcttcgttggccattttcaccggaggtggtggtgtgctcggtgttggcaacgtggatggtgctggatccacggtggaggaaacgtgaccgttactgtcgtcgccattaacgcttttatcgttcttttttcgactgctctcgtccttgctgctcttaatgctatcgtctggtttctgattccgccacacggcagcactaacggattgaaggaatccattagggttcagattcggacccacgcatgtgtttcccattcaaaaaatttaacctaaaatcacaaaacctaattttgcttctttttttttcttctctctgtttgagattatctattacttctccgacaatgaaaacacgaaccactcattagcgtcatcaacgtgaatgatgaatccatatagaatattgccgtgtcttcaaaatcgacacagctcggtgaaaacctgagataatgaattgaccacctaagtcgctcgcaagcaaccttgttctgcacgttttccggatacaaaatggtcgagaaacgtcttggaattgtaaaatgtggctaaatgatttgattcggagaagatctgatgagctgatgatcagaggaggggaagaaggaacgagagagaacaaggaaaggactatgccattgccgtccatttttacgagaaaatatggaaagtttttttacagagcccaattttagactaggactcacttttatcaaaaacaatttctttttgtcttttaatttttaacaattaattaatttttttgaaaaaatatataacgttgagtgattatattgtagggaattaactgcgaaggatttagttaataaatattttgattgaagaaaatatacaataagaagaaattttgtttatctaaagtaaaattctgaaacttgtgatgtatatagacatgaactgatgaacgtgtgtaatctattgacttgtcttttaaacaattaataaggaacaacatccaataacatcttaaacaacacaaaaaagtatttaaacacaactcgatttatgtctcaccaaagaaaaaaaataaaataaacctctcctaattatgattctctctcgaatctgtaatgtctcgggcacggcagaaacaaataaaagtaatatatctttttttttgtcatcaccttttgtttagatgaagttaataattgaacttgaagagatacaccattaataaccgatcatatgcttcgtctgttcattccaaaacatcttcgactgcttcaccatctcagaccgttcattcatcatcctctccttccaatattctttgcttctacaaaaaaatatattatgctttcatcatatgacattaataattcttgcaatataaatacagtttgaacaatatataccaccccaagaatatattcagatgtttatgaaaggctcactcataacgacttcaaaacttaaaaaaaaaattaagaacaaaaattcgatcgcaacttcattttctagttacttaacgaatgaaaacaccatcttgctatatgaatgataataatcatcagttcaaattttatggacacatctatactgatttggtgcaatctaaaatttgagacttgtcttaccgtgtctttaaaagaagatgcagctcgatcatgtgaactgcttccgcgtaaactccagcctgataccgcaaggaataaatcaagattgacctcattatagatattggaaacaaaagttgagagaagaacacgtttaatgttgcaagaatctaaacaaacctctctgcagatgggacattttgaatgtcggggcgctgctttaatgccttggaaaatcaatacagaagcagccgagcatgcacacgagttacaaaatatgtgaccgcactttaaagcatagggattgaataccgtttcctgcccaaatttatccacaacaaattactattttcacctccagatatgcaaactacattttatttgtgaaaaaatgcaaagagattttttattacgaggcagattgcacaagttagatcatactccagctctattgagttaggcagcatgagttttagcactggttgatcttcgttgagattttcacaagcgacacggccaaacgaattcttgaagtttccaacattatctagcccagagttgagataaaaggctccaagttctatgagccatggtgagtgcaagagctctatgcgctccgctcgcattttcaacttgaaattcttcccattctctgagctatgcacctgaaagcatttttaagcagtttactttctcacaacaaatgaagtcacatcttcttattttaaaatgaattattatctttgccataatctctaaccttgtcatatttcttgaggattttacggatagcaattgcattcatggtgatgtattgaatcaagatttggccctcttggactaaagcttgtttttcgtcagtgaagcatctgcgtaggcgaatcatgtatctctgcatcccagtggctacatgaagatggagaagatgcctcactcttgacctgaaaaatcccgctatgtcagtagcttctttcatcagctcctcgaagaacatctgatcacaccctgcattgtaattaacatcatcttttacatcaaccacctaatctcaaataattaaacaaaaaactcactccactccttaataatttgaaatcttttacatcaataaacatttagattattctagtaggattcacatcagaaactagaaaaaaatctacagtatataaaagaattagactaatccattcattgtcaattggtttagaattagaaacttaacatggtatctcatttgatccaagtagggtatatgtttgcttatctttcagtggatttcaatttgagatggacgaaagaatcatcatctccaaatgacttgttagaatctcacatcaaatattcttttagaaatacttaaaaacatatacgagacattgcccaaatctactcgttactaattggctttaagttagaaatccatgtaacttaagatattcagaattaggaccatctttttaagtgtgtcatacataccaagtagatcgttacgttccccattagactgttgcacaaagattactaagttaagtgaagactagaggaaaaagagagagaagttatacatacaagggcaagctttgcattcgcatgaatcagacaaagatgaagaagtagcagatgggatgatttgtccatcatcagattttgtagagttacatgtcttgcacttcttcaacactttcttaagtttcttatattcaacgaagcgacacttctccaggaaccattcctcttctccatgtagatattccgtgaacgtctcaccaaacttcatcttctaacatagtacacaaatttcaatctcaggctgcaatattaatatacaccaaatatgatttttttgtaattgagtaaacaaatttatgttctagtaaattcctcggaaggaaaatatcgaattgtaacagatttaaaattggatactttggagatagtgaaattgagagaaatattgacaaaataaagtaaaagagatcgaaatattttgaagccaattaccttttcgtcacgtcaaaaacaagggatctagtgattaagaacaacagaagctggtggaggaagacgaaatctctaccgattaaagtcgctattaactttattgggtattgtaatttctatttttagggttttgttttgctttttatcttaatcacggtatttttagggttttgttatacaaaccatatcagctaagttgctttggtaacctgaatagcttcgttttaaacggcatgccgcttacgtgttaaagtattagagaccaagaaaaggcgttagaatttgatcccatctcaacaaattgttctgccagttgtccaatacttaataacttaagggtattcagtttcgtttattacattcgcggaataaataaaaaatagcggggacatgaatgataattaaatttccgaagaatactaaaaaatacaaatttattcttgttaattaaaaaaatatattttaaagatatcccacttacatttgattttggtccaatggtttctatcaaattcgtacatcaaaggacgaaacaaatctatcttgaatggtagaagacataataacggatgaagttaaaatctttatatgatgaaaagctaaacaatgtagtctaaagtatctaaatttttctgccaatctctgttaagatcatttacgttatttataaaaaaaattgaaaagaaagacaacaatagtatgaatgaggtttcatggaaaaaaagagcatattccataccttgtcacttagccgtaacaacatctcttttgttaaaggtaaaattgatgagactaagctaatttaattggaaagaatcatgaagcctccactttttcttgtatgctaaacaaatctccgctttaaacgatagcctttggtattggaacttccactaataattaaattaattgatacttactactagtatttagtaagatactaattgggttttccttttttcccttgtaatgccaacatgagtggcagagaaggtttctgccttggagattatgggaaattaaagtccatattttatgtcgagtctcaacgattccgcttgtaaccaaaaaaatatttgcttctttattattctgataacgacaaacactaacacgatgtatggaatcaaaactctctttttttctttctctttgcgtgtagcaaaataattgaagacaaataactaaaattagaacacaattacaagttaagtgatacatttggtagagattggacccacaagagaattttcttagagaagaatactgagaaaaaatatcgtacattggaagtaaaaaaacggatcttagttctttaagaggttgaattttgaggggagtaaagataaaatatttacttttacttgtacggtaacataaaatatttgtgagtcgaagcgaacaaatttttttaaaaagaaatttagtattcaaaagataaatgatgtacttttattctttagtacgtatcttacactaaaacaatcggatcataatatcgctttcttcgtctgaggcttttaattaggcagacttgaatttctagaattggttcaggtgtgggtgcaattaaccctaaaaaagatatgttttcgccttttatcccaaagaattgtataaacgatgcatgcaggaatcatgaggccgaataacttttgtcatgtggaaatccgactccgttaacttttgatgccatgaagaagaggcaactttggttcaagcaaaaagtaagattctatacgcaaaaaaagttgaggctatgtgatctatcaacgcttttggcaaaaactcacacatgtgcatatacgtatatgcatatattaaattttagtattattcttattgaaaatgacgaccaataattcccacccataatatgtttaaaatttgcatgtattagtcctcacctttatattttcaagcaatgacttatctacattttgttgtttagtgttaccgacaactttgattccccaaagttgaatttagctattcaattcaaagcagttttgaatttagtcggtttagtattaacgtaatgccaacgttggtatgattaacgtttaagtactcacaacacgtcaacatatactacgcttgtgttcctggctaaaagagttgcatccggagaaactgatgtctgaggtgtcggaaaatttgctgaaggatctagctgacgatctaaccctgcccgatgtgcggtaggagcaacacaaatgactgctcttggatctacttacgtgatcgtccctatgaaattgacaagtagagtttttagctgtctctttacattgattgtttagatgatcttttagataaatctgccaaaattatgtgttagccttaagtttgattttgcacgtttttatattttatatgtttcatacaaaaaggaagagagaaaacgcacgaaacacactttggattttggaacatagagacatatggacagccatcatgtccagatttcaagtacattttggagtttcgaaacaaagttgattacatccttaggaaatttgtatgacaaatacgagccaaacgataagccactaccaaaaatatggccattattaacatacggaaaacgctatggtatcgtttacattgcggattcgtgtaaacgcataattagtgcgtttgataattatcaactatatttgggctgaactttaaaaaaatctgcctaaaaccaaaaaaaaaactaccttttttaagaaaattccatacctatttttcaagatttgattattttgcttggacttccgaagatggggttgatattagtttgccattttccaaaataaatatcgtatgagttagtcaacactttaaaacctagtttgaatactagctatactttctttttttgtcatgactcaatgacaacaaaataattttgtttggacttcagaaaacaattaatggactaggttctttttttttttttgtaaactgtttttttgttaatgtctaatggtgagaaggtaaggctaggatctcggttcaaaaataataattattcagagtagaagttttttttttttttttttgttgtcaaaccttcagagtagaagtagaacatgtaatttaataatttgtgcgagttattgtagttatatataggtgactattcgagttcaagtaatttagaagcataaataacgtccacgtcaagttaagttacttaacactaaaacaaataaaaataataattagagaacgtaattaattatttaagggtttgtcattactctgaccacgttacatgcatccattccttctttattggcgaaagcgttgaccaaaaaccgtaactctaatattgctttcgtcagaaatttgaaataaaagatggatttgtatttaaatgatgacaacactaacataagccttagaattagattatatgttttagtaaattacattaatgtatagaaggaaaaaaaatgaattaatattatttctattatcatatgttttagtaaattaaaaaaatgaattaatatgagtattgtagttatgatactaacaccaactactagattatatgtcatagttatccgatattgatagttttttttgtagtgaattgaactctttaaagaaaagaaaaaaaaactctacattttgaaatataaatattgatacaaaattgtaaacccatgctatggcaattggcaaagagaagaaaaatgtttggaccatctgatgttaactcactatttttttccttttctggcagttctttattatagagtttatctatcaattatccttgtttggggttcagacgatttatccagcaatgggagaaacaagagtagccacatatcatgataagaaagatagtattatgtttccacaagaatcagattttaatgataagaaaatagtggaaaaaccgaagctacaactttttccgtaggggttactctagttttgttactcatagactgaaataaagtccaatgtttcaaaaacaaaccatggcaacttgctgttgcaggttaacctttttgggaattaaatacttaatctaagttaattatttgattgaaataatacaacagaaaaataattaacatataatagtgtgaatcattcaccaattattccaaaaaaaaaaaaaaaaacgttcgacccaatgtgaacttaaaagccagttttagaagcaataagacctcaacacatggatgtacaaagtcaataccaaaaaataataccattgatcatttcgtcaactctatgatagattttaagttagcctttaaattattttgatttcttttgggttactcttcagcgagaagtaaaatgtagtatacaacattatcgtcggctactactgattctaatccagtcaaaacaaactgaactcaaacaaatgtttaagataagtaataagaaaatcatattcctaataattaagctggtggagttggtagtgctaaatggaaagattaaactaaccatggaccagaatacacaaagaatgttttacccagaagataggatgaataactactcttcaaaaatcatataaagtaacatttcttaagtaaactatagtcaaagagatttctttaaatttccgtttttggaaaattttctcatttgactgaaatcacttattgaaatgacatcgaaattgagtggtggtaattgagcagtcacgttaacaatttcagttgtacaatgttgaataaacgtaggtagtggctacttaatttcttcgatttcttaagtgcttagtacttttcaacattaaaaatgttgttaccaagtctaaattttcttcacaacttgtaactaaacttttcattatgtgtaatcgtaaaggattagcgctacaaatagatggtgattcccttctaatggacgagttgacattgacgcattatgtctctggttagctagtccgacgtttgaacaagtactcttaccgctctcgaaacaaaattaaaaccaaaattttatagatctattagtaaaatctactattgttaattttatcacatagtccatgtgtgtgttaatattaaggatgaagtcaatgtatatatatatatcaaatctctattcctactagatatgggaatcacctacttgtataaatggcaaactcattcaacgagctacacacgacttttccaacttatttcagtgtttgagatcattttaatgcaacaactatatgttaaagggaaattggtctagaagcggctatttcttggtcttgaaatcatattgttcttctatagtgtagtgacatttcctataattaatttgaaaaaaggaagaaattgtgttggcaatgaaaacatcatatgtatggtgtgaagtatatacaaaaaaaaaatcccattcgtgaatgaaaactacggtgtatatatgtgaaagacatatatggagccttcactatacggtgtagttcatttacataagaatggttggaaatggagatgccatattttttttattttttttttccacaatggagatgccatatctataaaaaaagaaaagaggttgaactagttgggtcggcgcgacgaaaagagaaaatacaacttgctgggctaaatctagaaatttccatttctgtaaatgccttaaattaatggctcttatttatcaaatacggaacaaaccctctttacaccttacaagttacgggtatagggtgtttattctcccgtacccgttcaaactacactatataataaaccattgacattgtagacctattacacatcctgcagttattggcttattgcgatctttattaaatccaaagatacatactatatcgaagaaacaaaaagtcaagaaataataaaacgaaaataaatgaaggcatcaataaaagcttaccgctcacatgtttattttctaataactaatttttatttaaaaagcagtttatacatctaccaaatttatttcttagcataaatatatatttgggttttgacttttaagttctttctgacttctgagtgataatcaccagtttgcaacttatatttgcctaaaccgcatgccaattgtcatgtatcgtatctagtaatggtattaatgacgaggatcccaaaatttaaattccactttccaagcattgagctctttaaacaattcatggtcaacttaattacaaggaaaaaaaagaacttattgttatagtggaacagctatttttttggatattaaaagaataataacagcaaaacagaattatcgtgtcctaataatacctaaggtcctaaacgaagcaaaaaagttggtaaataaggaagagaaaacctacaagatattaaaacggtgtcgttgttcggaagaatataccgaagtagcaaaaggaatatctcattagagagtcccttataaatgaccgttttaatacacttcaactctgtccttgttcataggcagcttcaacgatcattccacttccttcttcctctctctcaacattttcccctgaaaataaggaaactaaagattcttcctctctctttctacactcttctgacaatactaaaacactttatcagatcagatcccacataaactttctgtaagtgtttcttttaaactatgtctgttgatgttaatgtttatggatgcataatgattttagttaggacgttatcgtttttgttttgttaggtggtcctctctccctgttcaatctctaattcgtcatgtcttattcgtttctttcattggaaaaaaaacactgaaaactagtttttgtttttccaactttcttggatcattaaataggattgctctctcttcaaacgtatttttgttggatctctcctcttcagttctagaagacttttttttttttccttttgttgagtgcatgatttcaaaaaatttcaattgaagaagtttgtgatattttgttgttttctttcttcaataagaggtgtgtccgcaattaagacaaaacaactcgctgtcatactcagttaaagtctttgttgctcgtgttcagattttcactagacgtcacaagtcaacttttgtgggtaactgaagacaaatagtaatcgttgaaaactacaataataaaataagtacttccagtgtctccgttcacctttaaaaagtcgagataaacccaaaaaaataggaataaacaatcttttgtcatatccgttaataagttttaacaaatctttacaaattaataagaagaacgtatataataaatatttcaaaattaacgagtgtggactaatattgagttgacttttattatcacttcatttcagttccttgaatatgcatatactgtatatggtttctcttgcaataagtaagcatcatacatatgtacaggaacatgagaagttgtcgttaacaactacttcatctaaaaaacatacacatgttatttttctaatattgcctgacttcaagttcggtgaacatactttattgggttgtaattgtgagatcaatgaaatgagaaaaattaaatagaacttttatgatattttaatgttaattgatactatataaagcagggtctaattctatttgcttttaaaactgcctaacttatttcaagttcggtataactaactactttattgtttgtaatgagttatttaagggtacttatatgtcgaacttttttttgtgtgatgaaaaattgcagaggagaagaagaatggcaagggaacaattacaagtgttgaatgcacttgacgtggccaagacgcaatggtaccatttcacggcgatcataatcgccggaatgggattcttcactgatgcttacgatctcttttgcatctctctcgtaacgaagctcctcggtcgtatttattaccacgtggaaggcgcacaaaagcctgggactctccctcccaacgtcgcagccgccgtcaatggcgttgccttctgtgggactctcgccggtcagctctttttcgggtggcttggtgataagctcgggaggaagaaagtttacggtatgacgttgatggtcatggtcctttgttcaatagcctctggtctctctttcggacatgagccaaaagctgtgatggccacgctctgtttttttcggttttggcttggatttggcatcggtggtgactaccctttatccgcaaccatcatgtctgaatatgcgaacaagaagactcgcggagcctttgtctctgcggtttttgctatgcaagggttcggaatcatggctggtggtattttcgctattataatttcctctgcttttgaagctaagtttccatccccggcctatgcggatgatgccttgggatccacgattcctcaagctgatttggtatggcggataatcctgatggctggtgctatccctgcggctatgacgtattactcaaggtcgaagatgcctgagaccgcaaggtacacggctttggttgctaaggacgcaaagcaggcagcttcggacatgtctaaggttctgcaagtggagatagagccagaacaacagaaattggaagagatctcaaaggagaagtccaaggcctttggattgttctcaaaggaattcatgagtcgccatgggcttcatttgctaggcactacatcgacatggttccttctcgacattgctttctacagtcaaaaccttttccaaaaggatattttcagcgcgatcggatggattcctcccgcgcaaagcatgaacgcaattcaagaggttttcaagattgcccgtgcgcaaacgctaatcgccttgtgtagcacggtacctggttactggttcacagttgcgttcatcgacgtcattggaagatttgcgattcagatgatgggtttctttttcatgacggtctttatgtttgctctggctattccttacaaccactggactcacaaggagaaccgaatcggatttgttatcatgtactcgttaacattctttttcgccaactttggacccaatgctacaaccttcgttgtgccggccgaaatcttcccagccaggttcagatcaacctgccacggtatctctgcagcatcaggaaaattaggagcaatggttggtgcgttcgggttcttgtacttggctcagaacccagacaaggacaagaccgacgcaggataccctccagggattggggtcaggaactcgcttattgtgttgggtgtagttaacttcttaggtatcctcttcactttcttggtacctgaatctaaaggtaagtcactcgaggaaatgtccggtgaaaatgaagacaatgagaatagcaacaatgatagtagaacggtcccaatagtttaggtgatataatacgccttttgtaataattttcgttttttctttctccttgtctctagcaactcaagttgttctttgtgtaatccattgatacctaattaatgctagagaaatcaaaattttcatgagtcgattttaaatcagttcctaaattgaagatttattagacttgaagaagccgtgcaagttgtgcagtatatatgttaaatcacaatttatgcgttgcggggaagttgagaccacagataaaggcttcacttaaagatacattatggcttattaatctctagggtgaaaataacgaagtgctgaagaaaaactctgttcttttaacaaactcccttgcaccgaacaacattctcattgttcatcgacctatggaagaccaaaaacgattgctactttggtaaattttgtaaactttagggcatatgaaagcggtgggtatatattatagtttcacaatggtaagaaaaatatttgggatgttacagtatttttaggcatggtaaaaaggcccatattggacataaaaatatgtaatccctcaaatgaagtggaaattagataatttatttatttataaaactctgaatttagataatttcttatcttttgtttttgtaaaaaagaatttcatgttggataaaatatatattgcatttattgtgtgtgactatcttattggtggacaaaatatacatttttttaaaaaaagtattatcatcggaaattaggtttttcgacgggaaaaaaaaccaatcaccataacaaaatccagaggctctgttgttcttggggttgaatgtgtaatgtctcataagtcttcggatctcacttcgtccgggtatgtgttctactcgcttttcgtctgttaaaaactggaccttccgatcgctaatcaatatcaatcttagctttttttcgtcttccggttttagattttgtatcctaagctccgatactctttacgagaagcgtttttatttcaagctcagagtcaatcttagtatagggctgctaatggttttcatgtcttggatcacatcctgtggttgaaaaaggagtattctttactgattcttttgagaaagcaataaccaataaagtagaaggctctccttcgtaattgacctggaatctgtgatataagtattgaaagtaccataatttacagtttgtctctcagttcttgaaagtttagatgctgtctaatgatatatggtgtatgagtttaagttcctagactaatcaagaagaccgtttctgtgatctttgtgatgatgactgaatcttctaagtagcagtctttttcttcacacctatcattttttagttgaataacgtatcgtagttactgtgtttaatcacttggtttatacttgacattagatttctttccatcttctgcaggaagttgcatctttattgacctcatctgaagttcaatttatttcgtcttccggaaatcaatccttttggtggctgtaaggtttaatgggcattgaaggtgtatcaacgtatttgaaatctggaaatatggacacaatttctgctccgccaggttttgtatctcaaacatcgtttgtgctgaggaatgtaccccgagacaaagaaagtcccaggtccgtgtcgagacaagagcagacaactggattcggcacagatgataaagatagttgcaatatgtttcttaaaagccgaccgtggatagtgcatggtcacacaattcccagctcagaggccttaaggccgaaaaaaactgaggtctcatactatgtctacctctttcctctctatcttcatatagagtagtttttagctttgtatgctgttgagaagagcagtaaagggaatatagttatttgagaattttgagcttagccgtgaggacaatggttcgacaccttgttggaggagggtcttttgagtatccttattagagcaagagccaatttgttgtggaggaatgcttttccttttctttttatcaaaatagttatgttttcctattattttttagttctttagtctattataaacattctttgagttcaaagaggagatatttctgggaaatatgcatagtcattactactaatagacattatacttgattgatgtttaagttgttagttaagccggaaatttcatgttgtggattgcataagtgatttagtatgaattctttagagcttgatgtgctgattcgggtaggtctactatgcctttaagacgtatgagagtataggtatcatgattgtgtgttcatcctttcacattcattactaaagtatgaaaaaatgcttttcataggtacggagaagacggcccctcaaagtgtctgagaccaaagtccttgaggaagctcctgtgttcaacccaaccgaagaggtcagttttgttttctttttatgaaagaaaaattagggtattaaactaaattatctttggtaaagaatcatgtactcttacagaggaatatattccttttcctcttacccagtgttactgaattatcaggaattcagggacacactctcatatatatcaagcttgcgtgacagagctgagccgtatggaatctgttgtgttgttcctccaccttcatggaaacctccatgtcttctcaaggagaaacaaatatgggaggcttctacatttttccctcaagttcagctctttggaattcagaccgagaaccgaaagattaaaaaggaggttgatgcagatagtaatgatgctgcatctgaaggggttcagttatgtagagtagaacgtggtcctgggtatactttgaagtcctttaaaaactttgcagatacatacaagaagagtcattttggcatgaaggatgaggttttgggttcagagaactcatctccatcacttaaaccaaatgagctaattgtggcagacattgaaaaagagtacagacaaattgttgagagtccacttattgaaattggggtaatgttaaaaacagttgttctgcttttatatatgaaacggaatatatcactaacttgtcgtgtaaatttaggtgctttatggcaatgatttagacactgcaacgtttggaagtggatttcccttatctgcaccatctgaatctagcaaatattcatcaggttggaatctgaacagtacggctaagcttcctggttctcttctatcattagaagactgcgaatcagtttgtgttcctcgtctaagtgtaggaatgtgcttgtcttcccagttctgggtaagttttaaggttgatgtcaagctatggtcgtcaatttctgaaagcataagtataactggtcaacgcagaaatagcatttgttttgcaaactaccactagaataaattttgcagcattgtaagtttattaatctaatttgcttgtgtagtctcatatttgtctcttggaatatctgttactgaacagaaatctgagaaggagagactctactctctctgctatttgcatgtgggcgctcctagagtgtggtattccgtagcaggatgtcatcgatcaaagtttaaggctgccatgaaaagcttcatccttgagatgtcaggagaacagccaaagaagagtcataatcctgtaagtatttgaacacattaagcatcaatacaagttactcttttcaaaattccgaaagaaaatagacagaagagtgaccaacaacgattccacttgcgatttagttcttgttcagcatacacgaccatgacatgacatagagagatcacacagtatttggatttatctgttcaaagcaaatcctatcattactttgttaaatttttgtgagctattatatactagtattggttcatttacaagggaagcaattcatttggcaggtgatgatgatgtctccatatcaattgagcgtggagggtataccagtgacccgctgtgtccagcaccctggccagtatgttattatatttccagggtcgtattactctgcctttgactgtggcttcaactgtttggagaaagcaaactttgctccccttgattggttgccccatggggatattgctgttcaggtgaatcaagagatgagtaaaacgtcgctgatatcgtatgataagctattatttagtgctgcaagggaagctgtaaaatgtcttaaggaatatgggttgtcgaagaaaaacacagcatgttacacgagatggaatgattcttgtgggacggatgggttgttctccaacataatcaaggtaatactcactgctcctcctctttgcttgtcttattcctcagattatgcactaaaacctgcgtagaataacttcctcagtaccttttgctaattttgtttctctcttttatgtagtcacggatcaaactggagaaaaatagacgtgaatttcttatcagttcactagaatcgcaaaggatggacaagagttatgatgctgtgaacaaaagggaatgctgtgtatgtcttggggatttgtatctttccgcggttaactgttcatgctctgctaatcgttactcgtgtctgaaccacatgaggaagctctgtgcatgtccgtgtgacagaaagagttttctctataggtacactatggatgagttgaatcttctcgttgaagccctggaaggtaaaaagctcagctctatgttcagatgggcaggcatagatcaaaaattctgtgcttctccagccaccacaagttcaaaacccgaagaagacaaaggcaaggaaacagatgaggttacaccctgtaatatcacgaggaaagatgtcgcagctggaactaaggaccagacaagagtgaaggcgagatctttggctgatatactgaatgttaaagatggaaacaatgatgcaaaggagactttagaatcttgttctaagaaatcaaacaggccatgcgataacgattcctctgaggccaacgcgccaaagaaacagaagcagtgatgaataatgaaggagattgtagtttagtcacaaaatgcaagacgataaaaacacttttgtcttcttcttaaatcgatatatgaagcaacttttttttttggtaggcgatacatgaagcaacttgatatgtgttttgtttgttttggctaatagacaaaaacatttttttggtttcactaatatttatttacgttgactctaactaaagtagaaggaaaatatttgacgaaaatacagagccgttggatttgatgactttatgagattgagattagttttgactttctttttttgagagctgcggttttgtaaaaatggcccacaatttctctgaaaattcaaaattcagtgccggagattactcgtcgtagtcgtctgtgtcagatttagttctatttgcgatagtgcgaatggcggagacggacgtcggaagtgtgaaggggaaggagaaaggatcgggaaagcgctggattttgctgatcggagctatagctgccgttctgttagccgtcgtggtcgctgtgtttttgaatactcagaattcgtcgatttctgaatttaccggaaaaatatgcaattgccgtcaggttaggtatttctaaaagctctttgtaagtttctgaattggatacttgagctcgtgattagctttgaatctcagcgattactttgattttgatttgtatactagacttctcaatcgttttgattttgttgttaggctgagcagcagaagtacattgggatagttgaagattgttgttgtgattatgaaactgtgaatcggctaaacacggaagtgttgaatccattgcttcaggaccttgttaagacaccattttacagatatttcaaggttggttcatatttcttctttgatcatgaaagtatctagaggatttggaggtgtgttgtgataggtttgaatgcgtttaataggttaaactgtggtgtgattgcccgttttggcctgatgatggcatgtgccggttaagagactgcagtgtttgtgaatgtcctgaaagcgagttccctgaagtatttaagaagccattaagtcaatacaatcctgtttgtcaagaggggaaaccgcaagctactgttgatcgtaccttggatactagagcttttaggggttggacagtcacagacaatccctggaccagtgatgatgaaactgacaatggtaacttttctttacagtctacttcatttttgattcttacatgtcgaaactctatcgctacttcatatataactggctcatgagatgatatgtaacaagtaggggttttagcatcgaattgctatgtgttagatgcagtttttgatgactgtatatatgatcgcagatgaaatgacatatgttaatcttcggcttaatcctgaacggtacactggctatattggcccatcagctagaaggatatgggaagctatatactctgagaactgtcccaaacgtaagcttcaccatattaaagtgtttcttgttttctctatttgtttctttatactcttattctccaagtggctgattaattcatatggctgtcttaactcctgcaattatactggcttctatagatacatctgaaggatcttgccaagaagagaagatcttgtacaaattggtttctggtcttcactcatccatttcagttcatatcgcttcagattatttacttgatgaagctacaaacttggtaagatctgccgtacgaatctgacttatctgtgatatgtatttcttaagcagatatagaatgactcaaagactacttttttttgtatttcagtggggtcaaaacctgacgttgttgtatgatcgtgtgttaagatacccagaccgcgttcagaacctatacttcacatttttgttcgttcttagagcagtaacaaaggtcagttacttaccactttacttttctgtctggatcctaggaaaagggtcccagtggtctagaatagtcacaattagttttttttgcatgatttgtaggcagaagattacttgggagaggctgaatatgagactggtaatgtgattgaggacttgaagaccaaatctctggtgaagcaagtagttagtgaccccaaaactaaagcagcttgtccagtaccatttgatgaagcaaagctctggaaaggccaacgtggaccagaactgaagcaacaattagaaaaacaattcagaaacataaggtccttcttgagtcctttaactaattttcttgagcaatgataaaatttccactgactagctaagttaaattcttttttattacttgaatcgtcttgcattgcagtgcaataatggactgtgtaggctgtgagaaatgccgtctatggggaaagcttcagattctcggtctcggtactgcattgaaaattctattcactgtcaatggtgaagacaatttgcgtcataatgtgcgtttctaacacacctggagacgcattgtccatttgcaccgtgtattttctttaagcgtctattgggaacggcattttagtgatgtagcaatctttgttgttttgtttcagctcgaattgcaaaggaacgaagtgattgcgctgatgaatcttctccaccgattatctgaatccgtgaagtatgttcatgacatgagtcctgcggccgagagaatcgcaggtggacatgcctcttcagggaacagcttttggcaaagaatagtgacatctatagcgcaatcaaaaggtaagaaagcattaaagaatttgtagactttaatcgtgaagtgagacaagaggtagaaacttattttctctggtcaccacttgctgaaatgcagctgtatctgggaagagaagctagatgttcaatgaggtctgggggttgtgggatcaagcgcagtgatggcgggagagtatactttgttgtaaagtaaagagaggttaattttgcaggaaacagttatacaaagccccgttagatgccaacccgaagctgagaactttttgatttaccctttaacgtgaatttagagaatcttacatgaaactaaaaatattgtacggattttgaaatttgttgacagtcccttctgaagtaaacatagaatgggtggaaaaacgtgaatgaagagagacatttttatttgttcggtatcagtttaggcatatcataaattgcctactcaccaaagctcccattacaaaatgttggggtttggtttacaacttcgcagatttaactacctgaaacacatgcaatgtataaaaccttgaggataactactcttgtatagtaaaacttccaatttcttcaggaaaacctgataactagtgtagaagttatcaaccattggaataaaggtcttttaatattgcagctgcatgtaaaaacactaattgtttggtcagtggtgctattcacattgcatatgcataaatatcaaaaacaactgttgggttacaatcagtgtcatgccaaggtcaatagaaattttcaaatttccctgcacacttttattttagtgcaaatgtattcgaaacttcgaagttgtatatactatcttgatgataactgctatgtaatcctaacttcctaactctccggatttgggagagctggagaaacgtagagctttgcgtatagtagtagtaatcagcaacaaattacgcaatattttgaaatgattctcacatgtaatgcaaagaggttgccaacaaaatttaagtgtatattacaattaaagacgaaaaagcactaaaaagataataaaaagagagttcagcttttgcggttgacttaggccagaaatagtgcgagacataaagagacactataaagggaatcctatcctccaacctcaatcaatgaacaccttttgattctcttttgttctttattattgcctctccatataaaattatatgaatacattacgtacaaattcagaaagacaggttggttagtagttagcattgtagataaagatcgatatatggtatccaaactttaactcattacattcgatttttttataatgaacgtgaggatatggaagtccttgttctggtgttcttatttttcatttgcagcgtcaaggtgttagtataattgcatggcaaaaaggtttgagaaattttctttttatgcccatctttttaaaaaagttaggcttttaaatattcatcgctttcagaaaaattggtagtttgcaagaacaatagatgataaaaaaggtagtgggaacagacaaaggccattgaaaacactcagtcttccgatatcagagttatctccattaagtatttatttcattttcttgcttttggctcaaacttttctctattacctactttgctttttggtatctttaaatttgaatctcgatgtatccaagttggtaactgcaaactattagcaccacagctgtcatgttcttcttcttgggtgattccaaatgtttttcttcttttagtgacggcattgttatagcagtattaatatagccgtatatgtaatatatcgatttttttgaccgtatattatcttatatcttggcttattattggtgatttccattttgttctacagctgatttgctattttgagaaaaaaaatttagacttattgattaaccatgcattgctacgagttcattttcaatcctttatctcgcttgaagtgtagcctacggctacccaaatatattttctatgggttaaacagatttagttgtgaaactttggcaaacaagttatgaaaaaacaattgcatatatgtgatagaaatactcaaaaagttgtatttataatagaacatggagttttcacatacatcttcactcataaatcgtaattttctcatcatatactaaaatcattattctaaaaatatgagtcgataatacttcataatatcgaataaatttcgctattgatgccactttcaatattcatggcccttgtttactcgtcgtcttctattccaaagctccatcttatcacatcttgatcaattgacaagccgattagagataaattaatcttcattcgatgtgtatcttggcttttggttctcctcacttaattttttcttgcttcctttgcaaattttctctcattttgtttctgttcgaaaagttgcaacttaaactatacgtaaatgaatatttgctgatgaataaaatttgacattgtcaacaacaaaatgttcatgattaggcattaggtacataaaatcgtaaatggaccaataggatcttagattacagctgacattaatatatgcaacgggaaagttaaggatacgtatataataatgaaaagttgaagctaacgtcaaaagtagtggagccatccgagaataatgttgggatgatgattttgctaacgtaacatgtggttgaccaaatgacattgaccgctcgagcccttcggctttcgtcctcccaaagtttttttgcgtgtccttattcgacaatcctacaaaaaccaaaaacttcgaaaatctctccgagacacacacgacacttcttggatacacaaattgacctattcgtgttttatatgtacctaatagtttaaactttaaatctctctaatgcaaacaaatagtctcctaaatcgagtttgacaaaagctgatgattgccccaatgagaatattttgtaaactcgtttttttttctttttcaaaatttggtttaaaaatctagatgtcactgttaaagtatataacaatttatttattgtttctcttaatattggtttattacctacctgcaaataatatttggtccggtctatgttggtaatagtaaaaccatctttaaaagtagtcaatcgttacagtaaaccggaacattagcgtcaattaatcacctaatctgatacctaaaagtaaatatatagctgcttctgtatatatgacaagaattatgacaagaattatataattctgtaaaacatttcagtcatatagagagcttattattaaacttggaaagtaatgaaaagtagtagtaataacttttttgacatgagaaaataagaatattgaaatagatgaggtatatatagcgttgatgactacactaattactcataattattcattgcacacactatattttttgtgttgacaattttactttttgaatgatcacactcgtgacaattaatgggcatgatattaaacaacacatcaaaaccgtgtacgcatcataagtcgttttcatttgttttataagagcaacccagggtccaacttatgttatcatggcacttataaccaaaaagtcttattaatattagcatttttgttagagccaacgaaaaaactagatttttttgtacggtgtgatttttattagatgagactgatttagagtatatgttttacgattgtttggtgtttaaatagtatatctagtcgacagagaagcgatatacaatcttccaagcaaaagctgattgtcgatgtagtggaaatcattgtgtgtcgtcatgagttaatgtgggctagctcatgattattgtcgtctcattttgccaatgatctttaataccatggtcaaacggcaatacctattttggttaactagtgttttacaaacgggtaccatccacaatatcgacttaagttgtatttagctactttggtcgcgataaagtagcaactttgttttccctatcacgtttttacttgcaagttgcaaacatttttattaatagttgatttcgaataatcactaaaataaacatcaaatgaaacaaaacacatctctataactttacaaggaaattaatatagtaaatatgtaaatatatttagttacttttaaatatatattaaaaattaattactaaaaatattgtgactaagatattaattttgaaaatatatatatggttactaagatattagtcaatcaatcttttcctaaaaaaaaaaatattcagaagataatcttttaacatgatcacctctacatattcaattttttttgaatttgtctttttacggacaaatgaagtggcagagagcatcaattgtactcaccattttttccactataaaaataaaaatattagaaaattaagagattttttcttagaaaaaagaaaataagatttaaataatgataaatatatatagacttcaaataggattgttggtgaaaattttgccttgctatttatacctttatagtttattagtaccgtgggagatttttgttcaaatatcatgggcgttatgataacatttatatgaattcatatgccataaattgtaattattatttttgtaaaagtaaaatgatgtcaattcaatgtccagtcgctaccaactcaatggaaattaatacatttgagtgtactaatgtgtttttcttgtgcgtgttaataaaaaatattcgatgtatgaatgattcttaactgatgtaggagttgtaggacactagctatatcttgaatcacatcagaaaagtttattaattctaagtaaatacgcataaggattgaccaattaattcacaacataaataacataaaatcagaaaaatcagttttaatatttagctctatcattaaaagtgacggattgcccattgctttccacaagataataactatcgtgacttagctaactcgttaaataagcaaaatttctctgacgctcaaaactataaaatctaatgatgtttgaatctttatcaaaaaaactagaatttgtagcgacttcgaatacataacaacaaatcaatacaacacactatacaaacaacaataaaaaaaaggatagaaagagaaactattacatgcaggtaatgtggttgcagccttcaccccgatcaactatactcatacagttttgacatttcatccatcctagactctttgttgcagcatcaaatagtccaatctctgaattcttataagccttggacttaataaactcatctcaagtctttatcttacatttttaggcataatttgaaactacattcaaggcatttggaaggttcagtctgagaataaccaaagttgcgctttgacatgagaagtgaacaagatgggttaggacattacattttgtccaaaacgtggatcttgtccattttttctttctggattataagagtcatttgatgatatcagcaatatcgtgaaaatattttaagagaataactaattctaaatcccaaaaactttgggttcgaaaacgtaggttaaagacgaatgtgttaaacattttgatcaaagttaaagagttaaaaatttatgtaacttgcaataatcaaagaaaaatagaaacttggatgaaggcataaatttagggttatgacttaaggtagaaaagagatgtagcagtgcacgtgtgctcccaaaacctcatcatcatagtgtagtgtcatgtgcataattaaataaaaaaactcactggcttgtaccattattaatcgcacaaggagtattacaaatcagttgttttcatcattctactctcatcatttcatttcctctcatcattagcttcttttttcttcccaaacttattctattgcatgatctagtcatttcttttgctaacaatttgttagtaaaattttttagatatttttgatccaaggagttttttttccaataatttttcattggtaagaacgccttcttacacctattctttttttcgtcaatttcttgcacctattttaaaaatgcaatttgatatcttttcaaataattaaataatattttctttgacaaactaaaatgatttatatatggcaaaaagcagaagcattaattaactttatagattcactttttctttttatattatggatttattagcaagacccaaaacaaaggtcaaaacagtcgcgaatctcaatacttcctcaatctcttcttcttcttcttcactctctctctctctctcgtcaccaccactaacacttccactgattcatcattctccactgagaaacatttctctcgttaattcaacacttcaagtctctcactctccgtttcttcgagtgttctttggttctcctttgcattttcttgcgtctttggactcattactgtttcttactcaatccgaagaatgggaactagatggaggagaatgaaactagctttgggtctaaatctctgcacgtacctcccaagaactctagaggaatcacccactcctttgaattctacagagagactatccgatgttgctctgctttctccacttaactggcctatgactccgacaccttcctctcacggtctgaaattgtccagaaacagctctaaatcttcaaaggtttgatctttacgagacccactctctcgattcttgttctattgcttgtttttggtttagtgataatgagttgactttggatatgagtttgtcttcttcctcttatctgtttcttcttctctcaacttttaaactactctagctacactgttggtttggtattgtttcgttgtcaaaatggaatgtcgaatttgatacctttttactctgttgcttattgtcctcatagatctcgagctattgaattacacaaatgctataaaagttcatgatctttccaatgatcctcctatttgtagctgtaacagagttaaagatagtttctttgtctatatatagttacttagaagtatgtagtagtttgtgtctctgtctcttttcgtttagctggtgaacttatttaacttcaagtttttgctttatctttttgatgagcagacatgttctatatgcttaaataagatgaaagaaggaggaggacatgctcttttcacagcagagtgctcgcattcgtttcattttcactgcattgcttcgaatgtgaaacatggaaaccaagtttgcccggtgtgccgtgcaaaatggaaggaaatcccaatgcagcacccaagttttgatcttccttatctctttgctcggtcttataacaatgatgcagctattagccttgtccaccgcttacctagatctcgtggagttatgaatcaaggacgaggtctggctcctgagccgtctatgtttgatgatgatgaacggttagagcagcaactcgtgttttctgggaagagctatagtgatgctttggagaacaatcatcctgtaagaatgatggacttgaagatatatcctgaggtttccgctgtaccacgagctgactcccgtgagaagtttgatgtattggtgcatcttagagctgctgccatggttactggaaatgctaactctctcaacaatcagatatctaggtatcctcgagctccagttgatcttgtcacggtgcttgacatcagtgggagcatggctggaactaaactggctctactcaaacgagcaatgggttttgtgattcagaaccttggttcaaatgataggctctcggttattgctttctcttctactgctcgtcgtcttttccctttgactaagatgtctgatgctggtaggcagcgagcccttcaagctgtaaactcagtggttgcaaatggcgggaccaatatcgctgaaggtcttaggaaaggtgtcaaggtgatggaagatcgaagagataagaatcccgttgctagcattatccttttgtctgatggacgagacacctataccatgaaccaagctgatccaaactacaagttgttacttccattgtctatgcacggttgtgaaagcaagcggtttcagatcccggttcattcttttggctttggatcagatcatgatgcttcactgatgcattctgtttctgaaacctctggggggactttctctttcattgagagtgaatctgtgatccaagatgctcttgctcagtgcattggtggacttttaagcgttgcagtgcaggagctacggttagaaatcgagggtatgtgctcagatgttcatctcagctcaataaaagccggaagttaccagagccttgttagtggtgatggtaggtctggatgtgttgatattggtgatctttacgctgatgaagagcgggatttcttgatatctgtcaacatccctcctcaaaaagatggaaacgagacaccacttctcaaaatgagatgtgtctacaaagatcttttgacaaaagaaattgtgacgcttcaaagtcatatgctcaagattcaaagaccagaaaccgttggtcaagaagttgttgtttccatcgaagtggacaggcaaagaaacagatttctagctgcggaggcaatggtaaaggcgagagctttagcagaaagagaagatttagccgcaggtgtcactgccatccagaatttcagagtggcgttggcagagacagtctcagcgaaatcgggtgatgggttttgtgtggctttggacagagagctaaaggaaatgcaagaaagaatggcgagtaggcatgtctacgaggtatcgggaagagcttacattctttctggacttagttcacactcatggcaaagagcaacatcaagaggagaatcaggagatggttcaagctttgtccaagcttattaccaaactccatcaatggttgagatgttacacagatctcaggctacatcgcatcatcatagactcatccagcctttgtttgcatctcaaccaaagccaaggtgaaaaaataagcaagattcaatgtaaaaatgtttcagctatttttgatctctctcgaaactttctggtctctctttgggcgtgaggaggagaaatgtgaatcgaagttgggtttagagggccttactatttggtgatttacctggttttgtaagttggtcttgtttcagtatttgtgtgtaactgtgtatatatggtcgtataaaagcttattttccactcttaaatgtgtatgtctgcattttagtcgaaaccatcccatttattttgttacgttgtgagttattatatcgactcggcaattctgagatcatttagccaatattggcaaactcatattactggaaatggaaaaggaagaacaaaaatgaaattggcatttaagagagatacatttggaatgacttaacaatgtacatgacatgttgtttttatgtattggcctgtgtttactcttcctgtgtcaaactgtttaattctctttagatgctacatcggcaacaacaaagcttgaactcgagtcccttcagtagctgcattaaaccaccaatcttaagcaagatgatctgttgtttttctggtacaagtcgttgttggaacgtaaaccacattgttcagcaaacagtgagatcggccacagaagagacagatcatgcttccgataagtagcgataccaagaccctgatccatgtcccagctctgcaatttcaaattaccagcaagggtttagaaacatcccaatatactatatcatacatgggtccatcaggctaactcacccaatgttgatgatcaagtaggtgttgatcaaaatgcaaagaactggaaggtatgggacgaatgagcagagaaaccctgaaatagaatcatttatagaatgctagtacgaaactgcggctcaagtataaatccaagtttaaacgtcctaaccagatgataaccaactcagcaaatggatagaaactcttaagtaagcaacgttttagatgaaagtgaggccaaccaatgatggctcgcaaaatcttatactcagttaaatttctccaaaaaaggcttaaataagcttcaggccttacctcctttgtgtccaaattttgtgcctttcttcatcctcgtcaatgtgtagcctttaaaaagttttaagtgttcaaactcataaacaaaacaccaactcttctttctacctgaaaatccaactatcaagataagatcaatgagagcagtgaaataattttggtgtggagcttacatatgttccctaagccaaatggctgacaataacgtttcacaaacaacaactcatacgagaagctcatctgtacaagaaaacagaaacatgaatgggataatggcagtcatggtttaaatagataaaacttgcaatcatatatagtaataacctcatggatagaactggaagggtgagacatttttgacgactttgggggtctaaaatgctgaacatacttgaacctcgggacagttgtggcttactaatagcttttgaaggtaggagaagagttgaagatgacattgcagcagaagcacaatatggggttcagatgtaacatttccatgtccaagtgcgtttctgcagagagcttcaagtcatcaaaaatcaccaaccaccactaaatgtgaaatctttatagatcaaatactaaatctcaagtatctaaaattatcatcagatatcatctagaatcaatcgtatcgaaaaaaaagcaacaactttcatgagcagacgaaaaactaaataataacaaatatagagctagcaacatgtctactatttcactttttttagagtttctaagccaatcagaaggctctatttcacacccactcgcacaaagtgagcgttgagcgcgtgagagcacttctgtgggtgtacgtacccctttccaaatcatgtctttttgaatcgacgcactagtctcaaaaattgccatcgcgtggatatttgtttgttttcttcgcttaaccagtgtaaaccgaaccgtaattcaattctaatttcaataccatttaaacctaaccgaaatcaattgaaataagtaatgactaaccgcttgtcctcatcggaagattgcttcgacccctccgacgaacacaccacgtcaagaacaacaaagctgatacatataaggaggaatcagctacacatacatgcaaaaaaacacagtaacttcagatccaaagatacaaataatgattcattgaaatcgattaacctttgagatccaagtacaagtgttcagctccaccaggaaactttgcatttgttattctctttataaatccaatttctgtaaacaaaatcagaaactttcctaaaatttgggaatacaaaatcaaaccaaaacacagagcttcacagatgtacctcatcacggcgcaattccttcttcagggccatgaagctgagaataaaagagtgatctaaagctagatttttttagagagaatctaaggaaattccgacaacagattctgaagggagtataccggagagctcgcgaatcgccgccggagcgatggagtaaaattgttacgattttgaaaaggagaagcgtggtggaagaatttcgaattaggattttgatagtgtgtaaacgacggtggtcaatccatgagctccggcgacggcgaacttcactggcaacgttgagagtttgtgtgattcgaaaacgtaaggatagcatagtttaattggatatagtgcccatttaatcaggcccaataaatttttatttggcccacttctttgttcattaagcgatgttgcatgagaagaaacatgcatgcgctatatatagcacaaaaagtggtccaaaatatttgatttcagtttacaagtaatttacatctaactattatagattgatcgagtttgtacgggatatcaagacctgataaaagtaaatttgaaaaatatttatgtatatataatcgggaaaaaacccgaaaaaaccgccatctatttaatttttggccgtttaatacccgtgtttttaaatttggaataataatacctcgtttagtttccgcgccctattaaaacattcatctaatttaaagtggtgaaattgtactcccgcgttaacggtgattaactttgctaacggaggctttaactggagttaaaatataaccacacgtggttaaatgaagtaaacaaaacacagtcgtgacctttagcctttttccccaaatcgaaaaacataaaccctaatttcgattggattgaaatcgagagattctatgtgtttggacgcttgattgactgcggtttggtcggaatttgggattgaggagtccgattagtcgcgtcgcgatgaggtatgtgttgatttagggttcatttaattctgggtttcggattaggatttcgcgttcttggtttttcctctcttttaatttcttctgttcgtttgcagtggattcgactgtctgaaactgaatataaagtacggaggagaggtctcctttgtcgatgagtcgttcacttaccttggaggattcgagaagagggacatgtcgatggatcccgatctgatgacgtggtcgatctttgctgatttccctagtgagaatggagtatctgctcccgtggagaacgtgtggtacaaacttgcaaatgaagacttagcatatgtaagagctatacccgaggatagagatagtgggattaggcaatcatcagattatttcgtcattactatatttcataattattctcttaagctaattatcgtatgtcatcaaggatacactgcccggagatatttcactttgttcaagatatttgcgttatatatttaatcgtgtcagtgtttttagaaattgtcaactccctatctcttgttagtttgccatttgtttactgtatcgagaaacgatggagtatgagtgttaggaggtcttgagaaacgttttctcattcatcttaactatatcaaatgtttaagaaccaagaaaaaaaacaatctttcattatacgggatcgaccttttctttgaaatgttgaaaaaggcaaaaaaaatttggtttgaaatctctataaattaatactcgataaattaataacttttataagttataaataattcatgtcttgactcgggactagtgtaaaaattgatacaaatcgataaattaataaaactataacttttttgaaaattctatgtaaatatatattcttatcaatattataaattaataattgtataaatttatgaatatatatttatatgtatgaatatagattatgtaaaatatgactttggtattatttttatttaatttatattaattctttgtagactttaattctaatatttttattacgtagaaaatttatttatttatttttaaacctaataatggttttcgacttgtaattggttttagaaagattattgattgtatagaaaaaactatttttttgatcaaatttttgtacaaaatttataatttatcgataaatcaaaactttattaaattaataattttttccgatcccaacattattaatttataaaggttttactgtatatactaaacgttcaaatctgttaaaaccatctaaggttttttttttgtgttttgattcaggtctccggaagtcgaagggtagaaaaatgcagagaagtgaagacatcaacgcacgatgtaggagtagctttttgttgcatctcaattatttcatcatcttttgttgtagctttagcaaatttccttttcagaaccagtacgttaaattgtgcactaagacgggagtgcgtttgaagaaccacattgtattttctcctcaatcacctgactctatgaattttcccaaagccaatttatttagaagtatgatttgaaaaacatatgtttttaaacagagctcttcacttcttcttgtgactcattttcttaaaacatttattgtgaacatgttgttgataatcaacattccacataacatatgttgcaaaaacataagtgatcgtagaccacaagatacgaggctctttttatatcgttagtgttgtccatattgccggctacataacttcgcatcctttcattaatttggaacattttggtagctctagctggtcccaagaccaaaccccattacatttaatcttttaaaaaaattgttccatccctttttcaaatactgtcgtagactatatgtttttttcaaaaaagattgccatataatattaatgtaaattttgaccgtaaatttttataatttgaatatatgtttcaaatttaatataactgtaaaacagaaaattttccaaaaggcaatttatttacaaatataacaaaaaagtagctaatatacgaactactttttccgtctgataaatgcgaaattagataacatcacttaaatgccaacacatttaatcaagagcgaaagaaaaacacagtaacttagtataagaaccaagtgtggctaaaggcaaagttggagagtaatcatgtatactatgaaaaagggaaaagacatggcgaaagaggagcaagaaacagcggcaatagagccacttagcccggtttcacagttgtttgtttcgccgagtctctactgcttcattattttcactttagggttccaaactagatgcaacccatccaccattgttgaaggtgtcaagaacacatggatcaagctccctcgcttctctagcaaagtggtaaagcttatatatttccaattgctttgattgttacatgtaagaacgttaaacgtacaagagaatcttaagaatatcataactatgataaaaaaaaaatagacttgaatatacctacctaatacaatatttccttaataattctcttacttttgatggtgattgttttttttaatttttctgtcaacattatacattatataccagttttaaatttgaattttctttagctatataacaatttcttttatcacgattcataaattaatgttccaggagataaagaaaaatggaaaagcgtcttgggttcctgttagtgttcgagtagaagatcatgttgttgttccagatcttgattattccaacattgaaaatcctgatcaatttatagaagactatacttcgaaattagctaatactccgatggacatgtcccgacctttatgggaacttcatttacttaatataaagacatcaaatgcagaatctttagctataggaaaatttcatcattctcttggcgatgggatgtctcttatatctcttctattagctagttcacggaaaacatcagatcctgacgctttgcctactaccgcggctacaagaaagcatgccagttccaataaaaagagttggtggttggttggaagattttggtttatgataagaatcattttcactactgttgttgaattgtttaagtatttgcttacactatgttttatgcgggacactaaaactcccctaatgggtaaaacgggtgatgcaatacgatctagaaaggttatacatcggatagtaagctttgatgatgtcaagttggtgaagaacaacatggatatggttcgcatatttaatattcatataggcattttctttctgtaattctgttagtcattttctttgttttacttatatcaagaactttataatttgttttgtcttttgcttttgtagaaagtgaatgatgttcttcttggaatgacacaggcaggtctctcaagatatttgagcaggaaatatggtaatttcaaattctttcccgatctaattgtgtgttattgaccttgatgttgttaaatgcatcttatgttttaaatagatgaaaaaataaagtgaaaaaagaaatgagaaagcaatttccttgataaaaaaatccatatatgttatagtttctaaaaattaattattactagatagagtagatttttattttacaatctcgcgagaaacacttatgttttctacaactttttaaatttatctgaattctaaaataatttttaaatatttcaaaaactcaaatagtataaattagaagatacggttacatttgaacttaagtataatagattttgttttgtttatgttgacacaaaagagagagaaaaaaattgttttgttacatacatcattgattatatcataaacaaactgttttcagtttttaacaatttttaaagtagatgaagatatggtggtcgagaagaaaaaaaacttggagaaaatccgtcttcgtggtacagtattcgtaaatttaagagcagacacaaaactcgaggtaaatcaaagtaactgttattgtcagttttaataaatgaggatgcaagctgttcataacatatgtaaataaatttaggatttggcgaatatgatggcaaaaggttcaaagtgtagatggggaaacttcgtaggtgttattatatttcctttatgggtgagatccgaagatgatccgttggaatacgttcgacgagccaaatctactatggatatcaaaaaactgtccatagaatcacttatttgctatggactcatcaaacttaccagaaaaatactcgggggaaaggtaaattataaaatcactatcacctagttgtccaattatatacgtatgtatgtgtaaaactataaattgttaatgcaggtagtagaaactcttgttaggagactatttgatcatacgacattgacattttctaatgtgatgggtccagacgaagatataagtttttttgaccatccaatgtcttacgtagcagcaagcgcattaggtggaccacaagtaagtatagctaatcatgtcatacttgtatatcaactattttttgtagaaatcactaaaaactgtggtgaaatcaagtaacatgttgtttatgtttgttgttgaacaaggctcttattatccattacgtaacctatgtaaacaagattgtcatcaatctagcagtagacacatcagtgattcgagaccctcatctactatgtgatgatttggtagaatcgctcgatatcatcaaacttgctgccatggagaaaggagttcataaaatggaggtttgagatatgtaacaccagatataaaaatgaagttgtatgtttttttcttctaattaagtgaagttgtatatgttcggaagatatatctattttttaaaatgtagtaatgtgtaatggtatctctataattgtttacaaatttaaagttattttacagttattttaaacaccaaaaaataatttttttgctcgacacaaacataaaaaatcttgttggtctcttcaaaaagagtaaaatgttagtgatataagattttacgtcttaaaaaattctttcttttacaagtcttttctatgagaagatatgaacatattttacaagcaattccaccttttaaaaatcattttaactaaattgaataagtggtgaaccaaatatttaggtgaggaaccaaaaccagcagtgacctaatcccaattatagaccgagtaaatgaagagtcaggtatcgtggttgagcttgatttaaaaccaaaggacgagagtctgcacgtttctttactatatgcaatcaatttttgttttaaatttcacaccatataaatttttttgtaggctccatataaatgaattgttgaccgctatatatttttttcgtttttttttttttgtatacagtaaagaaacaacccaaaatccaaattaataaattacaaaataaaacaactctaaatccaaatgccaaaagcctagcatactcgttaaatctccaaactagtaatgcaatcaatgcgatattagatagtaaaatagaacaaaaaataagacataagctaagtcacaaaaataacaaagtgtactgccaaagcatttaatcaaattgatcataggaaaaaaagaaagaacagtagtataagaggaaagtgtggctaaatgcaaagttggagaataatcaggatagctatgaaaaaggaaacaagtttgatgggtccagacgaagaaacaagatttttttgttcatcaaatatcttacatagcagcaatagcaagttcattgggtggatcacaagtaagtatactaatcatgcgcctcatgccctacttgtatatcagtttaacttttttagaaatcatagaaaactttgatgaaattaactaacagtttgtttatgtttgttgttgaacaaggctcttattatctatttcgtgagctacataaacaagattatcatcaatctagcagtcgacaaaacagtgattccagaccctcatgtactatgtgatgatttggtagaatcgctcaatatcatcaaacttgctgccttgcagaaaggagttcgtaaaatacaagtttgagatatagaaaatgaagctaagtatgttcgacagataaaattacatgttagtggcgtcagaatttcttcacacaataatatgtccaatgtgtgatatctttatgacttccatgccgatttcttcttgttccagtgatattaatcttgagtttcgaatacgctatgtaggtttaaactatggatcttaattagcatagtgcgacgaatgcgattttagatgtttttttttattacattggtatataaatcaagtatggctaagacttggaatgtcttgaaacatgcttgcgggagaagcaaaaagttcacggtgctacaagaccttaaaaactgaaaaagcgtatttggtcgaaatattatagacaatagcatttacacaagactgcaaccatatttacaattacataatcagagctatatttcaacaacaaacggaattcaaatttcctttttcctcggatttaccgaaactgttcaagagcttgtgtattgttgttgttcactagcttcatcatgaaggtaaacctggtgtcaggagatgtcttcggttgaggccaagtcgctccttcagggatcttgatggatctgaaaccttgatctttgtaaagtttagttgctcctaagttgttgagatcacagtgaaggccgatagctctacatccccagttcttggctaaagcctctgctttccatatgagtctcttggctattcctttgcgccggaaattctctcgaactgccacatttgatacataagcgatcccggtcctggctttaaattaggaacacaccatcaaatcattataagacaataaacgaatccagatccgagcacaacacattcccaacaaaaaatgacaagatccttctttcaccaagattagctaaagattgcgaaactttatgttatcctagttgcacatttttgagactaggtccttagtcttaagaacagaggcacagtgcttgacgacagaaataaaagctaaggcgaaaagcgaaccttctctggcggagaggtccttttcttggaaggtaatcagccacagtatcaacagtcaagattccagcaacataacctttgtttaagctgatctttgcatcaaaagctccaattttgaaatcatcacttccaaagcagatggtttcatctactgaactacctatcacagccactaaacaagtcctctggcacccaggtggaatagaaaatcccatcaccattgccattaacctatctactcttagaacaacatcaagcgggaacgaatatcccgggaagaaagagctgcaatgagtctctgccacctcccaacagtcctctaaccgtgcttcacgaacaacgatttcaggtgaaaccgctggaaaaagatcaactatttgacttgcattgcaagctcctacatacaaagataacaaatatattcatcaaagaacaaatttatcacccattgatagaagcaacaactatgttcacacttttcttctgtaaccagaatctcaaacccggtgaaaactctaaactattcctaaaagactcagtgacaagaggtcctcaggtttaataaaacaactgatttgctgaaatcatgcaaaagcctgaaaatttaaagcttcatgaagcaaacatgcgcaatcaattgtttcgttgaaaaatgagttaaaattgaatctttcaatcaggcatggtcaattacactagagagcatctaactgaattcatctggggatggcttaagaattggaactcgatctaaatcatagctcatcatcaaacctgagttgatttgtgaaggagcttgagagatagaaaacgacgagtggcgtctccgacgatggatagagaaattagagactcctgaagaggaaacgaagcggccatacccataagagttgtgtttgattgaagctggtgaaaccgccgtcgtccccaacggtgtgctccgcatctttctccgttcgccgtgccttttctgcttctctagctatctttatttcttacccaacacaaacgattttaacaacaaaccggccggttcgaccggtcaaatcgcaccaatcacgattttaataaagaaccagcaggattatcctaagtcactattcactaatagtaatctttttatttaataattcgcgttagggaaataaactctttttttttcccaccaattcacacgttttttttaccccaccaatccacattgccaaaacgtctagaatcaaatttgctctttcttttttcaaaagtttgtagctactgttatgccaaaaaaaaaatctgtagtgaaatggtttggcaaccaaaacaagaaaagagatgaacactatccacaccgcatcatccgtcttcataaacaacatcattatcataccataaacatcatccccaatccccatcttcatacaagcatcatcatcattatcaacattatataacatcagcatatgtcaccatcatcaccatatgaccaccaccatcatcaacatcatccatcatcatcttcacccaccgcattcatcatcatcatcttcatcatattataccattaccattcatcattccacaaaaaaaaaatgcttcgtatttgaactttacgaagactactgttatcagtttattgtaagtttacttatctatgttttgtatttggattttcataaacacaccaatgtgacgtagaaatctgatttgcatgatttgtatttggatttaatccgctaatttttttagctatttaactattttcatcataaattacaatttattttcttataaatttccttaaaatcagtacttattccaccatattatgcaattttcttataaatttaaatttacatgtagaaaataaaacaaataagctaagcgcgtttatattttttttacgaattcaaaacatccaaattcaaaaacgaatataactttttccctttagtcgacactaaactcatcacaaatttgaaatagtaggagaccatccttaaatcccaaacaaaaatactttatattgatgtcgcttgaattgtcaaaacttccatctaaataatgagaaagaaacaaactacaggaaagaaatttcagtgaaaagttgacgtggacaagttagatttcgaagttctgatctaatccaatgatatttggtgagccacaaaaccattatccaaaaagacaatgtacattccgacccaaccacaagctcatcacgatccacaaatgtcgccacgtctctcgccgacatcatagaagtgtactaaccgtgtggtgtccagatgccatgtctcctgcttagaagtttccgcgacagaagattcacttcttcatctttttaaaaaaaaatgcagaatcattttcgatatcttacatgggtcactttttaatagttattgttctgttactttttttttccttacattaattaatactttatcgaatgtttgtttaagccgttttgggtaagctatttgttatgaacaataaagttgtcggaacaaagaatggagaaccttaaatgaagcctttgtatttcacgcaattgttttttacttttaagcagccctataccaattttttcacgtgttttaaacattcttgtttatagtaacaatttgagtctttttgcttcttcttttttaattacagcacgtattagcagcaaaatgatattattgacttatagtcatgtgactcatgtaaaaaataaaaattcaaaacaagaagatgttataaaaatatggatgaagatgaattgtatacatagaattaatattacaatgaatccgaatgtgtttagataagttgtaaattacaaaattgcgtagaaaaaaaaaaaatgttttgctatcagtatatccgtaatactttttatgaacggtcccatctctaggaaaaatgagtaatataattcatgaagcaattcattttcattttatttacagaaaaaaataatggtcgtcgctcgattattaagtgggacatttgtttttttttttggtattattaagtgatgcatcatctgttgtagtcttgtagaactctataatccgccaaatgcttcgcttcaaatatattcttgtatttatcttggtgtccaatcctactctgccatggacgggcctagctacgtaaattagatgggtctaccacggacaccacgtggacaagatttaatgttcatggttcatggaggtcgatcgtcttcccaaaaaaacagtcatttgatcctgtgttaataaaagtggatgatattcatgttaatatttattaaattatatggtttctcattctccattcttcatatcgtaattcttgctccacatatgaaacatttcaaatgttgggaataaaaggtttttttcagaaaatataataatcgtggtaaattcaatcccatcgcaagctctcctattggggttgggaaaatctttgaaaattttctttcaggctgtgtttagttccatggccaccttaatgaccagtatctttaaatacggcaagagttttaaatttgaaaagaaaaacaaaaacgtaaaatttcaagtattagacaacgtacattcttaaataggtgattgttgactccttgattaggagagctttcagatacattcgccccatttcactgtcatgtcatttgtatatactgttgctcgtcaaataatctgattctttgtttcaatttgtaatagcatttaaattacttttatttttctgcgttaaacttttcgactaaaggtcggtccaatttgcattttaaattactcttatattttctgcgttaaatgtatgagcgacgactctttcattttaagtagtctttttcattactttgcaacatctatcagtgtctgttattttgcattttttttggtcttttaagaactgaaatctaagaatctacgctaattacatgaatacaaccattctatcatttttctgtaattatggtgatatgaggaaaaaaataaataatggttgacagttatactaaacctaaacatattcgggtattaaagttacttggttagaaagaaaaattaaaaacccaaaatttatattttaaaatttctctttaaaggtttagctccggctatgaggatattgcgcacaacacaaagcctcgtatcaagtagtctacatgaaatgtttgcccattgtaattttgtaaactagcttgtttgttcgtgggtaaaataacttaataggaaaataccagcaaaaaaaggcgagaggaattagtgatttttccccccaacaaaattgttgcaaaataaccaaatcaaaatcaattgaaagcatattctttagacatcaatagagtcttcatagactaatcacaatcataaacacctgtagtgttcccttattttacgaactttttaataaataaaaaagaagaagataaattaattaacctcattgcaaaagaggaaaaacctaaagccacagctttccataaatagacccactcaccatctctgcacatcacccacatcttctaacagtctctcactttctctcttctctctctctctttcttttttgagtccgtgaaggctaagtctgaaagaatgacgaaggatgagttgacggaggaagagtcgctctccggcaaggactacttagacccaccgcctgtgaagacgttcgaggtgagagagctcaagaagtggtccttctacagagctgtcatcgctgagttcatagctactttgctctttctatacgtgactgttttgacagtcatcggctttaagagccagactgatatcaacgccggcggcggagcttgtgccagtgtcggcctcctaggcatctcttgggcctttggtggcatgatattcatcctcgtctactgcactgccggcatctctggtctctctctctctctctctctctctctctctctctctctctttccttaaccattttttgcattatctgatttgcatagcaaaatgcacatgcttcatcattcgaggctcctatacatgtcctcgtaacaaagaagcagaatttcaaaaataccaaatcaaccaaactatagtagttaaatgattgatgatacacaatgttggccagtatacatatgtggtaagaaaacttagctttctagaacattaaattccatccaaattaaaattccaaataatgtatgttctaagattttttttgttttcaaaccaaggttagtttttatataaaattaatgtttcatttcggatttcaataatttaactatttgaattactaaatcgaagttttgcaaaaaacaattaatcatgtgaaaacaccaaaaaaaaaaaaaaaaaattatctatctcatctggatcagctggttttatgaaattatacgtacttatcatatatatttgtataggtggacacatcaatcccgcggtgacgtttgggctattcctagctagcaaggtatcattggttagagctgtgtcgtacatggtggctcagtgtctcggagccacttgtggagttggtttggtgaaagtcttccagtcgacttattacaaccgctacggtggtggagccaacatgctctccgacggatacaatgttggcgttggggttggtgctgagattatcggcacttttgtcctcgtctacaccgtcttctccgctaccgaccctaagcgaaatgcccgtgactctcacattcctgtaagcaattttaactatcctacaagcctcaatcacatgaataacattaaaaagtatcaaaaacctagctaaagacttatagtagtacataaaattgatagttttctttcgtttcatttatttttaacaaaatgtagtactcgtggtaattacagaaataaataatggaagaaatattaggatagattttttgatttcgttgtcgacaatttttcgtacagaatcaaaatctagtgccagctatataacgcatttatttaatactgaaaacgatgtcgtctagccattttggccctaacgaaaataatacggaccaagtgtaacgtctatcttcttctatgagataaacgacgaaagggtgtccaattatttttcactcatttcttgttcgtttctttggtaccaaatgtctatttacacgttataacgacataccatatttgtgctccacgtctcttcatcacatgtctctgtatgtaaatggtccatattttgcatttccacaacgacccatgtgtatgtgtacatacattttccatgatatttgtccttgcaaatatatatgattcgttacaaaacaaatctttctgttatgcacatggtcattaattgattctttttcccattctagtaatcttggtacctatgattcattcaaatttaaatgtctatgtcattgattgttaatgacgtaagttgatttattttgtatgaaattattgaattgtaggtattagcaccattgccaattggattttccgtgttcatggttcatttagccacaattccaattactggcaccggaataaacccggctaggagttttggagctgccgtcatctacaacaatcaaaaggcttgggatgatcaggtttgtattttcaccatctgatattcgttcttgggttttaaattaacatattaatgagttttgttttaataactacagtggatcttctgggtcggtccatttgtgggtgcagccattgcagcattttaccatcagtttgtgttgagagctggtgcaatgaaggcctatgggtcagtcaggagccagcttcatgagctccatgcttaaatttgttatttcgaactagcgaagaggtgaagaattctttgggccaggaagggaggaaggaaaaaaaaaagggacccaaatcatataaaagaaaaaacgaatattatttaagatggtcggtgagtgacatttactgtgtcttatttgtggctttgtgggggaggtttgtgtgtaacaatttgtaacgtacaagcaatgtatgtgttatttgatgcatatgatatttatatatctacttattgatgattctatctttgatcaatcatcattataacttaaatttcatagaaaaaaacacaaactccaaaaccataaactactattgttcctaaattctcaggaatgtcaatgtcgatcacaatcttaaaatttcatgctaaagatcctttgggtcttttccatcaacggtgcatcctatcaatcactgaaaaataaagggcacaaacatttgtaatcgtctcaaacaaacaaataaaaaatgttgaaatgataacgccatggataaaatgttgaaataaaaataaatgattcacgacacatgtttagctatgtataggagaaaaaccaaatcctctcacttttctcttttatctggttcccctcagatttctttactatcttgttcctcttactttcctctatttctttggtattgccatctagtgagatcttaacatctcacaacttatatggcaccttcctctattttctatattttttcaaccgcataatgaacatgacaccaacaatcagaagtagaaacccaaccaatatccacaggtgtgaaacatagaattaccagatttagcatcagtctgacacatcttgtatggatactaagagagagggtagagtctagcatgattcttgagaataggtagataatcggcaataaatgcaacattgtttacactagtaaattgacatatttagcaataaaaatgtatatataaatgttaataaaaccaataaaagaaatctatttcacatttaatatcatgcgattgttgtaagatgtggtagcttagccgatcttccaaatatgcaagatctagctcatatttttgagcatgtgtagtttaggttcaaaataatatcttagagaaaataaagttggtaattagaatattattagaaatcaactcacacacatcgtgtgggtttattggtatcatatattattctacctattttattttattgaacaatgtgtctttaaaaatgaataagtacataattttttagacttatattttgaaattttgtctatattaatacttactatatatgaattgaacttgttaaatattgtattgacttttgtagtggtaagaagaaacaataaaaatccataaaaacaataacttggtttagcttttggttacgtatgtaagggggttactaaaagtaaaaacactgggtttgggctgggttcagtaactctcatacaaaatccataaaaactttgggctgggctcattcaaaatccatacttattttattactttcctaattaaaaaaaatacacatagcacaagaaaaaccaccgcccaagcttctctagaacctctccatcgttctcactatcactccccccccccccaaatataaaccctaattttcacaatcacagtaccaaaaaaaaatggcagccgccgcaccgccaccgccaccaacagcagcaccggaaccaaacatggtagcaccactaatttcaccaatcggccacccaatgttctcccggatccgtctggcaacaccgtccgatgtcccattcatccacaaactaattcaccaaatggcagtcttcgaacgtctcacgcatctcttctccgccaccgaatcaggtctcgcttcaacactcttcacctctcgtcctttccaatcattcacagtcttcctcttagaagtctctcgttctccatttccagcaaccatcacttcatcaccatctcccgatttcacaccgtttttcaaaacacataaccttgatctcccgattgatgatccggagagttacaatttctcgccggatatgttgaacgacgtcgttgtagctgggtttgttctgtttttcccgaattactctagctttttgtccaagcctggtttttacattgaggatatatttgtgagagagccttataggaggaaagggtttggtagcatgttgttgactgctgtggccaaacaagcggtgaagatgggttatggaagagtggaatgggttgttcttgattggaatgttaatgctatcaagttttatgagcagatgggtgctcagattctgcaggagtggagagtttgtagacttactggtgatgctcttgaagcttttgatcaggtcaacatctagagattgatgctgtgttgctgagagttatcgaatcagatcacttcctcttgcttttaaagtttgtgttttttttccttcttcttgttgttactttatgcaagtgttggcattgatgatgatgatgatgatgaattctctatgcttacttgttggatactgaatgagaaaaaagaacccttttgttgaatgtatgaaatgtttcgagtttttaaagtaagagttatgtatttgtgtgattcctcgtcatatttgcttgaccaaagtatttgttctgtgttatggatttgaagaattggttttgtgatcctagaggacagtgaattggagagtacagataaattggtcaaatgaagaaattgtgatcaaatgtagaatggttaagttgcttgcgaggcacacacaagtctaattgcaaactatataggttaagccttcttgcttcagttactatagaagacaataaaaactaagttttagtagtctctgactctctgtcttgttgtatagagaattaagaaaccgtgagcatgaaacaaaaattcatctatttttattactacaacaaaacattccgcttttgtgttaacatagagaacaaaagaccccattttacgaaaatgattctactcttataaatgggcttaagtgggttgtaaaatttgtagaagaatgcacaaacacttcaacatctctagttgtcctactggctttaaagaacatctctttgattgagattaattcacttgcaatttatcggtaaaactttaaaactgaaccaaaagtaaaaaagagtgagactagttttttgtttgttaaacatgaaactggacataaaactggacagatacattctactaatatcatgcattccgttaagtattttgaacaaaaaatctcatctttggaagagtatattatgaaaaatatttggatttacactcaaaatcatattcatttattaacaattaaaactataaaaagacataagctaaagaattaaagtagtaaaaaattgatagttttatttcctttcctttattatcaacaacattgaagttatcgtcgtgattacagaatccaaaattggaaagaaatggcaggatacatatttgatttttgttgtcgacaaatttggactaagagacgtaacaaatcttgccagctacatgtagaacgcacctgttaatactgtaaacaatgtcggctaactattttgtgctaacgacaataaatatcaaagtagtacgtgtagcgtctagcttcttctatgagataaaacgacgatgggagtgtcattatttttcactcatttcttgtatttttctttggaaccaaaatgtctttttccatgatttaacgacatgtgcttcacgtttcttcatatgtctttttaccgacttcaacaaatggtgatggtatttatcgaaattcatcaatttcttcctaaattaaattggtaaaaataccaattgtcgaactcactcacgaagattggactgtaaacggtatagatgaccgtatttgcttcgtggtatggtcgtgcgttgtctcaaatcgcaaaagagccaaattatgtttaaaaaattcaatgccatattagaaaccttaatcttctctaatgaatttgtacgacgtaatatagaatgagaggttcaaattattaagaaggaagtttaaaagacttagaaccgtttgcaaagttttgggagagatgatcggtgacctatacaatgagataatagagattgagggattgaaaattgagggacgcaaccattacactgatacgttgagttgatatggtgataattgtttttatgttcaaaaacttacataagtagataatgtggagtctctttgatttcttaacctgaacgaaaaaccaaaaaggagaagagagtgatcacctaatttaacgtgtaaaacatgacattttccaagaagagggatcgatctaaaagtcaaaaaaaggatgagatagcgttttagtttatcatatgtggcatagttagattggcttgtaaaataatttctaatcctaaacatgatagatagcagccttagaagcaagtaacatcaaatttttatagtatatatatatggattctcgaaaccctaatcttcacatcactatcttcaaaaacaagtaacagaaaaatggcgcctccaaccgcagcaccagagccaaacactgtgccagagacttcaccgaccggccaccgtatgttttcccggatccgcctcgctacgccgaccgatgtccctttcattcacaagctaatccaccagatggcggtttttgagcgcctcacgcatctctttgtcgccaccgagtctggtcttgcctccacgctcttcaactcccgtccgttccaagccgtcaccgtcttcctcttggaaatctccccttccccatttcccaccactcatgacgcttcgtcccctgatttcaccccctttcttgagacgcataaggttgatctccctatcgaggatccggacagagaaaagttcttgccggataagctcaacgacgtggtggtggctggattcgttctgttcttcccgaactacccaagttttctagcgaaacagggtttctacatcgaggatatcttcatgagagaaccttacagacgaaaaggcttcggaaaactgctactgaccgctgtggcaaagcaagcagtgaagttgggtgtcggaagagtggagtggattgtgatcgattggaatgtgaatgctatcaacttctatgagcagatgggtgcgcaggtttttaaggaatggagactttgtaggctcactggcgatgcacttcaagctattgacaagctaaacatctagcagcatgatgatttgcatgagacccatcgagcgatcggtcctttaaagtttgtttctcacttgtttttaatttgttgaataaaacatctcaagtttaagataaagatgtatttgtgattatggttacaaaagtatcttctgtgttttcggatttgaataaaatggagatttcttcaaactatttataagccatgtttaaaagaagttttcaaggtgtatttaatgtgaataaataaaatttttaaattattgacctcaatttatatagagactgcactgttttttttttaaccggacagcgttctacttacacatgctaaagtacgggccttgtcaaaaagacatagaagtggtaattaaacagataaattggaaacatacaattccacttaaatatatatatggatcattaaaatcttagtattgtaataaaattaagaaaaacatatctcaaatgatgattacatgataatcaaatttatacggtattaagataaaaaaaaaagtgaaaatttatcagttgacgaggcgacaatttttacgaatctcaccaccttgatctccaagagtaaggactttgatggaactcatctttatcatggaccgaccaaactgagcaagaaaagcgccggagttttggaaaacactagcaatgtgagcggcggagggatcagtcaacaaggcggcgtcggaggtgaagagtcctttgttcttgagtagagagacgaagtagccactgtcaaaggcgagaggaccagtagggtccattccgaccactgcggaagggttgagtcttaaagatttgtcggagcattcggatttgaggaaggaggcgtaactagggtttagggaaggatctgtgtccccttttccggtgaagttcaagagccttctgccaaacacaccgcaatgtgctattcctatcgtgtgtgctcctatttttcatacaatttcgtttctttttaatatataatcgaaaaattaggtgattaaatgaatgatttatatgaaaatattagtgtatcattcctaagaagattaattgacttttgaataattatcacgtgcaacgccttttccaagattatcctcaaatatttgatggtatatatacgatcggatattatactttttcttgaagattggaggaaattaatttgtagcatcccatacacttcctaacatggacatgcacgtggtctgatattcccgcgattttcttatagttttatgcgttctttagttttattatttgttcccaattttcattggttagcttttaattcacttggtttcttatcagtaacgtatatgcaaatgtgattaccaaaaaatgatatatcaaatatggtaaacctgataaagcgacgaggtcaacgacgtccaaatcgctctcggcaaagagtttctgtagagtggtgaagtttgccccagcggatggtaagtctctggccgcctccgttgccaatgaaactcttccatcaacacgtccggtaaacacattccatagcggccgttcaaactataacacatcaaacatagaaactcagggagttagaattgattattggtttcatttgataagaaagacatctaaaactaacatatgcgactagtaaaatactaaatttttgatttctaatcatgaaattttttagacgagtttgttcatatgtattacttcataagagacggcatctcgggcggctaaagtgagaatgtcagcgcaagagacggtgttagggcatcgtttttcgagaatatacttgatctcatcgatgatttcaaacccggaaagcgagagattaggtctcgcttccttctcggacactgcttttccagcaaccgaatctaaaagcagcgatgcgtcgcacccctaaaaatcatccacatcagacttatctttataagaaagatgttcacataaagaaaaaaccctacatgcacatcataccctaacaaagcagtcatggtaatgaaccctcagtaacttgggagccaggctacggtttgcttcgactttcttccacactatctgcctcacgatatcctcggctccagggcagctattgtgatagaagttcatcttcagcttaccttcccatcttccttttcttatcttatggccattattattgaatcctttaccatcaacacaaagtaatttcacaaccaaaaacaaaacaagtggaaataaaaaccgaatctctaaactcttattagccatgtgatcgactttagatttgatattttcttttaagtgtttcttccttttgtatatgaggaatgcacttggcagagttgctttatatagaaactgaggctccatacttcatatatgcccgttgagtttctaatattttttagcaattgaataattattgaaataataatatgtctgggtggccaagcaaagttccctgtatgtgttgtgaaaatgaaggattaattattaagttgcaagtcaacataattatttagaagtatttataattcccgcaaataataatttagcttcattagttgaactataacgtgaacatccattatgcagatatttatagatttcactgctatctccatttattcacgcatttctttttttgttattcttttaaactttcattgtcctaatgaaagtttaaccttctttgtcagtggccggccattatcttaaattcttaatccttccatcttgcaataacttggtgtttttatatatagtatcaaaggagtaaacggattgtaaatttcacaatttgaagcttttacatatcatacatacactcacaaaagaaattcaatatccatggtctatttaacattaattcaacaaaaaaaaaatcatggtccaaatcaaaatctttttccatatgcaatgggaattttgggaaaaaaatcaaaattttgttcacatatagttgaaacgtttgttcaaaattttctgtctcttttaaccttttagttgacgcaatcgtcttttgtctacggctatatttgagacgaaaacgttaagttgaaaagtcaaacgaagtcgtcgcttccaaaggcaccaatcgttttaatctattttctcgggctcatatggcctaagtccacaaggtaaaggcccacttattattttaaaggcccaactcccaactctagtatgcgttgatttagcatataatttttttttctccaaagaagcaaagacacagaaattcacaagttattaatgaatttatactatttacattataacctctataaattaatactcgataaattaataacttttataaattaataaaaatttttggtcatgagttgggaccagtgtaaaaaattacacaaatcgataaattaataagataaataattattttaaaatccctatgtaaatatatggtcttattaataacataaattaatagttgtaaaaaattcttaaaatatatatatatatatatatatatatataagttatactcactctattcctttttgttgtatatatatatatatatatatatatatatatatatataagttatactcactctattcctttttgttgtatatatatatatatatatatatataagttatattcactctattcctttttgtttgattgtttagaaaaaaaaattgtttctaaaagattgattttttaagttttccatgtaatatttattggttagtattgacgaattgtaattttcaagaaaaatagttaattattattggtttaaagttataaaaaactgtaaaaaactaaaaataatacatttataatcaacatttaatatgttttcttaatatgtgtgttttttctaaacaatcaaacaaaaaagaacagagggagtatgttagaaatattagtaaaatatgaatctgctattatttttatttttattatactaattcttagtaatgttcaattttaataattttactacatcgaaaacacttttttgttattttatagacacaataatttagtcttatttgcaattatttctagaaaaataatgattataaataaaacaaaattaatttaaacataatatttttttaaaattacaaaattagtctaaactctctataaattaataattattaatttattgataaattaatacctctataaattaatagaaatttatggtcccaacatcattaatttatagagattttactatggaataagaagcaaatctaaaaaatttataaattaatatcaatatttatgctattacttcttcattttttaaagtcttgktatttacttaagtaagcctaaatttttaataatgatcttatcttatgtaattgattaaaaaatcgtatagtagactattcaacaaaacgtgaatcatagtgttgttaccaaaacccattagtgtagcgacaactgtcctttcacatccttatacaaattctcttccctccggtcatctcggaaacttgtatcatcgacaaaacataaatactaatggagcaccaccaccagcatcaccgtcaccaccaacgcgacgacggagaagacgatcgtcaatcctttggagtaccaccgccacacgtcgatgctccgccacaacctcatggtctttaccagtcacagcctcattttgatccttacgcgcctactcctcaagctccggcgccttaccgatcagaaactcaattcgaaccccacgcgcctccgccttaccgatcagagccttactttgaaactccggcaccaccgccttcatttggtcatgtgagtcatgttggtcaccaatcacccaacgaatcttacccaccggaacaccaccgttacggaggttatcaacagccgtctaattccttactggaaagtcatggagatcacagtggagtcacgcacgtggctcaccatagctcaaatcagccccaatcgtcttctggtgtctaccacaagcctgatgagaatcgtctacctgataatcttgctggactcgccggaagagcaacggtgaaggtgtattccaaggcggagcctaactataatttgacgatcagagatggtaaggttattctcgccccagcggatccatctgatgaagcacaggtattgatcatctcttaccaagatccaaacttttgatggattgatccaatgaaccattggcttgttgatgtgtttgattcatatgcatctcaattttttcactcatttgatagataatctgagtagctttcgaaattgtctttagttggaagattgaatcttgttgatcatgatttagaatgaagaaacaagtttcagtttttatttactctgttcttctagaatttagtttgtggttcaatttcctgatcctcttgttatgtccatgtctttggtttgttgatcctggcatttctaattttgatgtatgtgttatatcatactcatgaaatggtttcggatgcgcagcattggtacaaagacgagaagtatagtactaaagtgaaggacgcagacggtcatccttgttttgctcttgtaaacaaagctactggtgaagcaatgaagcattctgtgggagctactcatcccgtaagcgtttctttcttagacgatgtcatttttgtcctgtgactttcattatttccagtgtgacatcttctcaaccttagctaaatgttagttttcataaccttgaatgggacctgaaaaaaatattggtcgtgcattttattcacttcttatgaaaattccacatcaaaacattagtagggactttaagtaggaagaaaagaaacagagaggagcatcaagaatttatgagaatggttttgtaggcttggaaagtttagggtctctagaagaaactctaactaaagtctgctaatttacttctgtgattctgcattgtgttttttcgataggctcgatgtgtttaagcaatattttattgggtattgcaggtgcatctgattcgatatgtgcctgataagcttgacgagtcagtactatggacagagagcaaggattttggcgatggatatcgcacaataagaatggtaaacaatacgaggctaaacgtggatgcatatcatggtgacagcaaatctggtggtgtacgtgatggcacgactatcgtcctctgggactggaacaaaggcgacaaccagctctggaagatctttcctttctgtaagcttttctttaccgtttctgcttagtttttaaattgttaatcttgcatcaaactagagaccatgagataaactttgaaatggcaatggtcaaaaccagagctagaactctaatgggctaatgtatcgacgactttgacgtcgtggttcgattcgatttaatttcaagagtcttaagttaactatatgttgaaccaaattattaaccttttttaactgaattttgtcaatgcaggaaaattggcgtctggagtggtaaaaagttcctttgtgtgtgctgtatgaataagaaagaaacaaaactcagatttattcattgtttgtgtcttgtaaagacttgagtttgtgctgttggcatctgtaatctatcttacttgtattccaagtatgtttttacagatacattacatacactgtctatatgtgtatacttttttcctaatctattttgagatctttctttttccttttgggagatataaacgacagattgttatcgaattatgttgattagtttattttagcagactttcgcgcacgtttatttgcatttctgtgatagctgtctctgttttaaattgtgaaggagtacagtttttgcttggactaaaagtttatttaggatttttacaatatatcttgagatttgattcttataaaatactacgaattatcggaaatcttcgacgacgtgattgaattatgcagattataaataaatttagcgaagatcattataaaagataactatattatctgtaaatctgtcatcatcagataacaaaatttaacgataaaatagacaaaaacttgttcttggctggactgtagattactaaaatttacgtcagtttcttgggaaatggtaaatgaaaaatctggccctatcactaccaagtctactcccataaaaaaaaacgacacaaccattagctaacgtagaaatgacattcaatttcttgggagctcaataatggaatcataaagcagaaccaatcagcttgtttttctgtggctgcggaaaagcgaggtccttgctgcatgagtcagactctcacggcacaatcatgcaggataccaacacgtctcaactctcaacgcaaccatttatgacacattcagtcttttttttgtgccgacatcaaaacttggttatggtaaagatttgttgttgttagagccttagagcaaattagtgccgaccaaaataaaaagtgggagaaattagtaaaaagatgaataaaatagatcacataaatgggataggattatagaagaataatgtgattatatccaacaatgtattaaagaaaacttataattcaactttttcaagcaaaattagttataatatttttttcctgtggttccactataaataaataaataaataatgaaaattcatctaaatattttattccatctgttgattgtacaaccatttggattagattgattatttttttcagttccaactgttaaagcattttaactgatagttccatggagcttagcttaggtacgcatcgacatagacttaaataccgtagactagattatcttttatcaagggttggtgatgatcaaaagtcaaaacaatataacattggttttggttagaccgactcaaaccgacaaaacatagaaattaaagtttattattccaacatacgataacatgtcgtctcccatacatcttccccatgcatgtttgcccttcacttcattggcctcaccgatccttcaacattgtctgatcccacatcaggcaattcaacggccacgatcgggacttcgttaacatcggttttatttgctagttggttctctgttggcaaatccgttttcgtggaaccttgatacatcatgtatagtatcatctgagctacaccgaatagaaaaccgagaatgtttggcatctgaatacaaagcgacatagagagacttattagtaaccaaaaactagttagaatattgaaagatgaatgtgaaaatgtcaattaatattacagcaatgaacttgtctttgataagaagtccataaaagaaccacatgacggcgttaagagtgagagacaaggagagaagaaacggcatgtattccacactctttgtctttataaccttcctctgcaacattacacattgtatattaatttccaattcactacaaaaaacggcagatgtttgaagaaaagctgatagatggatcatcaccatgacgcttaagggagaagcaaagactgcgagactgtaggcagcacaaacccatccaacggtcgagacgcggtgttgttttggaaccaaaagattaactagaagaattaagagaccaagtccaccgatgttgcatatcactatcaacttcaacgtggatatctgccaagtgtaccaccagattaattagttgtagatatagagtttcatcacaatcaagatttttgaaactagaggtgtacatactaaaaatatcaaccatactataaatagaaatatataattataggaaccttggcctctcttggtgcataaaggatatagagaaacaagtaggagatttcaatgaaacatccaaaggtgttaatactaatgatcagataagcatgtgtcttcatgattccgtagtagagaagaagagttgcacttgctagtgcacatatgtacggtatcgactgaaacccttttgatgatttcttcttgtatatcccataaaacgttggcctaaaatatgtataattaatcaaatactttatataaactattttaatatatagcatttcgagttagaaacttacactggtgacaagaacaccccaaaagacacaatgttgcctgaaaacaaaagccagaatcaatattagtgttatgaacttctttattttgggtataaatgttaagtaatataaagaacatgtattctgttgttcaaaaaataaaaaataaaaaataaagaacatgtatactctgttggaaatatatgatacgtcacttttattgttgattttatttacatattctgaccataactcaaaagcataaaagaataagggaaataaattacctaagagaccaaagagaaaagcaatttcatgaaccttgaggaacatcttcacttttctctctttctcttgctagttgactgctttgaattatagtttcttcatgcaaacctccattttatattggtcttggagaaaaagtgagtcattcttataaacccttaaaccaaaaaaaaagtgagtcattcttgcattttcatttttgtcccctatttaattttctttctttctctttttaaacaaaaaaacaaaagtttggttcaagttttcctggattttatttttttctgcacaatataatgtgatcactcagtagcaaatagtataacttttgcatagctgattggctgtaaattgctggtgacttctgacttcttagtttgccaaccagcaaattctttagtttctcgttttattaaaccaattttaatgcaaatttaatacttgttctgatcgaggaaaccataacttcgaatttctttcttgtttttttttttgtttttttttttgtcttaagcgatgagttcctttcatttaaaatcaatatcgatattaagaatacgggatgtatggtcggtggttaattttaggcctgaaaatatggagctgtgatttttgacaatttgcgatggagtatctactgatgtcaatgatgttaatttgcaatgtcgtctccaagttactcatgattttgtaaatataacatgtggagacattttgttgcataatgtgagatatttttaggatgagatcaattgtctcaagctttggtgattttcttagacatatacatatcattttcatttcttcacaagttttatcggaaaacaaagctaattagtaattactcctcatctctctatgaaggcccaaaatgcaatgcaaaaagtgtcaactctgtgtgaaccctaaaacttgcggagcagtttagaaatttagtgacatttaacttaaataaataatcaggtggttggaacgtcttgcattaggtgttgttcctaattgttaggccttctaaatccgacaaagtatttttgcattaggctacaaatttcttaaagtcgaattaatcacttcagacatatcatacgcctagcaaccctctgaatctggttcaatgtttgtatatagccaaattaatataagatttttttatatatagataaaacatcacccatcagtgatgggccatcaccctaattataagacattgtgtaacttataacaaccttccataactggtgttaagaaaccaaatgtgataactgataagattatttgcttgcacatatcaccaatgagatgatttgtgaacatgttaatgaattaagtatttttattaataaaggtataatgaaaccttcatatcaaattatgtgggtgagatggaggcatggatgtgtttgttaggctcatacctgaggcctcgtatgtttggcctatttctttgttagaatcttaatttggtaatgaacaagacacaagcttttacatcttgacagaaacctttaaaatccatctaattagatgatttataagatgctttattattatgatctaaccacgtttatatattttattcaaactgattaagtttgcgttgattatttacttctcaacccatttgctaactgtattaagtaaattaacaaaatatgatttatatatatgaaccatggagctttatgaagaattctgaaaatttcagctgtttgatcactcaagaggatacatgagtttgtttgtaccaaacataaataatgcttcacattattggattcttcagcgctagagacattcttaatcaatccaagtaaaaatattatgtcgatactccaaaaaattgggcaaagcttggatacttcggctcccatcctatctccgctcgtgtcttagagttgttcagcttcttccctaaaggaccactggtgcctacaaaagccaaagttgtcagactccatgaagcttaaggtttttcaagacaactacatgtcaatgtctgaagaaactcacttgtaaaacctttgaacttcttatcaaattttccgctttgagccatcaggtccatcacctcttgcctgagaagagtgaggggtcaaacatttgatgtctcatcaaaagttagaaagtaatctcaaagttagaacgaaagcagcattaccttgacaaaggatggttgtcacaacccaagaaaatccgagcaccggctttcttcttcatgattgcaactgccagcgatgctgcatcctgttcaaaaacacattagagaacctgataagagactaatgtatagtacactgccattctagaaaatgagttcaatctgcagatcaactaattagttatgagagtgaacaaaatcacaaatatacctcatagtgtatgagatttagaatatgatcaggacgagcatcaattgtctccttactcaaccagtaagtatgtgcacctctagtttctgtgtataaaaagttcaggagaaacataatgctcaaatcttctacagaccaagaaaaaagtctttcaatacttgctcattcagtttcagtatcgaaatccaaaaggatatgtaaagccctgctagtctaaggacagtccctccacattccaacactactttttcagctttcaaaagcacatcagttcttggactctttcccagtggcactactggagaatcctgcagtgaagggtaacgaacttagaaattcttattgaatagcacatatatatattcacaatgaacaagaatttgcattgtggtctcaaatatcaaatttttttattgattgtatacttgattttcatagattttaaatgtgagagactcttttccccaaattacctcaacaagtaattgtgttaaacaactttgatatagaataatactaaatgtggtgttaaagtctaaaactaggaattttaggatggagaaaactgaaagaaaataggtattcaggtgctgagacaaacctcgttgcattctccgttatcaaagcaatcataaggtgcagaactagatgtgaataagaatgatccttcgccattccagtttgatgctgcattcctgatccgattgtaaacacaagcatacacacatattagacagttgaatgaaggcaaatgtttttactgttgtcacataggatgaactaaaaagcacaaattgacgtttagcttcatttttcttctccagctaataaagtcaagcgcacaatagtcgacatttctggcattcactaacagatcataatgcataaattgactttctagttattaaaacataagattttttgtaattaatcacctgacttcaccagcataatcagcgctttgtgatggtggagcacaaaagatcacataggagaactttcccccatattcggttcctttaagagatggtttgatacccaaattctccaactcaccatgatgatttgttgttactgtctgcccaaagatttgagactctggatgttcctgctccacatataaagctctaactctaacttccatattgtgaaaaacatgactcttactatatatacgttgtgaagaaaaagtactagtcactatccacacacacaccatattgataaacactcaagacacattaaaacagggatttgcaggacatcataaacgtttttgttttcgtagtacagaaacaccatatctatcggatgttctataagaagaatatgagtaagtatcaaattgagctaagtcccctgtaggggatatacaacacagaaattatacctgtctccactgttctgcaactaagcgtccaagaacacccggtccaacaatcagcagatcgtttgctccaattgaaacatgagactggaccttcaagccatcactggtctcaccttcatacaaaacaacatattaaaaaggtcactactttggagaggcagatcactaaaccttcatttaccatattcttagcttcctcatcaatgtaatcagaaattgtaaatcattcgaaagctctaattacctcactaagcataaaagattaacataggattatcttaaaagtcaaagttcactaatccttaaagcagtcgaattgaagaagtagagagtgaagataccaatggtggaggaagaagaggcttgaataggggtcgccattaacgaagacgttaatggaagaaaaaacgagactttgggtttatcctcctgacgtctcaaagcaaacttaagtgaatatgaagaagacgctgaagtcgagtgcttggaaaagtggtgagtcgatagaattcttgaattgatcgtcggaaatgagatgcaagagatgaaacccattaagacaaaaaagcaaaaagctttggcttttgacgacgaaaaagattgagttggcgtggggaaagagatgggattctccgtgagactttggtaatgggttctcttggtgtgttttaaccaatggcgtatttacacgtcacgacgtccaatgttgtagaatattggtcttttttttcgtttcttttcatattctaagtttgtttataggaaacaaaaggaatgacatttgctattaatattaatgttaaggattcgatagttttacagtttacacactcttctgtctctctactcttcacatgagctcagcttcttcggtgtctccatcaacatcttcaacatcgttctcgtcattctcatctgttgcatctgggtctattccctgcaacaaacaccccaattttgtgaatacactaaacatcatccttgttcgagcttcataataaaatggttcgatttgattcttcccaaccttcatttgtttctccaagcgatctagtccctttttggctgcctcattctgtggatttattctgcgtttacattatttacactctgttatatcgttattgtttcgcataggagcaacaagaactataagcactactggcttagaatttcataaaccttaatgcagcttgaaagtgtgataaagaatcttgtagcatattcgttgcagcaaacacttgagctagcttgacgtggagagaatcatctgcataatctttgagatatcgttcaagtagtgatacagcatctccattcctcccttccattagatgaagctcagctagggctaacacagctccaaggtacccaggttccagcctcagacctgactcgtaaaacttttttgcctgttataaaaccatatcattctactgttacaccataaatttttatacataatgtaaagatcacaagaagatactcacaagctctgaatagtttctcagatttggtatacactatgcttatcaaaattgagatttgaacagttaagtttaaggaactttcccagtttcaatatttagtattatatgcaactaactccctaaagctttcaccgcttctgattaagatgtaaaaaatctggatagaatattgatatgatgaaaattgacaccatagaagcataacaaagctgaatgtttgtaccttttccctgccacttgatgtaaacgcatgaacatcaccaactaatttcagagccttcgcggattgaggcattgcattcattgcttccctggcggtatacaatgcttctttggttttaccaaatgcaagataagaatggactaagcctgaaatgacctcaatagcgcaagttaattacacactccaaccttttcatgattgttaaaggtttataccaccaaaacagtacaacagtggaagtgtatatcagatctttttccctcgtgaaccagaccttgatatgaacgaagatcggacctcaaattctgggcagccctgaaggcgatcgctgcagcttctggtcgttttgcttgtaaaagtagatttccctgacgtcttaacaaattagtggatatatatatatatgcaaacttactaaaaataaataaactcctcgttgaactagcttaccttcattatgtagccgggtatgtgcctctcgtctaccctgatactctgattgcatagtgtatgtcatgagctatcacacaaagattttggcacaaaaattcagtgtcagaaaaaagctaaccttctcagcataagataatgccgtccttgcatctttcctttcccatagtacagacaaagcaacaaatacttctgctctggtatgatcaacgcttaataaatcgtggacgagcttgtttagcctggaataatcacacttaatctgaagcagcatcgcatactcatccatactggttagtgtgtaaggatcaattgaccgaacctataaaagcttttagatgattatgcatgaattaaagaagttgagaattgagaaaaaaatatccatgtggtgactaccttctcaaatctcattatggcctcatcatttttcccaataatggcttcaacctatacaaatgaaataaatgtcaatcagcgtcagtcatgataaaatgaaaaattcaggtgaaattctgtttgcatcgtagtcgatgtcatccctaacctttgctgtctcagtcaacaagtgtacattatttggaaatcgttgtaagagttcagcaaagagttccagcgcccctgagtaacaaaaaaatattacaccatatccagtaaagcaagcatcagattgcagaatttcccacaaataaaatgcaagaaatgaaatctacaaggttaaaaaaaaagaactaaatgccttatttcatccattgtaggcataggcatcccaaaaagaaaagagagctacctttgtaagcatgcgaagcaacacaacactgggcctctacataacgctgtgaaaacaaagaaaaattaccgaaaaagacaaagaagaaaatagattttattgccaggtatgctacaacatgaaaccaatgaaacatccatccaagaaaagttatgtggagtattagtttcctggttaaatagtcgagcttctactaacacaagaacatcaaagcactactttgttaaagggaataatactattaagacgatttattcactttccacacatgaacagcttgaagacagaattcttagaatcattatatatgaagtcgtattcgggggaaaatagttgataaaataagattctaactcacgtacaataatcagcttggcggcatgattaatgagtgtactttcaaacaattttcaacgttgtaaatcctgttaaagagtaagcttacttgcaaccagcgggtaggatctatctgatcgagtgaaacctttgcacttctatttgaagtctgaaatgaacaaatgacacaacaaattacaaagttgtatggatttcacacagaaaaggtaattgcaaaatagagagaaagaggtgcaaaacacatttgaagaagtggtgaaagaaatctcgtagaaagggacacctgagtaaacgatgatatgatatcctttgcactaactcccagttcagctaaacctatgacggcttcaagtacataaggacactgcctgcagagattaaagattatatatatgtttactatgtgttgaattggtatttaacgtaaaaagtgagatattataacagtgtttctatgctaggaaatgttgggaaagaaaacgaaaaacagaccttaaacactctttataaaaagcaatagcaccacggttgtatccagaatttcgatgaagctttgccatcagtatattcatctctaagctcctggtcttgacagattccatctggcaaagaaataacaagtgcaaaaatagattatagctaagcagaccatggctttatcatccctaatacctacatgcagtgttggaaggaatccaattagtttacttgttttgtaatatggatttgcattgatgggagcaggtcaacgcaacaaaattcaactcacattcaggaatactataacaatgcattagttacggcccaagaatgtttcactgaaattacagttacttaactctggttataaaatacaatagcaagacataaaagtcatcctatacaaaaccaatctataatcttagaaatagagaaatccctagacagctcttttaccgtctcatacacacatattttattttctatataccaaagtttctagaccaacaaatccagaagactaaataaatcttgaaaaccagacaaacagatgacactcatacctcagcaatcgcagcttttgtttcattaagagcaaagtgagatgaagcaatcttgaatctcacctaaaaggaaagttagaaaaagaagatgcacatgaactccaatgaaattaaaccaaaccacatcactttctggaaactgcaacacagttatttacctcgttctcattaatagcagaaatgctggaggcattcacagatgatctggtagataaagataatgaactcctcgaaataccggagctttgcttcggaatccttgtgtaatgatgcaacgcttgcttgtacgtatgctgacaaaaagaaggaatacatattcagaatttcgagatgacttcaaagtaatccacaggaaaagaataagcaatacaaatataaaacttatctctgctcactccataaattcatataatcagaatctttacaattttatcataatccagtcaaattcaagttccgagaatgatttatagagttcaaatttgaggcagaactaaactatcgagaactgagtaacatttccttcacagcaaaagagaaacataaagaatgaaacttttgagaacttacaatagctctccggtgttctctctgatgaaataaagcatcacccagtagaatctgattaaaaaacacagaaagaatctaacttcaatctaacggactcagcagctactaaaatagaaaatatcgacggagaaagaagcttaaccaaattctccgccttgagctgaggactagtttcggcactaacagtaggagaagaaacgagaaagcagccctggatttagttgcatatatagagagaatttcattagctcttgatgaaaactagggatttagaaaaaaagagatagacaatcaaaatgagctaaaagctagagaagttacgagcatttcagcagaatcgtaaagcccatgctctattaaagtcgcgatctgctcctttggaacctccatttcagagacaagagagttcgtcgttagtggcaatggtgaagttttttcttcggagcagcgatgaagtaaaagatccttcacgctcgctcttcattttgaaacaagaaatctcgaaccgagtcaacccaaaccgacattaaccggttatctatctgaaatccatctcggttcattaaaacccgacttttccaagagcccgacttcaccgaacaatctctatctccggtcatgcctccattaccgtcctccacggcgccttcgtcttcgagacatcttcgatcgccggaaagtatcgcgaaatttgcagggagagcaatatttcctgctttacaggggaaatcgtgtccgatatgcctcgaaaatctaaccgagcgaagatccgccgccgtgatcacggtgtgcaagcacggatactgccttgcttgtattcggaagtggagcagcttcaagaggaattgtcctctttgtaacactcgttttgattcctggtttatcgttagtgattttgcttctagaaaataccataaggagcaattaccaattcttcgtgatcgtgagactttaacttatcatcggaataatccttccgatcgccggaggttatctctctctctaagatcctctctatgaagttaaaaatcacttctttattatattcacttggttattatttcattaggataattcaaaggtcgagggatgttttggaaaactctagctcaagatcaaggccattgccatggcggagatcatttggacgaccaggttcagttcctgattctgttatcttccagcgaaagcttcagtggcgagctaggttggtttactattgattctaactctatagcttcatttgcaatctcctttttcgaagtgttagattagttcgccgttgtttctaactagtgttggctctaaatacagcatatacactaagcaattacgagctgttcgattacattcaaggcgcttggaactagtaagtttcattatacaatgtgttcttctctgtttgatgtttgtagtattggggtttacactcttacattattggatatatgttcacattggaagccttatatatacctgcttcgttgtgtcatcttggattattgtagagtttggcggtgaatgattacaccaaagcaaagataactgaaagaattgagccatggattagaagagagcttcaggcagtccttggagatcctgatccctcagttattgttcattttgcgtcagctcttttcatcaaaaggcttgagagagagaataatcgacaaaccgggcagaccgggatgttggtggaagatgaagtctcctctcttcgaaaattcttgtctgataaggtggatatattttggcatgaactaaggtaagatttttatacgctagggttttttcagagtttcaagtagttacaggtttagtatagtagtacagaaaacacataggcaacctaaacctagtgacttgtaagtctgaacagatgatagagctgatatctgtttggtttaggttttttggtcatatactatttctgatgagaaagaaaacatttttcagatgttttgcggagagtatactcacgatggagacttatgatgcagtggttgaatacaatgaggtggagtaatagcagtaaaaaaaacaggtaaagaaattaggatatgtattatgtgggtttggtttcactaagtaggaacctgttttgcttcgatggttttttttctgaagtcattatgttgtattcgcttgcagataaccgagcactatgctctcgtcaaatgaagtaaatagacagacttacaacgcgactgttggtgtcttggaagttcaatagtggaaagactggaccaagtaagagaaaccaagagttaaagagtaggtaggaggaagatgttgagatgatgcaagtttaggtgtggagttagttttgagatagctataggtggattctcaaatagctgacacttagtctctctacttccataatgtacgtctcttctataccaaaaattctcacccccaaagtttctttccaacgcttttcctcacctcatcattttttcttacgtttcgagtaccacctatttcaacaacattaaatattttctataatttgactatcaatttttaataaattaaaactatacatagttttagataaattacacgaagcttccatagaagaggaaagttcatttgaatttctcttctaaaccgtaccttaaagattaaatggtgaatatacacggggaaatttttttaataaacaacgcgttctctattaaggtattgattgatataagtaagcaagcgggtgtaacacaaaataaaatattataaaaggcttcttctataggttggtaagcggcaatccagctgccattgcctatttgacttcccccattcgatcatggtgagctcgtcttctctcttctcctcttatctctttctctaccattttcttttgctttaaagctctctcaatcatgatcatgaagacccccatcacagcattccattcatcctcatgaataattctacatcaggtttcttctctttccctttctgattctcaacactcttaccacatttctacttttgtgttgtatatcgatttttgttctacattcttccaaatgtcagggaatctagttgaaatgtgatgatttttgtgttgataacttgatatctggtatggattgaatgattggtgattatctctgttaattcatctctgatcgtgtttctgtttgtgttgacttggaatgtggacctggtttggatagtgaagaggctggtttcatctaaggcaatgaaatgtttctacttcagcaaagacaaaactcaggatgatgaagctaagactagaaagtttggttcagctacgatggctagaggaggatcagggtctgagtttaattcagatacaagtactgctacttccattacttcttccttgcacgtcctctcagagacacacagtaataatctcaaagtatttgtcctcgatgaccttaaaaccgctaccaagaacttcagccgctccttgatgatcggtgaaggtggctttggtggtgtctttcgtggcgtgattcagaaccctcaagattctcgtaaaaagattgatattgcagttaaacaacttagtagaagaggtctacaggcaagcaaatctttttctctctctttagtttgcttctgttttacacaacctccttcagtacccaacaataaaaacaactacgtatgcattaacaggggcataaagaatgggtgacagaggtaaatgtattgggagtagtggagcatccgaatctggtgaagctgatcggttattgcgctgaggatgatgagagagggatccaacggctacttgtttacgaatacgtacaaaacagaagtgttcaagaccatttatccaatcgttttatagtcactcctcttccttggtccaccagactgaagattgctcaagacactgctagaggactcgcttatcttcatcaaggcatggagtttcaggtatcttctccatccatgatcacaaatgcctttaaacctttttcatatgttcttgaaactatactcatcttatatgcagatcatctttagggatttcaaatcctctaatatccttcttgatgagaactggaatgcaaaactctcggatttcggactggctcgaatgggtccttcagatggaatcactcacgtttccaccgcggtacgctacgccttacttgttatgtctccattgattgtttgaaacaattgaagtcttaccaaactatgaatctacaggttgtagggaccattggttatgcagcaccggaatacatccaaacaggacacctcacggctaagagcgacgtgtggagctacggaatctttttatatgaactcatcacaggaagacgaccttttgaccgtaaccgcccaagaaacgagcagaacatcttggagtggatcagaccacacttatccgacataaagaagttcaaaatgatcatcgacccaagacttgaaggaaactactacctcaagtcagcattaaagctagctgcagttgctaaccggtgtttgatggtaaaagcgaaagcaaggccaacaatgagtcaggtttcagagatgttagaaaggatagtggaaacatcatcagatggtgctccttcaggactgccattgatgaaaagcttgacacctaaagatgcattcgaagcctcaagaagggagagagttaagagaagatttgttgaactgttaattggagaaaatggttgtcccaatttacctacttggtctcataaacttgttacttctatttgatttttttgagagaacaaactgataatcacactgcttgtgttatgccaatattaattgccattataatcacttgtcgtttctataaataaaacggcccgcagttttgcccacaataaacgccgtgtcgtttacatcttaaagtaaacattgcaactgtcttctccgatagtccgatttctatgttcccgttaattggggttttagggttttccgattagttccacaatgctctctattcgccgccatgccaaaaccgtagcttcctcctgcaccaaccttactcagaaacgaacctacgtcgacgtttacatgaaatggaagagagatccttatttcgacaacatcgaacacatcctccgatcatctcagctcaaatccgtcgtctctcttaagaactgtatcgtccaggaacctaatcgctgcattccgatctctgccatctccaagaagactcgtcaattcgatgtatcaaccaaaatcgctcacttcttaaggaagtttccttcaatctttgaagagttcgttggtccagagtataatctcccatggtttagattgacaccagaagcaacagaactagataggcaagagagagtcgtataccaaacttctgcagatgatttgcgtgataggttgaagaaattgattctgatgagtaaagataatgttttgccactaagtatagttcaaggaatgaaatggtatttaggtttacctgatgattacttgcagtttccagatatgaatttagattcttcgtttaggtttgtggatatggaagatggagttaaaggtttagcagtagattataatggaggagataaggttttgtctgtgttgcagaagaatgcaatgaagaagagaagaggagaagtgagtttagaagagattgagtttcctctgtttccatcaaaaggttgtagattgagagtcaagattgaagattggttaatggagtttcaaaagcttccttatgtatcaccatatgatgattattcatgtttggatccaagtagtgatatagcagagaagagagttgttggttttcttcatgaattgctttgtcttttcgttgagcattctgctgagaggaagaagttgttatgtctcaagaagcattttggattgccgcaaaaggttcataaggcgtttgagagacatccgcagattttctacttgtctatgaagaataaaacttgtacagctattcttagagagccttatagagataaagctagtgttgaaacacatcctgtgttgggggtaaggaagaaatacatccagttgatgaagaattcagagttgattctgaagagtcgaaggaatagtttcgggtttagggacgaaggggttgtagataaagatttggatttggattttgaaggctaaggcaaaatgttgtaccaatctttattaatcaactttcaaaccagttttaagatgcagatcatcactcagatattacaaaagctttgaatgcaagaatgaattttgctatacgaaaacaaaagacaaaacagaaaaagaaaaaaagaaaaaaagtattcccctgaaagacaaaatgggtataagagtttgtaagaaaaaaacagagaaatattttcagttggtcaatttctcaacgatcttggaaagagctgaatatgagccaatgactgaagatattgctcctactatgatgattaagacacacaacatcatctacaaaaaccaaccaaaactttgttaatgaatcgtcttataacacatagaaacaatgtttttgtgagaggctaacctgggtcggggtaacttttctccttacaatgctcaagaaacaagctggaggaagtattagagtctgcacaaaacaaaagatgaacttatatatccaaacttaagatcctcatttgtagtagatataccaaaaatagaaggaaaagacagcttacgacgagcatagtcaacaacgatccaatcaatgacatgacaagacctgcaagatttttgagtgttctcacaactagcaaaagtatgattttcaagaaaaggagctttgcatcaaaatagtaaagaggaacttaccaaagaagggaatagcgagaccaacaagcagagtagagaagaccaatagggttctaatgccgatggcgtaccaatgtgacctgatatgccttgatggtatcaactcctcaagactcattgctactggagatatggtcaaagcatatttggtaaatggattgaccacctgtgaaacggttaaaacaaaacggttttacttccaaccaacatgcaagaaccaatacgtagtggaaagaaaacatatttggtccacttaccgtagtccacacagcaatcttagttgcaattaaatcttgaggcaagttgagagtaaactgtgactgtgttgattctccaaacatcgtataacccataacagcgacgccggcatacatcagagtacaaataccaaaactgcacaaaattatcaatctttctgctatcaaaatggttgaatattttcttgaagtttgcataagcgaaagtcgaagcgttgtagaagataagaacttgtttaaagcgacataagcttaccatgtcaagagaacagcagggtattgagatggtttggccatagaagtataaatattggggaaaacagcatgtcctgagtagcagtaaccatagagtcctatagccacaggtaatgttgacaagtttagtgtagttcctttgctgtgaattccaacttcatctaccaaaccaatccaaaacaaacataaaaccactagcactgatgcaatcacccctccagcagagatataactaagtacgctgagatctctgagccaaacggtggggagaacggcgagagtggttagcaatgcaaatagatggcgtgcatctaactgaaatcctccaatacttaaggcagcatttggatataatgaagacaaattatcactctccaatattatatattccacacagcatgcctgaaaatatgaatagactcatgtcaagtctgcagatgtatcatctagtatctactatatagtcactattcaactaatcatttcacactagtagcttttaagaagctttttagggatcatttccatctaaaatatatctttgctactttagtgacgtcaaaagtatataagctt

SEQ ID NO: 349 - DNA, 113950 bp, Arabidopsis thaliana
aagctttggatatcttgatccagagtatctaacaagacaacaattaactgagaaatctgatgtttactcttttggtgtggtgatgcttgaagtagtatgtggtagaccagtcattgatccatcactaccgagagagaaagtgaatttgatcgaatgggcgatgaagttggtgaagaaagggaaattggaagatatcatagacccatttcttgtaggaaaagtaaagcttgaagaggtgaaaaagtactgtgaggtaacagagaagtgtttgtcccaaaacggaattgagaggccagcaatgggagatttgttgtggaacctagagttcatgcttcaggtgcaagcaaaagatgagaaagcagcaatggtggatgataagccagaggcgagtgtcgttggctcgaccatgcagtttagtgtgaatggagtgggagatattgcaggggtctcaatgagcaaagttttcgcacaaatggttagagaagaaacgagataaatatttgatcaaaagaagagtatcttcatcactattgtgttgtttgtacaggagggatcacaatactgttttatacattgatattgtttatcaattgatatataatttaagcttctttgtcatactttctatgtgttatccttttaatctctttgcatgtatatatatatttcagttctctagtgtcttgtttgaaaacctttaattgctgcaaaaaattttagaaactaaacgaaccagaaatttggtttatgtacacaaatataaaacataaataagatcaattcaaattcactaatggttcaaaagacatgaaaaaaaaaccaagatgagatgtaaaaagttacgttatactttctttgcctctggactatggacataaccaagtttggcatcaaatcttgtcaaaaacttccaaccaattgttgtttcataggaagttggtcggctttttgtcgatctttcatctcgttggaacttaactatcgtccgaatttgacaattttttctttcagtgactctcttcaggttaaatttgaaccaaccttggcacatcactgctggaaaaataggttcgcctccatgacctccaatatcgagatctccgtagtgatgatcctctattcctctccaaaaatgtatacttgttctttgtactaacaaacggcgacattattctcttggtcgataaagaaacttacatgacacataaacctatggtcataataagtgcttaaatccactgccaacaacttgctctatgataagactttggtttgatcaatcttatcgttggtagtcacccatatctctacccttgatgtatccaatctctgttgcaaaactgaaagttgttcttctttaacaactgataaggccaaaatctcataaccaagacgtagaaagggaagattcaggcgtccaaatctctcggttgtgaaatcgaaacttaatagtagtgaaaagtctttgatgacttctgatgcaatccaataagtattcccttttaaagataccccacgagattgtatgttgcaaccgagaaagacgtcatcaagagccctccaccttagctccgaatatcccatttttggactaccaaaatcctacaaactttgtagctgtcgcacaattctctatggtatctgagggcaaagatgacactcgtgtaatgattcaaagcatggatcaacttggtttgtcccgaacacgggttacacacaacaagccttgttattttccttggtacgtaataataataaaccgtcgcagtgatcgatttgatcaaagtcgccaagaccacctaatctgctgagtttaatttcggtgttgtggcggcctgcaatgaaatcaacgtccaatgaataaaagcttgaatgaatcagtacgatcacttctcttgcttctttttggaatcgttttttgacgaatccacgatctttggttaagcgttccatagtttgcaagtacatggcagttatcttagagacttgtccggaaacctagagagtatattctcttacaaataacgtggaagatctaaattgccattgttcgtttcctctcgtgatctctcaaaggaagataaaaatttagggtttttgaaaaaatatatataaatctgccgttcaaactagaaataaccaggatatttacttccccgattatccagaggggccgattatgcaaacatggcccaatttagggaagttcaaaaaaacaaaaaaaaagttgagagttgatatgatttgggtaaagttaatggagtatggttttagacaattaatgatctatgtttaaatgtgtataacacatgtcttgatcaaaaaaataaaaaatggaaggcatgttgttggcgataacctttacatgtaattgaaattgaaaataattttagcacatcgaaaatagtgatttacagtttaattctactaatacgtcattagttattggaaccattacatgtaaactgtcgtagtaattaactagtaattacaaagtgttttaacaaatattttaaaagctagtggtccaaatcaattctaagcttttgtaatatagatagaacgaactttcccgtcctttgatcgtggcgacaggaagggaaatacagttagaagttagtaggcaaaaagtcaacaaaaaattaattacggctaaaagtcaaaatgaaattggaaatgtaaagcattccctatcacatttaatgcttacacatgttaaccactaacaccgcctaggattatatttctagaaaggtaggaatatgatagtgagttacgttcaaaattggttttgaaatcaatgtgattggagaatatttggtaagagaaaccaatattatgtgactttcatgatgatgcggatttcgtgattagtatgtgtaccaattgattgtccaacaatatcaatttggtagcaagttttgaagaaaaaaatccattcttttccccaaagcttgtgtcggataacgctgatttgtactgcctaactaaattaataacactagcgaatgacatgagtcattatcaaactattcgcacgttatattcattcataaaagcttcgctacattctctataattacatcaatcatgctttgttcaaaatctcttaaattaatccttcgaatttttggctagataattgatgttttaaccaatctcttatgtgcacaccatagtaaggacgatcgtaagagaaagagatgccactgatattaaagactccacatcctacatcgaattcatatgatcttatccaagttccgtcgtgcatgaacaagtacctgagcattaactcaacaagctagacctttaccgataatatcttcacatataaattacctaattggtgacccatttgactttaacccacatgcatcgcattaaatatgaaatcatcttctttaacaattaaaaaaatgaagtcatcttattgacccatctcaatacaatttatgcgacaagttttctttttacaatatattatgaataaagtttggattgaaattcagagtaatatcacttaagaagttaagatattactacattaggtaccaaaaagcggcccgtcaaaagaaacaagctaacaaaaagcattgggatcgaatagaattgactactgacatcaacccgcaattttactaactttttttttgttggggtcaaaatttttactaactatttaaaacttccaaaatcacgattcattttattttggataaataaaacctcgattcattttatgggctatcggatagcttttcactttcagtgatcagaacttcgcccataatagcataaataccatcgtaccaatctacactaagccttttttttttgtttaatttgattacaaatctacactaaggtgtcaacagaaacctattgcagtactgttatagttagaaactagaaaacactggaacatgattttcaaattaggtcatcaattcaaataaagatcttcaaaaatagcatttactattaatattacatattataccaaagatgcaccagttaaactggtataacactatatagaaagaacctagaacatggcacaccacacaatatttaaagctgagacaaaattttcaaattagaatggctaggctatcttaactagctagttcgtcaggaggttgcgataaatgattgatataatattgttatgcttgcagttgccaattaccatatgtgtgcacacataggtaatgtagacatgcgtcaggcgttgtccacattaaaaaactatgacttactcaataaggttttggatgcctaatctcttgtcatataagtttcgcaaaaccgactcgactaagcagataagttacaactagcattttgaattaagggtttaaagtccaaaagattcttgttacaaagagttgactagaaccttatatttattttagataacttgactcgaaccttgcatgtgcgtgtcgaagagttttccggcatagtgttaggctttcaattaagttctaggcttttaattaagtttggcaagtgaagtagctaagctagctagccttgtaggtaaccatttaatatagatttacgttttgattttaattggaccgactatgaaatagaccaatataaaacatcagtctacatgcctagatccttgagtatatattaatactatttcacatgtacaaaccatttacaagttggcatcaattttgcatgacttttttgtttcgataatattttcgctttttaactacttcatcaatcatgtaattcaagctttgactaccatagtagaaaatttgtcgtttccacttttaaaaattgcttttagttacctaatgcaaattttttgtcaactatataaaaggctaaaacgcaatcaagaatactgatttcacaaaaaggcagattttagatgcttctaactaggcatagacattagacatcacacggtgtttgttacctctacattgtagtaatcacttgaaaactcttctttaaaagcgacgggcaccggtaaaatatttggattttttgtgtgtgattaattctacataaattcacagaatttgaacatttgtttactcaaaaatagtagtatgaaataagcattaatggaggcaactatgggaaactcacacgaaagtcctcgacccatgcatatgttagatgaacaaacaccctttacctaattggctaattcacaagtcaataaaacccatttcgccacgtgtcatatgttcccaccgatatttttaatttctcgttaccccaagaaaaagaagaagaaaaacgtatttggtaatttctactttaagaaactttagatatgataggtggactcttcaccttccccaaataaataaacaataaatcaaaaccgcatttacatccaaacagtcaaaatatcaacctaacatacttttcccatgcaactcacccagactttcttatttaacatagccttcgtgtcttcacacatccaaacacgtctcttcatgcactctctcgcttctatataagttttcagtaacataacagatttatacatatccaacaaaagtcccataaactaaacaataaacactgctgtctcttcttcttcttcttcttcttcttcttcttcttctagaacagtacgttatgagagtgttttaaggccgttaatttgttaaatcactctttaaaagtttttctattgtatctatggctcgtattgtagcagctaatgatgatgattccatggagctaaacaccatctcctctatacacgattcaactttagggcaacttctgaagaacgttagtgacgtcagaaaaatggctattggagacgagactccagttcacgagtccttaaaccaagactacaacgatggttacatgcgtacagttccattcgttctctcattcgacaatctcacatacaacgtctctgttcgtccaaaactagacttccgcaatctctttccacgtaggagaacagaggatccggagatagctcaaacggcgaggccaaaaactaaaacccttctcaataatatctctggcgagacacgagatggagaaatcatggctgttctaggcgctagcggctcgggaaaatcaacactgatcgatgcattagcgaatcggattgccaaaggaagcttaaaaggaacagtgaagctaaacggagaaacacttcaatctcgaatgctcaaagttatatcagcttacgtgatgcaagatgaccttctcttcccaatgcttaccgttgaagaaacactaatgttcgcagctgagtttcgtctcccgagaagtttacctaaatctaaaaagaagcttcgtgtgcaagctttgattgatcaactaggtatcagaaacgcggctaaaactattataggagacgaaggtcaccgtggaatctccggtggtgaaagaagacgtgtttccatcggaattgatataattcacgatccgattcttctcttcctcgatgaaccaacctctggtttggattcaacgagtgctttcatggtggttaaagtattgaagaggattgctcagagtggtagtatcgtaattatgtcgattcatcaacctagtcatcgtgttctcggtttgcttgaccggttaatcttcttgtcacgtggccacaccgtgtatagtggatctccggcgagtcttccacgttttttcaccgaattcgggagtccgataccggagaacgagaatcgaacggagtttgcgttagatctcatccgtgagcttgaaggatccgccggaggaacgagaggattaatcgaattcaacaaaaaatggcaagagatgaagaaacagagcaatcgtcaaccaccgttgactccaccgtcatcaccgtacccaaatctaacactaaaagaagcaatcgccgcaagtatcagcagaggaaagctagtttccggcggtgaatccgtcgctcacggcggagcaaccaccaacaccacaaccctagccgttcctgcattcgcgaatccaatgtggatcgaaatcaaaactctctcgaaacgatcaatgctcaattcacgaagacaaccagagctattcggaatcagaatcgcctctgttgttatcaccggattcattctcgccaccgtgttctggcgattagataattcgcctaaaggagttcaagagcggttagggttcttcgccttcgcgatgtcgacaatgttctacacttgcgccgatgcgttaccagtttttctccaggaacgttatatcttcatgagagaaactgcttacaacgcttaccggagatcctcatacgttctctctcacgccatcgtctcattcccgtcgctcatcttcctctctgtagctttcgcggcgacgacgtattgggcagtgggcttagatggaggcctaacgggccttttgttctactgtctgatcattttagcctcgttctggtcaggaagctcctttgtcacgtttctatcaggtgtggttcctagtgtgatgttgggttacacaatcgtcgttgctattttggcttacttcttgttgttcagtggattcttcatcaacagaaaccgaatcccggattactggatttggtttcattacatgtcattggtgaagtacccgtatgaagcggttttacagaacgagttctctgatgcgaccaagtgttttgtgagaggagttcagattttcgacaacacgccattaggggaactaccggaagtgatgaagctgaagcttcttggtacagtgagcaagtccctcggggtaacgatatcgagcacgacttgtttaactactggttcagatattctgaggcagcaaggtgtggttcagctgagtaaatggaattgcttgttcatcacagttgcttttgggttcttttttaggattttgttctacttcactttgttactaggaagcaagaacaagcggaggtgaaaacaactagaagacccaaatcaaaacatacttgtattttctgtttgtaattccttgaattgtttaatgaaaatggtttcttttcatatatataaaaagaggtatgtctcctggattcccttatctcaaaatcttatagaagaataaggatttccatattcacaaaaacgtctttacaaacaaatttgacttatcttccaaacgtttcctactaacagactatcaagtattataaacctaatgtcatacctgagattgtgtgtgtgagcagataatgatgatgatgaagccagagagccttggattatcttcattggtctccttaagatcaaaagatatgatgaacttcgattttgctttttctgtttccatcagactataacaaacattaaaaatatttcatcatgtacgtgtaaaaaaatcattgacatctagatttcgatctccatgagcaactgcgtcttcgggttctggcatgaagagactcgttgatgtcgcctgcacaaggaataacacaaccagttctcaatccatatcttgaaaataaggatctacaagtttcataacaaacatatggcaaatgcaaaagaagacttaccttggtatcaagaagcatatctccgttgctgtcagtaatgatgttagcaccatgagtttttagccattccaaacagtcctccataccatcggtctccttttcatcagtaccttcgcttgcagcaccagtaaatcccaacacttggactatgtatgagaccgggattgtaggacgacaactacgagacataaaattcacagccttgtaacgcatcttctccacatagagatctgcaaacataacaatttcaccatatctttacatatctactcattcaattgtttaaatatatcaagagagttttcatgtatcatatgacccttacccatgaggcaactattcatgtttggtgcagtcttgtagagtctgaagaacataacataattccctgatgtgacagctgcacgaactgaaagagcatgtctaactgcttcatccttcttatcttcttcggataatcttcaaaacagaggtcacaaaattactcaatctcatgcatacaaacccaattcaaagaggtagtagtaacctctttgcactggtaggaagagatgttacaaaaactcaactatcaggtaggtggacagaacattaataattccattactaactcaaagaaattgtgtagcaaaccatattctgatatttctacaaaaccttaatttataaaaaaaattcccatgaaccatgaatgcatcatgcttaaaaggagcccagagatgggactttacaactactaacctggacatggatgatagcagttctcggttgttgttagagtgtagagtaatatagagtagactgtacgcagcaaactccagagagcatccttctacaccttccgcataaagagtttttaactgtgacaggcactgtaacaaaaaaaaaaatagaaatcaatttagcaaggctatacataccctaagagttatagtctcctcaggaatagacaacagatgtattttacaagacttgatggaacggtatcattatattgcagaatcaatgcaaacaaaagccacaatccatagtaaccagtcatcagaactatgctcccttttgcaaagtttctctctgattcaacactttatgttgcttttttattttttagaaaatgagagaccagtgaaattctagcagtggttgatactctttaaattacgaaaaagacaaaagtgcttgataccgaatttgaactagaaattctgattgatctatcaatctatgctagcgtaccaacctgattatactcaggtaaatcccctgcctccaaagctaatctagcatgtgtttcataaacctgaaattgagattgcacatggaaccattataaacatgctaattgggtgtaaataagataaacgttccaacaggaaatgaatcctacatgcaataacactcgacattattggaagtcagttatgtaccttagctgttaaatgattgtgtatccgttgtactgtgaggtcttggcgaatagactttagttgatcacatttaaaaagataattcttttgagaatcctgaaccattatcagagctttttccaaaacatcctctggtcttacctgaaaataagtcaatcaaaaatatcagtcatggtgtcaaaaagaatactaggtataagaatataagatagtaatatttacggtggcaggatctggcgcagaagtcagacggagataacgtttctcaatttcctggcaagtgcctttaacagttagtgcatcccagtcaatgtcttccacagctctgctgccactttcatcaaaaactttgctaagcctcaaggcagtggctcttctagaatgcaaatttccaacatttgcattcttaggttttgtaagatcattccctcggctgtggccttgaattttttcaaaacgcttggaacgactatcacgtcgcttcttttcctcggcagaaccagcaagtgccattgcactggaatagtaaggtgtcaaatccttgtcactatcactagatgcctcatcatcaatggcagtagctgcaccaccagaaaaacgctgtcgcttgacaggccgctggaaacttttttttgcagaattttgcccagaataagtgggcttgaagccagtggcagcatccaccttttgaaaactctcagagctctgcaaaatttccgattatcagaacgactgcaaaaaccgagttctaacagctaaaacattagaccaactgctaaatgcctcattaaaccaacagctaaatgccttcttttcaattccttcaaccagacattaataaataataaggaagagattggttaacctttttgttgttttcattttggtgattccaaactccaaatttaacagcactgctgaaagttgaagctggcttcacaaaaggttttccttccaccaacggctcccatctacttttgggtcgtcttgttgggctcttattttgtaacgaagagagctgagcggagcttgacctatggcacagtgtaaaacttagtgggcaaaacatatgaagtaagtgttccagacatatcatatagaagaacgaaagttatagatcatgcaggcagcagtggatggaggaaaaaaggtcgtactcagagttagtcacatttgtggtcgtgacagttgagagaggctcagtatcccaatctcgagtataaagagtattatcctcctttgcttttttgacaatctagagatacaaaaataagcattagcaatgcaaagcaaccataaattaacatggtattcaaataactgctatatgatttcttccataaaaggcatgaaattatcttaaacatactacaaatctactcgaaagatcaagttgaagaagttcatccaaattttgcaataatattaagatgagcagagtgtgtaactaaaatcatctatcatgctacaatagtccaacaaccagagcgtctacaattcctactaacatttaccttcctcagggcaacctcgcaagattccttttctttatcatctttgcagcgggcaaaagccctctcaacaaacccacgaagcgattttgggaaggttccaggctacaagcatcggcattatttgtttccaatgtcaattactcaattgtgagaaagaaacaattactcaacacacaaatttatggtggccaacatttaatatctacttcatttgctaggtcatcaagatttgaataaaggattcttacgtcagacatagcagtggtatggtctttaggctttggcattgaaacactaacatatgcaggtgcttgggctgcactggctgctgtactatctttatccattttggtaaaacctgatggcaagtttgaagcaattctagggttagttggaatctgtactttgcttaccctttgtgaatccactaacggtgctgtctgagtaggctggcgatagcctaacggtgcctggtgaaaggaagactgggagttcatctcttgaggatatgtagctctctgatgaccctgaaagggagtctcgtataaaggttttgtctccagaggactctggtaattattttgaggtggaacaggatgatgagcttgcagacttggtgcttgatgcatccagtaagtatcattagatgtactaacagctgcaccaggctgagagaatgatgataaaatgattactaagttagtattcaataaaaaggacccccatgaaagaaagcaatcagagatcatgtctaaactgtctgcaaataaaacatttaagaattgactctatgcagtattgcttggtagctaacaggtcagttactatcactcttttcccaacttagttgatttataaggacaataacacacattttatcaagtagctgaaagcagaaaagcattctaaactcaaataagcttaagggcgcaaatttactctactccctcatgaaagtaatatctgaacctgttgagaaggtggatgggatgagtcagtttccggcctccaaggttggacataagacggggcaggctgactatttgaagcaggcatttcactagtaacaccaggaactggaaagctctgactatatgcacttgtggttggggtagacagcttttctgtgcctggggcacaggggacttctgtttggctgtaatattctgtccattgttggtagttctgttgataatgtacaggtggtgtggtcgcaatagtagagctatgtgtgttagcagcatcaggagtataattttgataagggtttgaggtgtaatccgtatagtttccctggttcgaagcaggagtctgattgctgtaatttgtacttgggtaacttccagccgtttggttgttatagttcgtactttggtaacctccagcagtctgataatcagcaggattgtagtaagttcctgaataacttggagtcccagcataagatcctggattctgaaatgaggaaagaggctgaggagcacctgtgttttgataagcccctacaggctgaggatatgactggctaggttgctgttgatagccactgtagtaattggaatatcccgtgtttgaatagttgtgtgggtcagaagaggtctggtatggcgtatatccactataatcttgtgccacatttgcagttccggacgtcgatgagatagtgaaggatacagtattcggtatctcttgcacattgcctgtggctggccctgtcggctgtggatggtaatagtttgaatttgaatagttcccattctccacagcctgattttcaacagaatgccctgtccatggggcactttcagacccagttgagtattgatatgaatatttctgtgtttggcttccatcaacaccatatcgattctgcataaaagaaaaaacattagtactggccaaggtctgagaatcttcatttaacaagtagacataaacaaaaagttgaagagtgaaaagaaacatagacaaacaacaaacagaaatgtcatctcagataaagactacattaggatgctaaagcctcccacagtctcaaatcaatctgattgaatcaaacaataaaactgcaaatttccatgaagtaagtgatcagcagctaagtttcgtaacaatacctaacacctaatagaaaatgttgtactttgcatcattgagctgtattcataacatattactagtgaaaatcatacggctccacagaattgatgataggtctattcttaaagcagaaactgattttctgaaatgttccaagagttcacatacggagcctagaatcaaagtcactttttttctgctgcataaacatactgacatgcaaaattcctctaaccattacaatggtgaactaacaacaagcataactttcatatctaccaagttaaatctggagcaaactaaaataaacaaattcaattcgcaaaaattgaaccaatgcacgaaatttcacttgcatataaagactaaataaatctgcaaattggaaaaatttaagcttaaaagaaagagaaggcgcaagagattgttaattacctcaatggaattagggtccattggtgctacggcctgagtgttccctccgtgattcatgctttatcatcaacgtcctgaaaaatcatcacacatacgattgaacttacttcccaatgaacatagcagaaaaactaaattcattcattgaaaagccctaaatagcaaatcagagataaagcgtcaagaatatgtaccagtgaagctccaatttgtgtcttcttcgttcggatgaagaatcgaattgaagatagtagagcagagcaggatttgagatcaaaaccaaaaacaaggtaacaaaaggaaacgaatagaaccggaacaacaacaaaaaaaaaaaaggcagataaaaataaaaagctaaagggaaacaatcaaagagagttgtcaaaatctatcggaaattacagaacacggagaaaatcgaggaatcttgccgaagaagaacaattttgttgtgccggagacgaagattgtcaaatttttacggtatactagcgtcgtcgggtcggttcggttgcggatcaggtttagtctttccgggtcgggtttttatatagccactaattgggcccattatctttcggacttgccttttcttagtggatctgaagaatgcaaaaaaaaaaaacaacgtcgacaaatgaaataacaagcatagtaaataattaaatatataagatttcgaatgtttacggttgtgttgacgtcaaaaaagaaaacatttatatgataagtatttgggttaaatatatagtctatataagttttggttgaatcaatgtttagtttagacaaatcttgtattgtatatcgttacatgtaatttagcttaggtcatgaatttaatgtagttgcttctatcgccaacccttttggccaagaaatccggcaaaaataaaaagtgcttaacatgtagtatagcaatcacaacaatctctagaaactaattgagtgattggttgagataaatctaataagtgaaagaaattaaccatagaaacaagctattggtgatgaacggagtagctatctaaaatatgactacactataaatcgacacaatattcgagaaaacaatcattatccaacatatatatatatatatatatatatatatatgaattcgaaattcgtatgtacagattatgttctacgcgaaagtgtcaaatgtttagtaagaaatcgggttttaatccatataatagatatcaaggtaagattatactgttgcggtgattattatatcggtgaggatagaatattgtggctgtgactttgtaacgttaaaagtttaagacaagagaggaaagtttatgagcaagtagggtaggatatatagatgaaataaacgtgagaaatgaatatgtggatgcaatttcagtttgttgtgtggggcttgtttaatactatacagtatacttatatcgtcattgatttatatagtacacctataatagagctatcaacatcacactataaatatttaccctaccatgcattagttgattcctctatctgcgattagtggaaaattttggtattttattgcgatgtatatgaatagggtacaatgttgtcatggtagtattagtttattaccaatcacatatccagcttaggaaatgattataaagctatgcattcatacttggactaacaaatagtttagtttgtttttttttcatttttaaggattaatttggtgattcaaaatggatgaggatctagcggaagttggcactttgcggtgatgaaggaggacgtgaatgggacgacgatgtaaacagtatatgaaaaatattataacaaaatttctttgtgaaacaaaattgttttgttcctctgttcattacaatcatggatgtctccatctgacaacttgtaatatgctagtattattggactcttatcaaaatcatctattgctttatttgttagaacctctcgtctcgtgacatatcgtccagaatgataacatgcagccaggatgctcttgagatctctaatatattttgggttagtttggctatttctcttctaatatgacttaaattacaaattatggggattggtttggccttgtaaaatgttttccttctcatattctttttgaaggaaaagtaaagggaacagaaaaaggtcaatcatgatttagttacaacttacaagtataactaaattattggaatcaacaaaaacgtgttccaaattgtatcaataaatagacatagttgatagttccttaatttcattctgaataagatcaagaatttacaggttctctcttctctctctctcaagttctgatttgtttatacaaattacaactttagtttcgtaaataggtactcattagttgatcattgctctctatgtcttgctatgcaattcaataggctagtgtatcaccaatcacagatccgggatcccggcttagtaaacattataaagcttgaatatacactttatttggatttggataatttagttaaaaaattcattttacagtatttgaaaaaatacaaaatggcgaaaatctaccggaagttgacaggctacggtggtgaaggagggcgtgaatgggacgatgatgtatatgagggtgtaagaaaagtgtatgtaggacaagatatcaatcgtatcacttacgtcaaattcgagtatgtgaaggaagacggccaagtcgtaacaactgaatatgggaaaatcattcaacaacccaaagaggttcttcacttcatttaccctctcatcacattccaaattttctacatcaaatatctaaaactcacactacaacactataacaaactattatactacaagctccgatcaattataagttcttttcgtgaattttagtttcttgatttttttggttagaaattttaatttcttgattgaagaaatgatatttaattcataaacagtttgtacttcaatatccggacgaacatatcatagcggtggaaggaaactatcgcggagtggctctatgtgccacagaggtgatcacaaacctcgtcttcaagacctcaaagggtagaaagtcaccactgtttggtccaaacttgcttggaattacgaccggtacaaagttcgttattgaggatggaggaaagaagatcgtagggtttcatggacggtcgggtaatgctctcgacgcgcttggagtttactttgtacatggctctctaacaacgtctccgcctgtttacaagctggatgcccaaggtggtacagacgggcgtgtttgggatgatggttcttacgacggcgttaaatcgctgcgtattggtcaagataattctcgtattacttatttagagttcgagtacgagaaaggcggtaagttagagacatgtcgccatggggtgaaacaagaaagatcactgaaggtaaatttctagaaactgtgagatatagtagaacaaccaaaatttaggtcttaaatataacttttgatatcttgcgacagaagtattcttaaattttgattttgttgcagtttgagcttaacccggatgaatacatcaaatcggtggaagcaacctatgataaaccggacattttccgcaatgtcgtcattacatcgcttacatttgaaacatcgaaggggagaacgtcattctctgggtataagggaggtaagaagtttaagctagagcaaaagggtcgtaggcttgtcgggttccatggaaaggaaggttcagctattgatgcccttggagcatattttgcacctattcctactccgactcctataattccagccaagaaactaccagcaataggcggcagcggaggagttgcatgggatgatggtgtctacgatggtgtaaggaagatacttgtaggacaaggtaacgatggtgtagcctttgtcaagtttgaatacaataaaggaaaagatcttgtatctggagatgaccatgggaagatgacattactcggaactgaagaggtcagttccataaacaagagttatgttttttcttttttcagctaattttattttaaattatacacttatccttgttacttttgagtctttgcagtttgtgcttgaagatggtgaatatctcacggccatagatggctattacgataagattttcggagtcgagacaccaatgattatctgtcttcagtttaagacgaacaaaagggagtcaactccattcggaatggattcgggtgagaagttctcgcttggagagaaaggccacaagatcgtcggattccacggacaagctagtgatgttgttcacagcatcggagtcactgtcgtgcccattaccaacaccaagtgaaaaaccttttattatataagtaaaaccagccagtgccatgtcgactaaatgaaaacattcaataaggattggtgtgtttactctactacttttgatgtgtttgtaacttactgtttctgtcaaatatgtccaataagaattggtgtgctctcttcaactattcaataaatctaccatgagccgtgtcagagtagctaacattgaacacacagccccactgatgtaatgaaactttttacccactattttaattgctccttgtaacatttcaaagacatagacattagaaaaagaagctttctcattgttgtcttcctcaaagcccagatctctaaagtggtcttacaagatttgattatgcatatgttgcccaaatgactaaaagtaatcttaacaaaaaataatattaaaagtaatcgaaaatgagtcgtcctatatatttaagaaaataaatatatatttttcctacatatgaatctaatcatgactaaatatgttttttttctccggattttcagattggagttgcacaatttcaccgaaatcaagatgaaaagtgatggaaattgccatctaattaatatttctaattccttttactcaatatatcaaatacttgatgtcattttttatcgtactcatttattcgaaaattttcggatcaaagcaaataataaaattaagtattcgattaaaacgaatcgaataacaaatatccccaattttccggatattcgattcgtgcccaggcctacgtggcacatatacaagtgaaaatgaaatcatacgcaaataaaacaataccatcggtataaacataaagaaatgaactatttatttttccttaagataattgtaaatttcgtttatttttttaattatggaattttttgctttttctttttcgttcttttagtatattaaaggataggatcatcataattcacaattaactgttggagaaagatttttttttttgagaaacgttaaacctagcagccctaatcttttctaagagaggagatcgagactctgttctgaatcaataaccatcgatcaatctcaactctaaaagatgtctaatactcagaccaagtcgttgtgtttggacggtcttagtgatcgcgaaatacttgagtataggtattgatcgattcttcttgtaaactttgttccaattatttttttgcctgataatctctgactatatatgttatttcttattcttcctggattttcagattggaatgggaaaattacaccgaaatcatgatgaaaagtgatggaaattgccaggtaattaatgtttctatatcaaacaatcaacttgatatatatttttgatcgtattatgaataaccctttttcatgtttttgtcaataattctatttcagttccgtgctttggcggatcaactttatcaaaattcggattgtcatgaacttgttagacaagaaatcgtaaaacaggtaatatcaatcttcaaacttttgattgtttttttcatacgtgtattaatgtcatatgatgattgattgattgatgactctcagcttaaaactcatccgaagatttacaaagggtttgttgatcatatggacttctcccataaagaacatgtcattgtccactaattcccaatggggcgatgaagtgactttgagagtggctgctgatgtgtatcaagtaaaaataatactcattacatcaatcaaacttattccatttatggagtttttgcccaagtctcaaaaggaaccggacaaagtcattcatatgagctatctagctgggatccatttcaactccatctacaaaaaaaataaagaaaaaggttaacgttctcttccttctccattgtatatacatctcatctccttactcttgatttgaggctttgagcaatattgtatcattcttattcttcgtcttgttggctgcttcaggttcacgttcatcttcatcatcgagttctgcagtctggatgaagctacagaggaagaaggagaatgaggcgaagaaaaaggaggaggaggagaaggaaaggaaggacatggagaaggaggagaagaaaaaggacaaggaggataagaagaaggataaggaggataagaagaaagccaaggtgcagaaagagaagaaggagaagaaggagaagaagaacagaaatcaccactttcactattctgaatgatttgttttgataaattaagtgtatctgcatttgacaagttgtatgttattattgggatcattgtggttgttttgactcttttatgttcttttcgagcttattctagttttgagccttagatactgataatcataaaacacaacatgataatgtgaaagagtcatcatgacataacatcagcgtcccaaaataacttgaccatcgtctccatggtatccaaccgtcgatcctcaacgactccaaaaagcaaggacatgaatatatgatgatgataagccaaacttttgcatgaacacagtttatacaaaatttaaataactgttaaattcatttgaaactttaatgaatgatatttctgacagtaacttaggaaataaagcttatacaccgttttagtttgaagataataattctaaatctgttttcaaaatgtgcagtcaaaaagattcttaatactaaataggagattttggtgggaatcgcaacattaacatcatcaaatttgttttagttaacaatatattgaatttggtttatgctgttttgatgaattgttttgttcatctgtcgtactttaaaatatctctgcatctagaaagttgtatgctattattatatattgcactcgtaatggactctaattatttgttgcatttgtgagggagtctctcgtgtcacacgagttgattattaaaatgattaattaaagacaatcaagaagaccttgtatgccaaagattgtcaataaatacacacaattcaatacccataagcttcatctccttccatcattcagagctcaataattaactggttatctctctcccttcaatttttttttttttttttttttttaaagtaactcctagtttccactactatgtatgttgcttcacaaaatgtttttaaaacaagaagtagctctttatatgtagatatgtattcttgaatatattagatttaacaaacacttttaaacctaattgattgatttatattacaccacatcaccaataatagagctatcaacatcaaacagtaaatatttacccatgatcagttgattgttctatttgtgtttcttggatcattttggtgtttttgctatgtatttgaataggctatacagtgttatcatggtatttatgtattactaaccacaaaccagctttaaaaactatatataaagctgtacatatatactttcgtttttggattatctatataagaagtaatttttgcattttacaatattttttagattcgaaatggcgaagatgtaccggaagttggcactctgcggtggtgagggaggacaagaatgggacgacgatgtatatgagggtgtaagaaaagtgtatgtagggcaagatctcaaccgtatcacttacatcaagtttgagtacgtgcaggaagacggcgaagtagtaacaactgaatatgggacaacaaatcagcaccctaaagaggttctcattgcatttattctcacccttaattttttgcgatactagtaaattactcttgtgaattcggattaacgttggataaatcctttaagacataaacaagaagaagcaagtatttctgaggcggataccctttagtgactctctaatttttttgtattacactacttgtgtaaatgaataagacacaaacactaagacaacgttataaaaccaaaactcagatactgtatattaggactaggaaatcttgagaattatcctaaacctatcaatattaaatactataaattttattgaatatatgttactattacatacagtttgtaattcaatacccggacgaacacatcatagcagtggagggaagttaccaccaagtggctctcattgccacagaggtgattacgtccctcgtcttcaagacctcaaagggtagaaagtctccattgtttggtccaaacttacttggaattacgaccggtacaaagtttgtttttgaggatgagggaaagaagatcgtagggtttcatggacgggcaggtgatgctgtcgacgctcttggagtttactttgtattggataccacgccgttccctctttacaagcttgatgcccaaggtggtacagacgggcgtgtttgggatgatggttcttacgatggcattaaaacgctgcgtattgatcaagataattctcgtatcacttatttagaggttgagtacgagaaagacggggaagcaaaaacatgtaaccatggggggaaaggagatacaccatccgaggtaactttactagttcttcttatacacgactagttcaataatttctcaaaaatgttataaattgttaaactctatttatatgtgatcattagtacaacgacataaattaggttccaaatatcaatgattaattattgtgtttgtagattctttgcagtagtatgaagtataactctcacacactccggttcaaatttttgtagatataattgacacatgtatttagatctcttaagacaaaaagtcttcttattttgttgcttcttgttgcagtttgtgcttggttacccagatgaatacatcaaatcggtggaagcaacctatcagaagccaaacatttttagcaatacggcaattacgtcacttaagttcttaacatcaaaggggagaacatcattctttgggtataatgtgggtaagaagtttgtgttggagcaaaagggtcataggcttgtcgggttccatggaaaggaagatgcagctattgatgctcttggagcatattttggacctgttcctactcctactcccttgattccatctaagaaactaccagcgataggcggcaacgaaggagttacatgggatgatggtgtctacgacggtgtaaggaagatacttgtaggacaaggtaacgatggtgtatcctttgtcaaatttgagtacagtaagggcaaagaccttgtacccggagatgaccatgggaagaagacattactcggagctgaagaggtcatttaaaaacaacaatttttttttttttttttcaattcattctagattatttacacttatcctttgttggttttgaatctttgcagtttgtgcttgaagatggtgaatatctcatgaacatagatggctactacgataagatcttcggagttgaggaaccaataattgtatgtcttcagtttaagaccaacaaaagggagtcaatgccgtttggaatggattctggtaagaagttctcgcttggagaggaaggccacaagatcgttggattccatggacaagctagtgatgttgttcacagcatcggagtcactatcgtgcccatcaccaccaccgagtgaaaaccagttagtcatatatactacatgaaacttccaataagattggagtgtgtgtgtgtgtgtgttctctttactatgttacttttaatacgtggttgtaagttcaagtaacttactgtgtgctaataattccaataagattggcttgtgatttcttgttatttactgccaaaaaattaatctggttctaaaaatctacatgcctattaatttcaataaatcccctaatcaattctagttattttattagttagcataaatagaaaaaaaataccacattattattacaaatcactaagatttattagtccacattatattttactgataattatcaaagcatggtactatttaaaacctcaaacaagttagcaattaaaaatctcacagagactgattatcttatttgttttaattaagagaaaggcaaaaacaaaattgagtaatgcttgcttaccaaaatatacagctaaaaaagacaattttaggcccacaataaaaaacaatcaaaaaggcccgctccttcaaaaagatttaaaaagtgaacggactcaatttcccatattacccttcattgctactcgaatttacggagaaaccctgtttctctgtccttacgcctttctctctccgttacactgccgccgtaacgctttcttccttcttgtaaaaaaagtctctccgtttaactaaacgccgtaaaaaaactcagctttgataatatcggttttgatttttgattgagtttccctccatatctcctcgatttccgattttgaggaatcaatctctctgtttatacggtaaacttcataactccatcgattttttggtttctctattttgaatttcaaacaaaaaaactgttactgatccatatttgtatttgattgatcgtaaatcctctgaaaattttcttctttgttttcttcgccactgagagactcaggttcgatgctctgcttcgttttttaaggtttttttagtggaaaggtttaaagggtagttatgtctttttgacttgtgttacgactcacttcgatgtttatggatctgtcagaaaagctctgacattttcttcattttgatcgtaatttgtggcgatcttgatcttgttttctatttttaaaccattatatctaaatcttcaaagctaaaaataaagatgctcttgaattattctcatcgagcaagtgtttaagtaagacttcactttagaacactctctgctctgttaaacctttgtgtttcatgattactgtctctaatcaatgtccctttctatgcgctgttttgccttttgttttttgaacaaagaagaaacctttttcttattttgcttctttataattttgattccagctgcacaactctagtgaacctttgttaccaatgaagaagcttttctttttcaagtcatcatctggtaatggaactgatcataataaacagcttcacaagcaaaaagatgatcactttcaacgatatttgaatagtccaaagggtcttaacaagtctcagagtgaagtatctggagctgctcttagacgaagccgttctttgtcctctgctgcttttgtcattgatggaacttcttcaaatcagcatcgactgcggaatcattcgtcacggtaataaataaactcttctttctatgacattgttgttgttgttgttatattaagttgttaatttgtatgtttcatcagatgtttaactccggaaagacaatttaaagaatatggaagtatgtcaacatgttctagcaatgtctcgagtcaagtcttggatcgttacattgatggagaagagcatttagaacggagtaagcaaaagagcggttctttgcatagtagtagtctctctgggagtagaaggaggcttccaccgcgagctcaatctccttcaccgttatcagagagtggcaaagataaacggaagtctaaaggtttgagggatgcatcagctcgttcacttgcaagaagtgttattgaaagactctctcataatactcagggcaagtcgaaggctttgagttatgagcccatcagaatacaagatgtttgcggtaaaattcttgactcaaactcggatgttttggctaatgttgttgttcctttgactgaagaatatgaacctgtgaatgaatattatccggacgaccaaacagagctgcagtaccaacagtttttcttacatgggaaggacatgtgtaaggaagacgatgttagttcagagctggaaaagagatataaagaagctgagaagagagtgaagttgctttctgaagaaatggaggagaagaagtttctttcagattgtgatttcgatatttcatctttggttggagatattagacaaatggaagaagagagggtaggcttagcttttgaggttttaagtcttttacggtcacaaatggatgagagggcttctactagggaagatatcagacgggtaaagaatgattgggacttgcttttaaagcgactagaaaaagagaagactgagttacaagttcagttagagacagagcttgatagaaggtcaagtgagtggacttcgaaggtcgagagtttcaaggtggaggagaaaaggctgagggaacgtgtcagagagcttgctgagcataatgtctcactccagagagaaatatcgacctttcatgaaaaggaaactgagcgtatcgatatgataagacatttggatgaaacagttacggagttgagtgcaacagcagaggaaatgcgtgaagaaaatttgtttcttatgcaaaatctctccaagttacaagagagttacactggtagtaccgatgatcttgattacgtaagaagaaactttgaagagaaagacatggaatgcaaggagttacataaatctgttacaagacttctaagaacttgcaaagaacaagagaagacaatccagggacttagagatggtttctccgaggaaattaagaagcaaccttcagagcatgtggacaagaagcttcaaatggaacaactaaggttggtaggagttgaattgtcactgagaaaggaggtagaatcaatgaagctcgaagctgaatctcttcgtcgtgagaataactgtctgctgaatcgtgtaaaaggaaatggagaagaagctgacattatgacgaccttcaagctagataatgaaatgaagatgcgtgtatgtcacttgcaagaccaaggtatatcaatgttaaatgagagtactcagctatgttacaagtttctgaaaatcatcaaagagaaatcagtgaatagtggttggagtgagcagtttctgattgaatctgagatgagggttcatggaataagacgtggaactgaaagcctgaagaggagtttgcagacagtaacaagtttattgcttgaaaaatccaatgagatggcatcaaattcagaatcatcttgctcaagtgctgctaggcctagcagccgctcagtggaagtaagtttttttttcttcaatatctgttcattacatgtttatctgttctgtgtgctgaatgatttaccttttttttttatctaatttagaaatccctgagagctgaactgagagcagaaactctagtcacgagtttattaagagagaaattgtattccaaggaacaagaaatcgaacagctgcatgcagaagtagccgcaggggtacggggtaacgaagttcttcaatgtgaaattcaaaacgtattagacaacctatcactaaacaaccatcaactaaaagacctcaagctgcaggtatttcagactttacatttttgttactcataacgaattaaagctcctcgagtgtgttctgatgattgatttaacaccagatggtgaagaaggacgagaacataaaccggatggaaatcaatcttcaagaagctgctaaagaattgcttacattaccaaaagtgttggaggaaagagaagagatgtggaaggaagtgaaggaatgcagaaagagaaacatggatttggagtcagagaaggagatgttgaagaaaaaggtagagaaacttgaagaggacacactctttaaggaaggtcagatcacgatactaaaagacacgcttggaagcagacattttgatcttcttctctccagtcctgagttctcatataatgatttcttagtccaataataaagacaacacaattaacaaatgtatatacaggtgtctgtttctcgttcttgtttctatctttgttgcggtttggtgcttcatttcccggatgaatgaacatatgaactcaacctagctatcctataaggcgacgaaatccttcacttgaaccggcttcgtcattgactctgatcggcaaagattgtagacatgcgtggcgatattatctgcttctagagttgtataacggagggtctttttcaacgttgtaggagacaatatatagtttcgtgaccagctatcactttctttgacggcttcaacgtccgtcaccgtgagaagataaaactaaacgctaatgtggccatggctgcttatgagattgattcatgagtatggctcggctctatctgcgagagccacgtctttttcttccctaagcacttctcgggcagtccatcgcatgaggtagcggtgatgacgtggaaagcggaagcaatctatttccgtacgtttgttttaatgttcttgagaaaatgcttacatttttcaaatagccgtacgtaatccgcgtgcattcattcgaacataatccgcacgttgaagtggaagcaagtgcattacttgcagagaactgatgccattttcggcagccacaaagtctataagagtaactctagaattctacatagacaacttcatagaaataagcaaaacagacaatcaacaattcttcttaccagagatgggttttttggggaattgacttatttcctttggcctttgacctgatgttgactctgcctaattttgctgaaacatgaatctgaccgggaccattgggtatgctagtgataccagaagtcagaggcataatccatgtgcatatttaaacgaatcattttacagttaatattgaatgcatatgagtaaagatgattgaaccaaacaaagctaatcagaagtagactttttgtttgataatttgaaactgcggtgtatgaataaagaatgtttgttccatatgttggaaatacgtattcatcgtttatacaatacactcattataaggctttaatctcaaccaagactatgttgcacactctatattgtgttggaaaagtgcaaagcaaaatcatctacatattctcaaactacttaaatgttgcagcattcaagttttgtgctcttgtacaggcgatgactgagaccctttccatcaatacataaatccaaatgcaggtcaaagcaaaacaaaaccaatagatgaattactactactaatactacttcattagtactttccatatcttcctcatataaacggctaaagaccaaacagatagtcctgctgatacataaagcaagccagcacctgaagctacgagccatccaacattgctatctcggcttgcaagaagtatggttagtgctgtcatctgcgtggcggttttccacttgcccaagttatttacagcaactgcctgcaagcatcaatcaacgccatttcatgattcaaaaagaagagaaacaataagaaagctcttagacaccacaatatcagagatgagatgttggtgatttacctctaaaagctttccattttgagatgcagcccattctcttactgcggacatagtaatctacaaacgtattttatacagttaaggacatgtttacttattctgcaagtgaatggtattaaggaattacaatcaattatgctataaatcttacctccctaccaatgattgcaatagaaggtacggtcaataaccatggaagtggtcctaattcagcaacttggataggttttgtacacagtaaaatcaatgtagctgcaaccataagctgaaaagccaagacatagataaatcagagatatgtgtatctagtctacatagatcactttttcaactatataaagctttggtgttaaaaagcttaaaggaagacaagtctgcacaccttatcagcaactggatccaaaaaggcaccaaacgcagaacctaacctcatctgaaatttgtacatgatcagacccgttaagattgcaatgtgaaatgcggtcgaagacacagatgatggtaaaaagaaagaaccttgcgggcaagatagccgtcaagccagtctgtaatggctgctgcaatgaaaatgcttgttgtagcagttgttccccaccaactatcaacgtaaaaggctatgagcaaaaacaaacgaatgaacaattttacataagatacaatccaaaaaaactagattagaacttaaagtagtggaaactagacgttcgataaaacgaacagaaaagcttagaatccacattagccaaagattaagtgtatctgtgtttaatgttgttttcaagcaaaaccaaaaagttgagctcaggaaacccagaatggatcatgataacttattagttcaaatactgtgacacattcgaatccaaaacaattggaggtaacaaagtaacgtacttgcgacgagaagcgggacggcggcgacacgaccaagtgttaatacggtaggcaatgtaagaactttggaagatgattgcgacggaggcggtgaagaattatcatcactatcaagctgaccgtgaccactgaaactgtttcgggaagaggaagttggtctgctttgctccgacgaagaggatgaagaaaagtaggatagacggtgttggtggcgagatatttgaatcggaaaccttagagatgtacgggaggagtaacgggaagtgataatgcaacggctaagatgcgccggaaaagaaaaggttggggatggacgtaacgtgcgccgcaaattgacatcgacgattaacgaagccagaccggatctgagcatgggcgagcttactaatttggatcgcttcgatttctgattgcaaattgaaaaaaatggtaaaaatcgaagaagatgaagtttaagggtacctgaaaagttcaaagaaattgggaaagacagtggcgactttggtggattctaaagggcaaaagtgactttaccgtaaaaactaaacaagtggatttatagttcagttaggcccaaaacaaattaatccacgattaacgacgacggtgtgacgtggactcaatagggtatataaatcccttttaatcaaacatgaaacaaatgggctctagttgatttaggcccaaaattattaatttccagtataagtttatttcaaaagaaggacaaaggtttcgagtatttgatgataagtatataaattaattaaaggatgcaataacgtcctctacaatctcggacctttttcttcgtctctctctccgacactgtagtaacttttcatcttttttttcaacttcagtcgcgtgttgtaatgatgttcaattagtagtattgcttcttgctccaccggatcttcttcttctgcgctcagccatctctttcaactatcaccgcctctattcggagagatctcgttctccaactaaggaattatgatcgccgacgccgtttctaagtctgaccacaaaaggtatcgcctttcgagcttctccattgctacattgcttatctcgttgtgtttttgtttctaatttactacatttgatggaatttgttttttgaaattgcggtttctcagttaatctctctgctctcgatttgctgagcaaaatgttgtctttttagatcactagttgagaatctagtgatcattgatcttgatttcatctatattcttagtacttagggaagttaatgaggttggttttatgaacagggatgcatatggattttctgtgaggcctcagcatgtgcaaagataccgagaatatgttaatatctacaaggttctttctatctccataacttttattttctactcggaaaattcttttacatgattgagtgcacactggcattcttaggaaaaaaggaaggtttgtctaaaatttggtgatccattaaagtagctttgttacagctgtgtgaaagatttcagaagtggacttaacttagaagtttacttagtggtcttggtttaatcaatatcgaaaggcttcatatatcataagtcattttttggttcttatatggttgacgcagtcactgtcactcgatgtttcaccttaacattctaatgctgttttttactgataaactgcaggaggaagaagtggagaggtcggcaaggtggagcaatttcctggaatttcatgcagaatctggcgtgtcacctacgaatggatcgtctgaaaatactcatgtcaatccaagtgaaagtgacaagaaaaaagaaaaggaattaaacaagggtgctgaaagaaaagatctgaatgctgacaagccaggttctgatttaactcctgggaatgcgagagaggaagatgaagttcccaatagagagaagaatgtgcacaaagttcagttatgggctgagatcaggccatctcttcaagcaattgaggacttgatgagtgtccgtgtcaaaatgaagggggattccacaaatggcgagcaagaagctcagaaattgaattccttagcctcaactgatgagaccgagtcttcaaagggagtatgtgagaatgattccgaagacgagttctatgatgcggagagatcagatccaattcaggatggttcttcagatggcacaagtgtctccagcatgtctgctgctgctgatgcagcttccctagtatctgcatgcccctggaaagacgaacttgaagttcttattcatggcggtgcacctatggctctgaggggtgaggtaataaatcctgtcattctcttttctagcattctcctgctattgatagttagttcttattatccttattttctgctcaataatctgaaaatatatatacaaatattcagctctggcaagcatttgcgggagtcaagaaacgtcgggtcaagaattattaccaaaatctattagctgcagatagtctaggaaacgacatagagcaggagctcatgcagcatacagatgagaaaggttcaagtacagaccccctctctgttgtggaaaaatggaaaggtcagatagaaaaggttagcaactgtacattacttggcatccagcattttctaactaatggtgcagtactggactcctgttgatcttggtcatttttctcagctgttgcttatttcaattacaggatttaccccggacatttccaggtcatcctgccctagatgatgatttcagaaatgctctgaggcgattgctaactgcttatgccaggcataatccctctgttggatactgtcaggtattcggttatttaatactgtcacttctgtatcctagtatggttacatgctcacaaaaatgaacatctcagttatttgttatcttgtatcaataaatcatgtgcaggcaatgaatttcttcgctgcacttttattacttctgatgcccgaagagaatgctttttggtatgttcggaaactactctctaactcctaatattgtattattgtttgtcaatgaaaatccaactctttggttctgtgtgaagttcgtgtatctatgacttccttttcttttggttgaatattaactactgttagcccattcctcaaatctcttcttaacaaacatgtaagttaactaaatattacttcggattttaaggtcgcttacaggaatcattgatgactacttccatgattattattcagaagagatgctcgagtcccaggtaaaatagtaatctttttgttacagtattttcctatcctttatggccgactagtaatctcatcataaaacattttactttccccaggttgaccaacgagttctggaggagttacttcgagagagatttcctaaattgggttagttttttcacagtcttgtttcatcttaccaaaaatttggagttggtgctaacactacttgtgatttctgtccatctgcagttcatcatctagattatcttggagtgcaggtggcttgcgttacagggccatggtttcttaccatcttcattaatatgcttccatgggaaagtggtcaggtttttagaaattggaattttaaactttacttttagaggaaaattgtttatatactcttacgttttctgaatgtcagtctcaaatatcttctttggtataacagttctcagagtgtgggatgtgcttctatttgaaggaaatcgtgttatgcttttcagaacagcactcgcattgatggaattttatggtactcggttgaacctaagtatccatatgatttaagtaataatcaatggaattgctctatactttttatgcttgccatatcaggtcctgcattggttacaaccaaggacattggagatgctgttactttgctacaatcaatgactggttcaacatttgatagcagccagctcgttttcactgcttgcatgggttaccaaaatgtacatgaaagtaaattgcaggaactaagaagcaaacacaggccagcagtaatagctgcatttgaggaaagattaaagggtcttcaagcttggagggattcaaaagacactgcaaccaaattacataattccaagcaagacccaaattctgttttagctagcaaagcctcattgtcaaatgggagtttatctcgttctgaatcgggatccagttatgcagacgacatctttattagcctgactggggattgtgagatagatatttttcaagatcttcaaggacaggtaatttgtgtcatcctttctgttgggttggagatgttgcccctaggaacttgaaagataaatatgatgggtagtaacaattaagaaagtttcttacatgaaatttatctggaccaactaataccactactatgaatataattacgcattagtgccagtaattgcaatgtcaacttataataacaacatttgcccacaacgactcgaggttctctggttgaagggtgaactccacaagttgcttcaggagaaaagatctgctttactaaggttaatctcgtatcttagtatatgactttggatattgaaatcactggtgaacttttttatatatctccttatgatccctccatcactccctgtgttattatagagctgaagagttggaggtagctctcatggagatggtcaaacaagacaatcggcgtcaacttaaggctaaggtattcccatttgttatttgaaactctgtttcctaatttagcatgtgggtgtacgttcagttgtttcttgatctatgctatcatgaataaggatgatgcttgctcctttgagatagcctgacttgttttatgctactgaacaaagtttttgggtagattgagcagttagagcaaggggtgacagagcttcgaagacttgtttctgataagagggagcaagaaagtgctatgatacaggtttgcatttgcactcttctattggaattcaaagtaaggtaattctaagaccacttgaaatttatgaaggtcttgatgcggatggagcaagaacataaagtaacagaagatgcacggagacttgctgagcaggatgcagcaacgcagagatatgctgctgaagtgcttcaggttagaaagtttgcattgactaatgactacaactattgatgaaagtgtgttgcctatctgtttaacctctattttgtgtgtgtggtcaactaagtgtctaatttatcgactgacttatctacttgctatagaaatagttatgcctattgattccttcctagaaatttggagcttactggttcttctttagtatgataccttgtggcatgtttatattatgaggatgtcatcttgttagagtttctttgtctcagtatacacttattcgaggcgacacaaaaagttatcctcagtatgataatgctaatggtgtaggaaaagtatgaagaggctgttgcagctctcgcggagatggaggagagggcagttatggcagagtccatgttggaggcgactttgcagtatcaatctggccaagttaaagcacaaccttcaccacggtctgtttctttggcatatatcaagtgaacttggtgtagaaaactagattttccattgggtgcattaagtcaccattatttttctgaaacttttcaggcaactgaagcaagatttgccggtcatggtcagtccctagaatcttatccaagtcagtcttcttctttctctcactctcatatacagtatagtcaagagttcagtgcatgtaacaattggagtttcttttcaaaaccaattgtgaatattacatctgaatctggtgctgagcattaacaaggtctctctgatctgcgattgcagaagactacatatgaaagacctaaggagcaagttaacgacgagaagtcatcaacagaaggacaaacacaaacttcatagcagaagaacacgaagctctaagacacactccgtaaggtatataattatacaaattgccgattagattgtcgagataactagtagatatattgaattacataatttctttggtaagcatatataaacaattcgttgtaagtcaaacctctgttatgacaaagagttttcaactatctatagtggaccagaagccacaaagaaacttcactatataatatatgcatcaaataaccatagtgggacatgtatctcttttattgactatcttaagcatatatgcacgaggaggattactcgagcaaagaatgtagtacaagttgtttgattcaatcataaaatgcagagagagattaggctattgcagactgtttatcgtcttcaaggtgtaatgccctaaggagccttgcccatgactctgggattccaccgggcaattcaaattccaacagcttcccgcgtttcttgtagaattcctccactggttgagtctgtgaacgaggaaaaacatataaacattgttaattctacgagaatttgaatcatggaaaaagatcgaagaagtatttttaccattttgttgtaaatcctgagtctttccttgacaacttcttcagtgtcatcagctcggcttataagcttcgattcacagtttggcggaggaagaagaggaggcatatacattctgggagtatcatcatcacctttgatatcaatgcaggcaacgttatagtttccaccacactcgctgcaaattcttcttcctaaacatttcgcaagcaatgcctcttctcgtagcttcaggttaatcaccagatcgatattagttactccctccagtatttcctagaagacaaaaaaagaaacagagctgtcaaacgaaagagtcctccattagcctgaaatctacacaagcaataaattgctcaccgcttgagtcacggtgcgtggaaaaccatcaagaatgtatccagattcacccttgtctttgccagcttggagacgctttgataacaaacttattatgaattcatcaggaactagttttccatggttaacaagctccttgagctacacccaaagcagcaaacgattaacaagcataaataggcgctcaatgattcaacctctgttctagttatagacaagagatacaaccccaaattcgctatccatcattggattctatttataccaaaaagaattctcatttcaaaggaaaaatctgatcatgttggtgacattagtgacctagcaaacaaaatgcaacatttacatcaaaaaaagtttcactgagaccaattttagaagcagactcaattttaagatgattgaacacacaattaaaaatctcaaaattgatctctatgtcttcttcactgagcatcgtgatttcaacaatcaacagctacagaaaatgaatcgagaattgagaattgtaacctgagaggagaggaggccagaggaggagagctcttcacgaacgagatcaccagtggcaatatgaggaacgccgaggagagaagagagacgagaggcataggttcctttaccaacaccaggacatccaagaaacacccagtggaaatttctgcctttgtatggagacgttgacgtagacgaagacttcccgagctgagccgcagcctcctccagatcgattttggggtctagcgaggacccagacgaagaagaagagagagacctaataaagagagaagaaaaagtattctttatcgtcgtcgtcgccggcctgaggagacggtgagaaaccgccatggagagaagaacacggtgaagaagaagaaataatgattgttttagtaggctcgtgaggaacacgtgtcatgtcttttatgtcactgtccctctctttgcttccatggctttacctattcagacataggttcctttaccaacacgatgggtttttttttcggttccggtttggtaattattttggtaactgcttagtcctgccgggtaaaacccgttggtattgggtctttttgacccgtttgggctttttccctcaattctctttttgtgttaattgaaaaattccttggccgggttctatcatctctttctccgggaacacactaaacctaagtccgatcgaaaaagcgatcacttgactcgaaatcacacgactttatctccctgaaccctaatggatcatccagaagatgaatcccacagcgagaaacaagacgacgaggtttgatttcgagattacggatttgtcttactcgatgaaattgaaactatgatctcattcttcaattcgaaaattgttttctctggttatcgcaggaagctcttgctcgtcttgaagagattaagaagtcaattgaagctaaactgactcttcgtcaaaacaatctcaatcctgaacgacctggttagtttttgttttcatggaattgagtatgtaggatttccacaatgcttctgttagtaatcgagtacctataatagccattcaggacttgagagcacacgattttacaataattcttttctagtttagaatgtgtagttttgagttgttactgatagtgagtccttccacgttacagattcagcatatcttaggactctagattctagtatcaagcggaatacagcagttattaagaagttaaagcagatcaatgaagagcagcgagaagggttgatggatgatctgcgaggtgttaaccttagcaaattcgttagtgaagctgttactgccatttgtgaggctaagctcaaaagctcagatatacaagcagctgttcaggttatgtttccctgttttgttcttttgtatctgtatttacaccttgtttcttatgttttttcatgcgactctcgtcatcaacttgtcacattgagattttcagtagttgttatctttatatttagatagtttcttaatgctttccaccacttggtatggcaaatcctctaccacagtttaggtttctgttgaacgatatcttttcctcttagtttagatgatatttgggtctcttttctgtttgtatttcttatggggcatagaaagtagcatacgacaatactctctgttcagaatttgtttctatgctgatatccatgtattttgacagatttgctcgctacttcatcagaggtataaagaattttctgccagtctaacacaagggctcttgaaagtcttctttcctggaaaatctgccgaagatttagaagctgataaaaactcaaaggccatgaaaaagcgcagtaccctaaaacttcttctggagctctactatgttggagtaatagaagatagtaacatctttatcaatattattaaggatcttaccagtgttgaacaactgaaagacagagatacgacccaaacaaatctgacacttctcaccagttttgctcggcaaggaagaatttttctggggcttcctatctctggacaagacgaagatgtaagtaggtttcaagatcaactgaagttttacttccatatttgatgagctcttgtctgtgccttccccatattttccggtacgtagctaaatgtgactaaggttttctctagtttttcaagggtctcgacgtcactgcagatcagaaaaagagttttaagaaagctttcaacacatattatgatgctcttgcagatctccttcagtctgagcacaaggttagatccttaattgtttacccatgagcttatgtgcaggaattttgatttttcttgcctgaaaaatgaaacatttcctctcccttttcttttcttttcattttgctagttttccctttctgtagtatcttcgtaatagtttttttctacagttacttctccaaatggagaaagaaaatgcaaagctggtaaatgctaaaggagagcttagtgaagacagtgcatcttcttatgaaaagctgaggaaatcatacgaccatctctatcgaaatatctcatcgtaagttgaccattcctataactcaacataggttttcctgttcttgttgggtctagctgttgtggagttaattgcacaaaggaaacgtttcatcaatgaggatattggtagcgtcgtagctttcttctcactggccattaactaaaatacctataacacatactattattgagctctcaattctttcttaatatgttcctgaagttgctgtcattgtagtttatacatatagtttcattgcttagatcttggtcatgcatcagttcatttgcaatagttttatgatgattgtgacatgtgtttaccgattcactggaaccctataatatttatgaactgaagtttggaagtgattttagatatatggcgtttctcctttcttcccacatctttggctggaatggatatctggcacaggaatatctacagtaacaatattctcatctaattcattaattatgcaatttttgtgtcctgttgcagtttggccgaagcacttgatatgcaacctcctgttatgccagaggatggtacaactaggctcacagcaggggacgaagcttcaccctctggtactgtaaaagatacatctgtcccggaacctatttgggacgacgaagacaccaagacattttacgagtgcttgcctgatctgaggtcagcttctatttatgttcataacaaacaaagatatgggaaaatgtgtagtttgcaagtggcattcagaaagcatttaattttcctagaagagtcttgactatctagttctgtattgcgtcaacttttttcttttagttttcaattgcttatgtcagatgcattgtttctctagggcatttgttccagcagtattgttgggagaagcagagcctaaatcaaatgagcaatctgctaaggcaaaagagaaactctctgtaagtggattacattctacattatattcgtcactttgctttcttaagatattgttggaagacattaattgttgttgctatgtgtgaacgtgcatggtgttcctttttgatatgtacgatgaaggacccttggtcggcaatcatcactaaattgtctaccttggaatgacataatttgcttgttgacagatttcgtgctgcgtatatgtgcattgtgaaaaacgaacttattactggagttatccctccagcgagaattgctttcttccttgcttgttatataaaaagcctacacttttgatttaatgccttgttgtgattgatcgtaggagtctagctctgaagttgttgaaaatcaacaaacaaccgaagatacaacagaggtttctgctgattctgctagtatggatgatcgatcaaatgctgagcagccaaaagagaaggaagaagtagaaaaggaaaaggctaaggatactaagaaggaaaaaggaaaagagaaggatagtgagaaaaagatggaacatgagaaggagaaaggtaagagccttgacgtggcaaacttcgaaagattgttacagcgacttccgggttgtgttagccgggatcttattgaccagttaacggtaagagtccttgaaatggttttctacttgatgttttatttgttgaacctcttttctccattgtttatatctatactttgtatttccaggtggaatattgttatttaaattccaagacaaacagaaaaaaacttgtcaaagcgttatttaatgtccctaggacatctctggagttgctagcatactattcgcgtatggttgcaacactagcatcgtgcatgaaggacatcccgtctatgcttgtgcagatgttggaagacgagtttaattctctggtccataaaaaggttagtaatgaattttaccttcaatacatttgattatgactgcagttttaacctttgagcatactgaagtcaattcactctactgatgcgaatacctatgttctcagtttcgctcccaacattcccttataaacggtgttcaaatgtagtgatccgtctgatgtagttgcaaatttaatttcttgcaggaccaaatgaatattgaaacaaaaatccgaaacatcagatttattggagaactctgcaagtttaaaattgtacctgctggtcttgtattcagttgtttgaaggtataaccgcacaacccaatatgcattctatagagatgtttattttcttgaatttctgaacttatgctaggtgagtttcaattaatagggtaagtaactttcacttgaatcctcttaccagatatcaaaatgtaattgtatggggacagattatatcctctctggtgaaacttgaaccatccaattttataaaatgttcacttcctaattttttttattgcaggcttgcttagatgaatttactcaccataacattgatgttgcttgcaatcttctggagacatgtggccgtttcctttatcggtctcctgaaaccacactcaggatgacaaatatgctggacatattgatgcgcctgaaaaatgtcaagaatttagatcctcgtcaaagcactcttgtggaaaatgcctactacttgtgtaaacctcctgaaagatcagcaagaatttctaaagttcgtccaccattgcatcaggtacttactaatctccaacttccatatcttttatgtttcaataattttccattgcgcaattgtattgaaatttgttattcttatacttctgttcaaatttctgcagtatgttcgaaaattgctattctctgatcttgataaagattccattgcaaacgtactgaagcaactgcggaagctgccatggagtgaatgtgagcaatacatcttaaagtgctttatgaaggttcacaagggaaagtatggtcagattcacttaattgcttccttgacttctggtttgagccgccatcatgatgagtttgtggtggctgttgttgatgaggtatgttccttccactatatctaatagactaatacatatggcttttcatttttagctctctggacctgtaaatccgtaagttcagaaaaatcaaaagtttccgggttttactgtagaaaattactctggtcatgggtttttgcgtacagttggttcccaaaagttagatagctattacttcagatggtgttgcataaatggcttctccctggctctcgggaaaactattctgatttcccctctccagtttgaagaattgaatcatgtacaaagtttgattgttttaaagatatgtagcttgttctcttccctgtggagttataactaaaagtagtgctaaatttgtaggcaattggtgatttattatgtgcagtagtgaaaaggtctaagatgataaacttccttcttttagtcaatagaaatgaaaattgccgtcaagttgaaatggtaatgtttcttatgtgaagtctaaaagaagctttctgttgaaaatggttagagaaacatgcctataggtttcgattccatgttgtttgaaatcagaaaagtgtatggaaatattctagcatcataaaatttgatgtttggtgtattttgtttcttggttatgccgtctcatgaatttacatgcttgacttaaattttatgtatagcttttgcagacttaattcatctcacactttctttgaaggtattgcatgttgtccaagcttagtatcacatctgttttctgaagtaacgtggtacattcttttcacttgaaggtactggaggagataagggttgggcttgagttgaatgaatatggggcacaacagaagcggctagcccatatgagattcttaggggagctgtacaactatgagcacgtagattcatctgtgatattcgagacactttatttaactcttttatatggtcatgatacttcagaggtacgttagcctaacactcttcaagagctaatcctttattaaattataaatggtcctctttgtgtggtttagcataaaaattataatcataagtctcttctcgtgtttaccaaaaaaaatgtctcttctcgtgttactttcttttatacattcctcatgatatacagatttaggatcattgctttacgattaattctcactccttcttttccactgaattgctgttgtatatacttttatgatgttagcaagaggtgctggatccaccagaagattttttccgtgtcaggatggttatcattcttctggaaacctgtgggcactactttgatcgaggttcttcaaagaaaaggcttgatcaatttttaatacacttccagagatacatcctgagcaagggccaccttccactggatattgaatttgacttgcaggttagtcttgtgttttattatagtggacatgagattggatttttttagtagaaattatccaattttcacttaagggttcagtgtatctgtaacaaataatgtgtcttaacttcttctcaacgcaggatctatttgccaatttgagacctaatatgactcgttactcaaccattgatgaggtcaatgccgctatacttcagctggaagagcgtgaacatgcttcttcaggagacaaagtcagtatagaaagacactcagatacaaagccttcaaacaagtcgtcttctgatgttatctcttctaacgggaaaagtactgccaaagatattagagagaatggagaagctcacggagaagaaagcgacagcgattctggtagtggctccgtggttcgtgatggacagaacgaagagttggatgatggaaatcatgagcggggatctgagagtggtgatggggatgattatgatgatggcgatggacctggatctgatgatgataaatttcgtgtaaggcaaaaggtggtaaccgtagatcttgaggaacaagcggacttcgatcaagaactgaaggccttacttcaggcaagttcagaatccgtctttttttgtttatgtagattgatgcatctattttctctaatttagtttggtggaaaaaccagtttacactgatgcaagagggaagttatttttcggaatttgaacatgattaagtactgatatgttttgtggatgcaggagagcatggagcaaaggaagctagaattacgaggtagaccggcattgaacatgacaataccgatgagtgtttttgaaggatctggaaaagatcatcatcattttgggcgggtagtaggtgaaaacggtgaagaagtgttggatgaagagaatggagagcaaagagaggttcaagtgaaggtcctagtgaagagaggaaacaaacaacaaacaaggcaaatgctaatcccgagtgattgtgctctagtgcagagcacaaaacagaaagaagctgcagaattggaagagaaacaagacataaagaggttagtactcgagtacaatgagagggatgaagaggaagcaaatgggttaggaacacagatattgaattggacttctggaggaagcagaggatccactcgaaccggggaaggcagtgggaagagtggtgggtctcgtcaccggttttattatcatcaaggaggtggtggttcgtatcatgcccgacgaaagtaacttcatccggtttagggggaaaatttgataatcttgcctgtgtcaaaagcggtaatagttggctttttgctacggctgaaaaggacaattcacaagaaatctcatgagtttctgtgacaaaagttgatgtattcgacttcacattctgtagtgttggttaagtaaatctctgtgtgtgaccctttttgtccagcttggttaaatcttgcatttaatgattatttagcatcattctcatgtgaaaaaaaaaaagaagaagaagaagaagaaattactaagtaaggaaagagaatgatgacgagaagaaaactttttaagatttggtcttaccatatacggaaaggccagatttagtgtgcagaggacggattaataaagattccttaacaaatctagtttttgtactttcatcaaatcatgagaaaatggacggttgagatatgcacacgaacttatcatccaacgtttctaaattattgatatctaggtgtccatataaacatgtacttggtgattgctgaattgtttatacaaacgaatgacataataagtcacactctctcttcattaaggtttctaattctacctctctctcccctccacatacaaaagtggtagttggctttattggaccgacgcttaggtccccaacacgttccatttcactccattattgtattcattgacatatctattcaaaaagagattttgtatggtttttattgtggtgcagaaaaattgatacccgatttggtctaccaaaataattttcctcataatgcattcatgttcgggtgtccccactcgtgatataaattcataattttctcaatctgtaagtaatattcgaaaagagtaatagtttatacaaattacattgtgatagtattattagactattagtaaagaatatacacacacatatatactattcatattcccgtatatcaaattttcagtagtcatatattcatacgaacgcgtacttactattcagactatatatacacgaatctccgaatatcttgaaaacgtataagaccgagctagtaatagatattggctaagatatattttgggtaagtcgttcttatattttttcgagatgttcggaaattggtttatacacatgtttaaatataggaaaaagaaaaaaaataacgcaatcaataaattaataaatagagatgtctgaaaagtagccaaaaactaataaatcagtgtgtagacaatcgcactgaacaacacgtcccacgttctttttcttccctgttttagatagactcttagagtctctctagagtcaccggaacaatcacaaaagcgacgacatattactcattcctacaaatactcatgttggacctcaacctcggaatcttgtcgacacacaacgaagatgaagattgcaaagtaccaacttccatcttcattcaagaagaagattccattaatccctcaaacgacaacttgtctttgattacatttggaatccttaaacgaaacgtcgaaatccttcctcctccccctcctcctcctcctcctcctcctccttcggaaaatgaactctccggccccggaaatgagtggttggatctttcgtcgatgcaaagaaataaacaagaaacgttggtgatgaagaaaaaaagtcgacgtggcccaagatcaagaagctctcattatcgtggcgttaccttttaccgtcgaaccggccgttgggaatctcatatttggtattcattcataaactttaagttataaaatatattttaattagttttgagattaacacttggttttgggatttatgtgtagggactgtggaaaacaagtttatttgggtaattagatgagattttctatttctcttactattatattaaggtttaaaaccttcttggataagagaattctgaaaagagtaaaccaaatgatgaaagattttcactttttcagttttgtcttttgtttggttaaaaacaggtggtttcgacacagcctacacagccgcaaggtgtaagaaatagtaacagatgttacatgacataacattcgtcctttcaaaaattcttcattttttcttttttggacattttagtttatatctttagagaaatattagttgacttatatattcaaatacatatcagagcgtacgaccgagctgctatcagattccggggactccaagcagatatcaactttatcgtggatgattacaaacaagacattgaaaaggttttttttttcatataacttattgcttcctataaagagacagagaagttggacgttcgaatactataatatggatattttgaatgatgtggtagatgaagaatttaagcaaagaagagtttgtgcaatctcttagacgagcgagtgcaagcttagcaagaggaggttctaaatacaaaaacacccatatgagaaatgatcacatccatctcttccaaaacaggttcgattcgttactcttctcgcgggtacaatttcattcactattaaccgtgaccagttgattcctatcgcgtatatgattcacacatataatgcatacgatttgtaaaagtgtttgtatgaatactcataggggattgaatgcagcagcagcaaaatgcaatgagataagaaagatggaaggggatattaagttgggtgcccatagtaaaggtactttataaatgtagggtcacggctgtaaatatacatactaaatcattgttatcatttaggtgaaagctaaaaaccctaaccacaacttcactttgacacatgttgcacacctttgatttgatcaaccaaaccctagctagctagccttacctttcagaatcattctcgttcaaaattcaatgcatattagtttatagattttaatcaattttttttttttttttgaaagatttaaactttaatgcacaacgacaacagtaacacaaaccactaaactatatcttattcaacttgatcaatattttaatttaagacattacgacatgatttacgaaaagcttttaacgttttcaggaaatgagcacaacgatctcgagctaagtcttgggatatcttcatcgtcaaaagttagaattttggaaccagcagattattacatgggtttgaatcgatcggtgacgagtttgcatgggaagccgttgccgggatatctaccgatcacagaaattaaaccgttaaagacagttgtagcatcatcaggattccctttcattaccatgatcaatccttcttctttgtccttatcttgttttgatccatgaggtgatcactatttacttttaaaattttcccctttttattgataatctattgaatgacggaatgattatgtgacttatatctttttataaaccatattcttgtggaatcaggaattttgtgccaataaaaaaagacaaagaaccatcatgtactatgttgtcaacgatgataattcccaagtgtgtgaaagttatagtgtaagtactagtgagtactcgtgaggttagtaacataagacacgtgcataattgcaaacaaacaactttgccgaaaatttgtacaatggttaagaaaagaaaagagagtattgaatgatcaaagaaaaggagatgaatgggacacgtcgtcgtttgtaattaaagtacaatgtcgtattgggtcgtataatatccgcttgcttcaccacattcacttatttcttatccccacttttccaacttttcgaccctttttttttgggatttcaataaataaactaacaaaacagaagatagagaaaatttactatccttacattgcaattttatacctaaataacccaaaacagtggaagagacgaaaaaaaaaggtgtgaaatcttgtggtgttgccatttgccaatgcttttgcttcgatgtgccacactcaatccaagcgagcaagggtaataagacctaaagtggcctcgacctttgttttcttgggccttagccgtaggcccaaacttctctcgagtcgttcatggagatccatcagggacacgtgccattagtctgtttagttataaatttttatgtatagtttgcatttaggttagtttggaattagattaatggtataattaatttatgttatatataatgttaatttttgagggcctcgcgggatccattcgaacttcctctgccgacaaaaaagaaaagaagaagacgacgtttatatgtgtatctccccagctaagtggaatcagagcgtgtaaaaattattcatcggtgcgagttctctctaacctttgtttgtttgttcatggtgggctctggtttcctcttttagaagaaaattgttagggcgagaagaaaaaaattgaatatagaatgaatatctctttttaagggtttatggttttgctgctctaaccttggattttagtgtattgtttttgttcttcagtagttgaaatttcgaagcactagcataagagaatgggagcagaagaagtggagactgctgacttaagcgacaaagctttggtgtctgccattagagaggtccttgcatctgcccaaagtgtgagtcttgcataaatgttgcttcttccacatgttcacatatgtttctctgtgtgtgtgttctttaaaattaaaagtatttgtcttttgctaaatccagggggataccgatcaatataatgagcttgttcagttaatgtacatcaaaaagaagaaatctggtgacgatgctatggcacagccagaggtgcctgatgatgtcgatgttgtggctcagcgagaggtgtgtcttatgacaaatccattctttctttttttcggttgttgctaactaagacaatcttcatttctcattcgctttgcagacactcttgaaaattctatcacactctgttgcttgcttagatgacgttcaccataaccaccttcttcaacttgtaacttttatttatctatctatctattacacacacataccttaattaccttcctctgactaatttcatcacattctattgtctttagattcttggaacgagaatttgggatcacaaacctaatgtaatatatgcattgctggacttaatcatatcactggtattataacagctcagcaactatgtacctctctcatatcatcatcaaccatatatattatctgcttacggagcttaacagcttttgtgcttttgttgttttccatctctaggccactactagtggaaagcatctgagctcttgtttagatacgctcgtctctaatttacgttcgcaaccccgcaaactcgacaataagatgctggaagttctttccagggtgcacgcagctcttcacaagatttcttatttagttccccttgctccctctatattactgcccatactcgcccagagtatgcctagcgtacacgacaaagctcgcgtatgttttttattctgttaaaatcaatgtaacagctgtcccatacatgtggttaacgaaatgacaaaactattttattgtcttgcagttgcaggttgtagtgccatatgtgaagaacttgttgaagttggagaacagctcaatcatcggaaaagttgttggcaaggatattcttatgatggtgatggggaggttccgagatctcgatgtaagtggacggaacgaataattgtattttccatacaagtatagtactatagttagttgatgatatgcttgatcatctttgtagtcggagattgagtgcgatgataatctccaaaatgactccagtctagcaatgtttgatatggaacttgacgttgcagttgaaggcactctagtttctaaattgttggacgatttaatggtcgaatcttttaatcatcttaaatcttgtcaagatgctggtcgtctggatgaggtatgtcaccaaatggtgcttcatcaacagatatatctttcgtttcattacctttgtggtagatgcattcatcttttcgggctctgttattcatggttttggcgcaggtgtttgaaaatctcttcgagtcgtttgagaacttaattctgaacacgcaaaaattaaaattttcacaggtatgcaccgtttttataacacatagtgtataatatttgtcattttacttcattgttggcatgagatatcttggcttatactcattttgctctcctctgcagttcctgatgttctatgcgtgctcactagatcctgaaaattgtggtgtgaagtttgccagtaagctgttggaaaaatttctctccagcaacaacaatcaagttactaggtgggtttcatgcttatccttcatggtaaaaatatctctgcacgatatcaagctaatattgttctctactcaccagactcaccgcttgtatatggttttgttttctcctcttactaagcaggacgaatgcagtgacatatctagctagctacttggctcgtgcaaattttttgtctgcttcttttgtggctagcatgttaaaaaggtagaaagagactgctagaaaaactggcaaaagatgattgttttgaattcaagtttcactttgttgtaacattgtttctcttgtgtctgaaatcctagattggtggatgagtgtgctgattattgcagaacatgcaatgatgatgctaggcctgaagtacaccaagttttctattcaggatgtcaggtaaatatagtccaagtttagaaccatcttattgcttttcttttcattaaggattcttttgtgagtgatacacacaattatgtcaagtaatgactttaatttgttacttctgtgactgtaggccattttatacgtgctatgctttcgaatgagatcaatcctagaggttcctcacttccaatcacagcttacaccattggagtcagttttgtctcacaaactagacccgctgagggtaacttaaactatcatctttttccccaatagctcatcaagtggtctgaaccaaagtatcaaatgcattaagctggcaccaactttttttttgtatgtaaacaggtatgcctttcatctgtagtttctgagttccttatacaagccaaagcctgtggcctgttcattgtctccgacgccttcatttttgatgacctatccgagtctgagctctctcgtgctttaggtggcttcttcccattcccgtggttgttggaaaaatctaacaggttcactatcttaacctcttgtttaatgcaaattctcgtgcatatgatgatgtggaaagtagttgcattgcataattgttaatttctcctcacccgtttgtttgtcaaatcagcttaatctctccgcacttcatcaaacggtcagaggtgaaaaagacttacgagcaagcggaagtgacagtgtatggagatacagacaatgaggaggactctgatgatgacgttgatcctgataacgagatgaacaagatgtctataactcctaaacactcagtcatgcacgaaacagagagactcctgaagatgccttcgaggatcagtccatcaactagtcctcgtgaatccctctgattctagtggagaggaggcaattttgcaagctagggatacaatctttttatgagaaaaaaaacattattggacttgattttgtatgcaagttttgaaaacttttcgcatcagtcgaagttagaaatagatcgaagactgaagttaaaatggtttatgccattgtataggcgcaatgtatatttacaacagagacccgtatatacactaatacccatctaagcccatagtttacctctggtgcagtcttttgaattagtggaagacacatttgagaggtatcttgttcaagatctagttcggtttagtacaacaaacaaagattgtcacgcttacatctacaagcgcttgcggtgtatggcactggaatcattcataagaacagagagcaatcagatcatgaagacggcgtccggaagtgttatcaataccagaggacaaaatcctgctcccataaatagattttactgaaaagggtgatgacaatctccttttgtatgtcttccaaagatcaaaaggcttgagaaacattgattgtttagtagctcgatctcatctcaggagaagccaagctactaatcttggatgcagcaggaggtttctcaactcttccactcacgagtaaattgaatacagtatcatcatgtacaatacctttctcaagcatctcatcatgaagtctaaaagcctcattgagatttccttctctatgatgtcctgcaataacagtactgtatagaagcacatttggagtcacatctttcttcttcatctcctctaacatcttgctagctttcaaaaactgtcccttcttactaagaccgttgacaagtaccatgtgcaagatttcatcagggacaatacctaaatcaagcaactccgagtacaaatcagaggcaagatttatatttccatcttttaacaacccgtcgatcatcgttgtatatgtaaacagatcacaacttattccatcattcaccattttcttgtacaagtcaatcgctgcatccatctttcccagattacggaatcctgaaatcaaactattgtagacagacacatttggcatcaatcctagttccggcagttcagagaacaaagtatatgcggttttcatgtcattctttttacagaacccgtctattagtgcaccgtaggctggaagatcaagtttcaactccatgcttttcatttcgtgtgtcatttcaagagctagatccattcggttacttttgcagaatccattgatcaagctggtgaaggttacaacatttggagatttaccgttttcactcatctctctgtaagtttcgacagcggaatcagtatcacctactttgacgaatccatctatgatgctattgtaactcgtgcaactcatggaatagcgcttttctttgatcaaattttgcaacatctctttggctttagacgtctgaccaactttacacaaaccattgatgatcgtattatatatgacttcattagcttcgaaattggaagcattcatctgattgatgacatcccaagcattctgttcatccttattcttgaaaaatccatcgatcaagatggaataagtgaagttattcggctctagacccttttccagcatttcagaaaatattgaacgagccaagtccatgtttttcattctgcaatgagcaagcatcatgttattgtaaaaaactacattcggctcaatccctttttgctccatcatcttcaaaaagcttgttgcagcatcgactttaccttgcttgcaaaacaataaaaaaatcttgttacacataaaaccatgcgcaatccagctttcaaaactgtcgttaaagatttctagcgccgcttctggtgactcagctttcaaacacccttggatcattgtatggacaagaacagatgaaggagcaatccttacagatttcatcctcatataaaactcaatagctttctccatctccatattcttacaaaaccattcgaccataaccgaaaacataactttgtccggagccagcccttcctcctccattctattaaacaaatccaaagccttacctaactcattccccttgcaatatccattaaccaaactcgttgcagcaattacactcatcggtatcccaaaaccaaccatctcatccataaccctcactgcctcctccatattaccttccttcacaaaagccacaatcacactagtatacgtttcctgcgaggccgggacacctaacttccccctcatttccctcaacaaatccaaagccataaccaaatctggcgtcttacaagcagcttgaacagcaagactaaacaacaaaccatctggttctgctcctctactcataactctcctgaaaattttcacagcctcttcaggcttcctctctctcaaactagctcgcatcaacaactgtgtagttacattatcaccagcaacaccaattaaaaccatcttattataaatctccttagcttcatctatcaaattacttctaactaaagaacttagaacattgttcacatatggcacaaaaggaacaacctttcgatccaccatcaaaccaaagcaatctacagcataatccattcgcttgtttcgaatataagcattcaacaagtaattgaaagctcgtggggtaagttcaaaaccaaaccgtttagacgaatcaaccaaattgttaaccattacgtttggaattagcgttggattgttcgaaacgaacattacgagcaaattgctggcacgatcgtgagtgtgaatagagcttagaaggatatgaataagtacccagaagacatctccaccttcacagagacgatgtaaaggcttgacccaattgcagtactgaagagctgagactgggtcgtttctacgacctagaagcacttcgattacacgagcgtcgtccacatgattctcagtctcagaggttgaagttaaaggtgaatgatttggtacagaggttttatgaggaaattctagtgttgagatggtttcagtagtggaatcggaaatgtctcgactttgattatccggtggatggagaaatcgagtctgtgaagaaatgggttttggatttataaaacgatggagaaaaataggtggacgaaatcgtttggaaaccatgaaagtagtcattttttgttctcagctagcttcagcttgtagagaagaggatcggagaagaagaacacgaaagtctctctaaagtctaaaacccttctctaaacggcgtcatttagttcagccttaaaccctgtagtctaaaaagtctcggcaccaaaactgcgtcgttttcgtttacttttctttcgctacttgatgtcgatgcattctcaatttctcatgtgtacactgtaacagtacagttaacaaaataaatttgttactattattaaatgtgtttttgtaacagtataatagcataaatgactgatacattgacacaacagtataaattcaactcccactaaagaagatgataaatcaaagaccaaatcatggaaaaagccaagcaaaacataaaaaggtgaaaaaaatagtatttcattcatactttagattggatattacatgaggacggtgaagataaatcggtcaatggccaaaagctttatggataatagtggtatacatgtcttattactgtgttggcgttttatgtgccatcttttttattttcttatatatctccactaggtatgttacttcttttcggtttcagagttgtcgattctggtcgggatcggtttacttttacatagagagtcataataatacccaaaattgactcttggtcttgttatatcactgcagaattacataatattccatgtaaaacatttaggtattattaagaaaacattttaggtataaaagattgggcttattagaatagtagacactttttaaaaagtaatttgagaagtaggtagttttttttgaaatttgtgaaatagacactttttttactttttgtgaaatagagattatgtgtaataagctaaaagacaaaaaaatatgtcaaataccactttaccctttactttatatgaaaaaatatgggtcaaactttttatattatttaactatttagacctatttttattatattatagttatttttttcatattcatctttttgaattttataaaaataaattattttataaaaaataatttctttttccaaaaacaagatgatttatatgtttttaattataattctcgtacaccagcattaaaacatagttttgtatactaacacttatacatcaaatcattttatacatatgttctaaaatatttctatttatctcatatttataaaataaaataataattgttcataaattaataaaaatataatggtgtacaccatcacgtatactattaaattaaccataatggtgtataccattaaatgaaagtaatgattatacatttttacttatgtacactaacatttgtacacttttatgtacactaatctcatattattattatttaaactttgttttgtatattatcacttgacgaaaatggttttatcttttgaatatgaggtgtacacaataggtgaaggtgtacgatattatagacggtgtagaaggtgatttatggtttgatttattatctcattattgcatgtatactattaatatcatgtacaccatattttacattttcgtacaccatcttattatgtagttgtacatcgttgtatattatcgtttgtacatcactttgtacactgtctataccgtataccacttcttagaacaatattatacattatcgttgtacactattatttgtacaccattttttacaatatagcaaaatatagcaaaattattatcaaaataaaagtattatatatttgtaaaatatagcaaaattagactttttagattcagaaaaaaatttaaaagattaatatatattttatggtaattatttaataaagaattcataacaaaacaaactaaatatatataagtaaagagaagaagaaacaaaagttatttttatctttatttgactatatgacaaaataacagaaggttataaaagttattcactaaaatctctattagatagaaagttgtattagagaggaaagagaaaagtgtctattctccctatttctaaaaaaactacctactttgcaaattatttgtgaaaaaagtgtctagtttccaacttatctctaaaagatttgatagcctatagtggctttagttcctccttgtcattcccagctgtgtatatatattaacccatggatgggtgattaaatggtgatatagtttacgactaaactagaagacaacagaaaaagatgcagatttggagttggcgacaaacatagataactaaatggttataaaagaaaaagagagaagaaaatcgaataaggccaataatatataaagtggggatgggaataaacatttttatatttgtcttctattcccttcttgtccgtatcaaattatcaatcttcaaacacaataagtatatgttattgttaaaacaagtaacgagcaacataaaattagatatttgtaactttttgtacaacataaaatttggattatcctttactcgttttactttttttgtatgcttatccgtttatcgtttttttctaaattacttgtatagttatttttactatcttaccaatgtaacaagaaaaaagttatactacatgcagagactaaacaaaagaaatttaaaaattaggtatatataccacgagtgagagtaccccttccttatctcataccacgagtcccattcgatatatgatctcacgtaatgaaacgggacaaataacatgcaagtagacaatttgttaacgtgtatataaaatctcgaaatagccgttttgaacaagttaaatacggatagacaaaatttattactcaactaagttaagtaacaaacccaaaatcacgggcaaagtaaaccacactcttatattatgcttaaaataaagaagatcccatatttgtttggcaaatagatcatcaatgtagtcgaagggctccacgcgcagcgacaaaaacggaacaagaaagaagaaaaaatcaaaagattcaaaaacctttcttcatctttattaacatcaactattcagatttgtgtaagacaaaagaaagaagcgaagattacggggaccaacagtgacgtggacctctccccgtcggtgcccataccaccaactttactactccagtactggtcacttgcttgttcgaattaaccaaatccaattattcgtaactatgtttcagattgttggctaactgatgatcaatcctacaataatacttaaaacgtttattagtatattgtttggaagatggtataacaattcattggttactgatgcttgttgccaaaaaaaaaaaaaggaaaaagaaatgattaaacgcttgcatctgtttgatttggactccatagattcctttatatagtcaactataatcaatacacgtgaatcatttcgtcatttgattactgttgagacaagagtcaattaccaccaaacatattattttaaaacattaaagttccgataacttcgggtgatggccgcaaatttgagttttggtttgatattgtatatggtattatggtttgagttaacattattattattgtatcatcaattcatcatccgaatttagacctacataataaatgcaagatgttatatacaagaaattccaactgccacaatatagaaaaagagcagcaaattttatttttttctcattggctttcataaatgttacttaataagacacaagacgttgggaaggactgaatgactttactgatatgttttcatgctaccaaatttcgtttttcatcattctaccatatcaatttcgaagtagaggaataatgtcgtgcacaaccaagtctcggtcccagctaccattttcttcaatgaacaccgcaacacgtaaacgcaagtgataccgcaacctagctaatgaagttttggttaacatgaactcgcactatatgacttccaaatcttttgtcttcaactcttttttaccaaagattcaaaaccgtaggctcttactctataaagctagaccttgtcatttttaatgatattacacagaacaaaaaaaaaaatataaatccaaacctaaaatcacaacccaactccgaagataataaacggcattgaaaatcacacaacaaccttaaaggctataatcgtcactgaatgttacataccgactctgaatataacataacttataggatactaaaattatgtcaattcagatgtaaagttgtatcaatttattgaaaatactagctactatatgaaaaagtttagaaatgtattggggaattaagttttccgaaagagagtgtttaactaatattgcctcaactcgttttatgaattttcaaattttagtcatgtggatatggaaatggaatagaactgaaatacattcttctaatcaatcataatccatacaaatctgtatttttactcatttgtatttaaatgtaacaaccacatacataatcccaccttaagtacatgattaaggaatgacttttcagcaaaacacacctcaaaattctcaaattcttgtcagttcaataaaacaatttccttgaattattgtcagacacttaaaagatttgtatgcatgtaactgctggtcccgtattaatatttattgcttcattccttattactaagcaacaaaagtcacgcgtgagatataaaagaagatcctttgcagtttctctgttcttgctccttcttcttcatctccctttattgatactgtctgagtaataataaaaattcactctttttgtcttctcaagacagatttcaaaatagaaatcattctccttttttctttttgaaaatttcgagtgatttaaggagggaaaataaagacagaaacaagaacaaaagcatcgtttgcgaataagacttctcgtactctgttttcttttctcgtgttcttatgacagatttataaaaaagattaggtttttgtcttgtcttggcgataatgcctagagagtgttttaaagatttgatttaaatactcttttatgttaactacgatgcaaagagtacacaacaaaccgattgattctatcggaggttttaagcatttggtaaaacagagtaacggcggtgacggtggagtgacggcgacggatatgcaagaaccgagcatcgagactgataagcttagctacgagattttctctattctcgaaagcaagtttcttttcgggtatgatgatgacctgaagcttatggaatcaagaagcagagacccgagtccagagcaagaaacggcatcaccggcgatggtggaagctttaaacggcgttgttccgggtacagttaagaaccagagaggtaaagtttgtgttttgagtatcgatagtggtggaatgagagggattatacctggaaaagctttggcttatctggaacatgctctgaaatcgaaatcgggtgacccgaatgctcgaatcgctgattacttcgacgtagcttccggttccggtatcggtgggattttcacggcgatgctttttgcgtcgagcgatggtaaccgtccgatcttcaaagcggaagacacgtggcggtttttagctatgaaaggtaaaagcttttacaacaaatcaccaccggggatactaaacagggttatgaaaaccgggtcgggtggttcgggtgggtcaggttcgaagcttgagaaagcgatgaaggagtctttcgaagagcttacgcttaaggatacgcttaaaccggttttgattccttgttacgacctcacgagctctgcaccgttcttgttctcacgtgctgatgcgttggaaacggacggttatgattttaagctgtgggaagtttgtagagctacttgggctgagccaggagtgtttgagccggtggagatgagatcagttgatggtaagacacggtgtgtagctgttgatggtggtttagcaatgagtaatccaacggctgcagcgattactcatgtgttgcataataagcaagagtttccttttgttagaggtgttgaggatttgcttgtgttgtcacttggtacgggacagttggttgatgttaagtatgattgtgataaggttatgaagtggaaggctaagcattgggctcgacctgcggttcggatttctgctgatggagcagctgatactgtggatcaggctgtttccatggcgtttggtcagtgtaggaggagtaactacgtccgtattcaggtaaatgcttattattagtgcatgggagtgtgaggctcttattagactagttatgtgaagttgaatcttgatattgatactagaactttttgtttgtgtggttttataggcgaatggatcaagctttggtccgtgcaaaccaaacatagacacagatgcgagtccaagcaatgtgaatatgcttgtgggagtagcagaggagatgctgaagcagaagaatgcagagtctgttctgtttggtggtaagaaaatcaatgaagaaagcaattatgagaagctggattggttagccggtgaactagtgctagaacaccagaggaggagttgtagaatcgctcccactgtagcgttcaagcaatccggcgacagaagagtcgatcaacagaccattttcaaggatattgattgtatgttttgaatatttttaaattgtatagatttgtgtttaagtccagaagaaagcaacattatattcgaattaggctttttattaaatcttaaagatatgtgtaatttttgttttactgaattgttattttctattgactctaaaagagcttcgtcaacaaaattttggaatgcagagagcgtcaaggctaatcaacaaaacaagtttagcctaattaccttgactcacaaagattaacacatttcttaaacaagaagatagttgccaacttacctttaaggacccttttagtctctgtttgttacagagtcattgattctgcaaaacatcatatgatgcatttcaattttttccttttgtagattaatgaaaaaatttattgatacgaattttctcatattcagaagcaaattcttcatttggaattttctaaaaaggaaaagatgtgcaatgagaccaaatctctttggagatttaatttgattggagaccaaaactctttttgtaatgatgtgatttaacgtaagttcaaagatgtgaacttgggaccgtaatgaatagaacgtatcaagaaggcggttatgaaatcatattcattggcgctccaataaaagtcactttcttgattccgggtaattccgggtagtgacacaacaacgaatattattacaaattgacaatccactctatgtcttaatctagtaagtattattttattactacaaactggagcttgacaaaacttaccaaaaaagaaaaaaaaaaattggagcttgacaaacaaaaaaagatgactacaaattggaaagttcgaaggccaaaaaaaaaaagcaagtgttgtcgccgtttttgtgcccgtgcatggacaaatgaccagtgcagggaacgttgtttttttttttttttaaatcaaaacagggaacgttgtatatatgtgtaatgtgttggttaggtctcatggtgaccaacacattatacattttgttttagaagttctcctagtctaaatgttgatgagcaatgaattaaaagaaaatttagagtaaacaaaagaccgtacgaagattgtagactcaaagtttcttaacctataacaactgtatttgatagttgaattcgtcaaatcggtaacagtaaatcattgttttcaaaatgttagattttctacgactgaaagatgttgaaatgggtaaagaaaaagaaaagtacttgctttgttgacaaaatgggtatatttatccatattgtcaattatgattccaaaaacgtcagatatggtttaaagaaaaagatgtatgtaaatctttcaacaaatctattaaatcctctcacagttgaatattatatgggtctttatctgaaagtaagtgggaaactaaatggtatgtacaagacaagggaaaagaaaacaccataactttagtagagcttggatcattttttttgacatagagtttggatcatatgtatttaatattcgcaatatacaatagtagttgtggatgtggatattgatgaggtggaattcttaggacacataatacctaggccatgaatgtttgtagtttttaaaatggtttttggattttggattttggtttttggtttttagtttttgattttcttggtttttgtttttggtgtagattttagtttctggtaatttgtttagattttggtttttatgttaatggatagtattttttttacaaaacaaatctaaaaataaaataaaaaatgtgatcgattgtttttgagagagaaactcccaaaacatagattttggttttctttgaaaaattgttaaaacactcaaaaactagattcctatattttagaaaaacttgttttttcaaaatcttgaatggctacaaaatagattttagaaaaaattaaaaccaaaaactagtttaaaaaccacacccattcaaggccctaatctccaaacacaaaactgaaaaacatcatgtaaactgttaaacatatgaagtaaaaaaagaaaaaacaatatatgcaataatatacaacggacgtgtgttaatttactgactgtttgttgattttgagttggaaagctcataaaaattgacattgtatcaaagctcatatcatggactcaagtaagatatattgccaatctttggaatagactcgcttcgaggcagaacgaaccatcatttggtgacgttttaggaagcacatatctaaaataaaaaagaaacttatatctaaaagatatgagacaattcattcactcttaattggtttggagttggaaaatccatgagctttcacaaacatttcctgaaaatacatgcgacaaccaaagatgcatatcatcaatgttgcaaattaaatagcaaaacattaagtaaacatagaaaaactcaaatatttaaacagtttgtatacaaaaattatatggaaattgtaggattaccgatcctagggatgatagattgcagtggctaaataagaaaattgagggtgaatgagttatctatgaaccaaaagaaaattaaaaaccaaaaatataatcaatagatttgggttagaaagacaatagatttgggtgagagatgctcgtttacgaacgactacatatgacactgtgaagtataccgcacggttttgcggatcaaactgctgctccacatattatgtacgtaattttgtagttggtttatatcctaaagagttgcgagattagtttgatccagcttaaaaataggtgatattgaacttaagaaatatgtggtcgataaccacaagtaaaatttactaaaaccactatatattatttatagagaacacaccattaccaattctgatgctcatccaagattaggtatcatgaaactgcttggatataaatgcgaaaaccaaagctgtaaataatgaataatgcaacatatatatacaatttatgcgaaaacatcaagaaaacatagcaaagaagagaaatctaacatgcacctagctaagctttatatacaaaaaggacaaaaaatggtaggaacaaaagttgatcgaccctaaggatgataaggtgtaaatgcaaggtatagaggatcggtggagaatgagttatctattaagcaacgaaaaaaacataaccttaaaaaagtcaatacattcaggttaaaaagtcaacatgttcatgtgttgttcaagggaaatgaacctcatatagtcataagtaaatctttatttatcattttctgtcgccatacttaagtctctattatagacgtgctttatcatcgtctatcgtcatatttatcatcgtctatcgtcatatttaagacgttctttcacactgcacgtcttcaactttttttatgtggtatacgaacaaaagacacttaattattcgttatagaaataaggttatcaaacctatacattgatcccggcccgtaggccctgactgaccaattaagaaaaaaacaatatattggaccgactattcaacgaaagcaaagtaaatgtattatactcaaaatcttgatcaagtaagaataagtgatcagaccgattggttagtaatttattaatatgacatgagatgtagactacatcatgtaaacatggagaagatgttatgttcctgcctttttgctgactaattatattatataaaatattaagtccttaaataatcgtataatattttataattaacgagtttcgtgtttaataaaaatagaaataaagactagtctatcatataattttctttaatgtgatgtgattagtctagttagaccggtaccttcataattcgaaaaggattttatttgacttagttggtgtatctttatttcaattttgacatatcttcatttatttattttcattaaaatcaaaataacttaataaatacattattatatagggttgactattaagataaacctaaaagtacttgaaatgtataactttgttttacaatttcttttaaaaccatatattaaatttatggatccaattatttacttgatattttacaagttaaaaattttttattaaattttgaaaagattttattttgaattttaaggtatttgagtggtttaagaaaaaataaaattgggatgctaaattaggctaattaaattgaacctaatggactggaataaccaagaatttcaaactgcatccgaatttgaattaaaaacttttaattttattttacaaattaaagcgatagataatcaaaaatataagttcattcaattacaaaccataaaaaatactatttatagaagattctgttttatataagtagcaacaatttttctaaatcgaaaacccaaaaacctccaaagttgaccgtttagaaagagaagatcccgatattagacgcagatttaccgtacagcaatacttattaagatttggtttttagctcttttttgtcaacctacatattaagattaaatgcaccgcaatttaatgtcttgattctgtgattcttcttcttttcgtcttaatattctttcgccgaaaaagaaaacatattcttgagctatgtcatggaaactaatatttgttccaaaagaaaaaaaaaacaatagtcaaaataagatgttgaaaaagaagagtcaaattaagagaaacataatattggagaatctttttgatgattcatgtcacgcgttgatctagacatcaattgaactaacgctgatatcaattcccaactactaaagattttaaaatttgggacgatgttattatcatgaaaaatattaattcttataaaatttgactgtttatttgcgtttgaaaattataagttaaatagtacttttctattcagagacaaaaaaaataagtttctgtcaaacgttatctgaaatgtaaataaatatatacattttttgtactgtttgtaacatggaaatgatatgtgattacgaaaataaaaactatcatgtttttatatgtaggtatactacttaaacgttttttaaaaaacaaatatttcgaggaccctatttaaacgtatttgagattggaaaaaataaacaattagaatgtgagaacatatttcattaaaaatagagtcctcgaaaactcttctttttttacagcacctcgaaaactcattttccataacttaatttgcattgaatatagttcgaacttctacacctaattttgtgttgcctatgccttttctgttaacgatcactctacttccatttactatgtttattgatacaaaaggtacactaattttgcaagatgaatgtttgtccaacataattgaacacttgttaggtgcattatttattatttaaaaattttcataaataattcaacaatgtgtaggttaaaactggaaatccgctcatcaatcggtgttcacatctgtctgtacacctagatattctatagaacattattgatcatgtaactgtatttacacgtggttaattactgaatttgctggtgacatcattctcgtattgtttgtagcttaagatacaaggaatcagacgtcagggttttcttcgaaaccactttcataatttaatcgtttttgaaacagaaatgagttatttacagtaagtaaattttactgtttgattagaaaaatgaataaaaaaataaccattcgaatataatttgaaaaagaaaattgaatatgccgcataaaagaatctcatacctgaccagaattttcaatacgaaaatctaggttatagatctcgttctcggtaatgcttgcttcttcgtctcaccacctaggtttttttctatctggcctctaacaccacggggcaaccacaccgttagccaacaaagaaacttatcatagtcttgtttggaccttgactgatagatcatagatccaaattctctcataatatgcatacgacgagtcgacgacatataattcaatcacattagaggggtgaatttatcccaaccatgttatattcttccactattttacactagttttactatgcaagattttttaattaataattgtaaatttcttagaaatatacatttgtttctttttggtcgggaagtatacatttgttttgaatactgttaaagtttatattttttggtcaaccctctaaaaatttctaaagcattccaatagtaaggatatttaaatggctgatcacttattaaaatttaatataattcatttgtcgtttttaaagacatatttctaacaatccaattgtttccaaaaatgaaattaataattatctataattaagaatgtttattataattgtttctttgagaaaaatcatagagatgacatcatggatatacttacgtatatgtctagatacatacgtatatatgtccatttacatacacattcacactacggattccttctaagttctagcttagtccactcacccacttaatatgggctgtctttatgaatatatatcttatcttattttttgaagaactatctatattctatactagctagctaccataaatgtaatagtcaaaatcttttcaaatttttctacttcttgtttctatgaaaaataggaaaaattgaaaatcatccattcttgggttgaatttcttgacatttttcttttaatatatggacaaatcaatataatattttggtactattatataatataggatgaaggatagcttccaatgccaaccttcctctccttatcactctccaagtcaatgtcaacggtcttcgccctctaactcctctctcttctctcacacacacttcgtggctaatatattccaccaagaacacaaccaaagagcatccctctcgacacacacacttctctcctaaaacccaaaaatggtggctgcaagtcccggtggctcaatgaagagcttaaccatccaaatcctaaccggaagatggttcatgttctttggaagtctcttaatcatgtcgacagctggagccacttacatgttcggtatctactcaggcgatatcaaggaaaccttaggctacgaccaaaccactcttaatctcctaagtttcttcaaagatctcggagccaacgttggagtcctcgcgggtctactcaatgaggtaactcctccttggttcatcctcttgatcggagccatccttaacttctttggatacttcatgatttggctcgccgtcacggaacggatctcgaaacctcaagtttggcacatgtgtctctatatctgcgttggagccaactcgcagtcgttcgctaataccggatctctcgtcacgtgcgttaagaacttcccggagtcacgtggggttgtcttggggattctcaaaggctacgttggtcttagtggcgccattattacacagctctaccgtgccttttatggtgaagacacaaaagagctcatcttgatgattggtaagcacaatttctaaaattattcatgagactatatggttaatggcatgaacagagtaaaacagagcaaaaacagagcaaaacagagtaaatcttggatagaaacacatactaattgtatgagtgattgtatttgtaggttggttgccggctatagtctcgtttgcgtttttgagaacgataagaataatgaaagtgaaaagacagacaaacgaactaaaggtgttctataacttcctctacatatcgctcgggcttgcgacgtttctcatggtggtcatcatcatcaacaaactctcgggctttacacaaagcgagtttggaggtagcgccgcggtagtgatcgtcttacttcttttgcccattatagtcgtcatcttggaagagaagaagctttggaaggagaaacaagtcgccttaaacgatccagcacccatcaatgtcgtaactgagaaacccaagttagattcatcagagttcaaagatgatgatggtgaagagtcaaaggaggtagtggagaaggtgaaaacaccgtcgtgttggacgactgtgtttaatccaccggagagaggagatgactatacaatcttgcaagcgttgtttagcgtagacatgttgattttgttcttagcaacgatatgtggcgtaggagggactttgacggcgatagacaatttgggtcaaatcggaaactcgttgggttacccgaagagaagcgtaagcacgtttgtgtcactcgtaagcatatggaattactatggtcgtgtggtttcaggtgtggtctctgagatcttcttgatcaaatacaaatttccaaggcctttaatgctcacgatggtcctcctcttgtcctgcgcgggtcacctcctcatcgcctttaatgtccccggtggactttatgtcgcatcggtcatcatagggttttgttttggtgcgcaatggcctcttctatttgctataatatctgagattttcgggcttaagtactactcgacattgtataacttcgggtcagtcgcgagcccgatcgggtcttacttgctaaacgttcgggtcgcagggtatttgtacgacgtggaggcgggtaagcaatataaggcattagggaaaacgagagtagaagggcaagatttgaattgcataggcacgtcttgttttaagttgtcttttataataattgccgctgtaactttgttcggtgtattggtctcgatggttttggtgatccggaccaagaagttttacaagagtgatatctacaaaaagtttagagaaaaagcgttagctgccgagatggagatggcagcgccggctgcagccagatctaccgtggctaaggaagacaaggatgatgttaaaggcaaagtaataggaaaaggagggtaaactatttagtagatgattgttacagatactagataacaaaagatggtcaagtattttgtaaacacttttatatatctccttaatgtgaaacctatcttttattaatagcattttgttttgtttttgaagcaatactttatatttgatgcttttatcgttttgcgttttaggagtttggatattagtgaaggggtaaaatttggagataggtaagggtcatgagtcaacttatgagttggacttgtgattttgtgagccacaagagattactttgaacaaatcattaaaagataaagaactaaattattgcaagttgggggacttggctcacgtgtgttggtacaacatggacttttatgtcggtatacacttgcgtaatgtttaaatctagaacgagtgcgtcaccatgatatgtgggaagttgaacgttaaacgggttctgagaactaacaaattgtaaacgtgcaacatttctagaaaactttagttagtggatactcgatttgaaaagatacactcgtgaaataattccatacttttaacttttatgaagtggattagggaatcgaaaaaagacataacaatacataaattataggaaagtcgtctccaaatagtattttaggatgaaacaaaactgtttttacatcttaataacataaaacaaatcatggaaactagtaactacgaaaacgaaatttctcatatttagttgatttttttaattatataatttcattttaagggatttatgttccatattttggtgtaaaattattaactattttttagtttaccattcttttcgattttgcattatataaggaaggaatataataggtaatagacagttttaaaaaaaaacatttgtgtgtaaaatctataataattattaatacggagagagtaattttaatccatcttgtttttttttttggtcgtttaatctatcttgtttaatttgactagacggcgtcatagtgtatacaattcattatcgagaccaatcgtccaagagatattatttgtaaaaaagctgtaatttaatctcaaccagttgtccagtaattttttacttcaggatttaattaatttaatctcaaccagttgtccagtaatatttctattcgtcagttgtccaataatagtgaagtgagacacacacacgtatataacgtttgtaaggaatcaaatataagaaatgtatctattcaacctattttgaaaaccaactagtcaaagaaaaactattttaattatagaaatggtcggtttaataacttatcctctttttattgtatatttatcaaactgaaagtagaagaaaccaatcgtccaagattctcggatcagacttcagaggtagcagtagcgtccatgtttcggcaaaagaatactattatttggtgacactttcatctcaaccagttgtccaatgattttttttttgtttgtcagcaaaatgtaaaataataatattaacgagactaataataatgaattaatagtcataataatagtgagctgacaatcgtaaacgtatggttttagtagtcaaaatgaatggaatagaacatagagtatcagtatgtatctttcatgtatgacgccattttcaaataatgtatttactatttaactatcatatccatatatcacaaaacaaaattcgaaaatggtgaagaaaatggatgataagcttgattattgaattcagaattaaaattaggactcaacatccagatgcagtttattttcaaaatgaatttgttttgcagtttgaattaaattttgtttattttagctgtttttttatccaattgattgttttttaaatgtatagtcatctatatagatatattaatacatttttatcatgaggcctaatctctcatatatataaataaacgtataagaaaagaaatgatgatgaggatttggtgatgatgatttggatgtgatgatataattatgaggatgtaatgatgatatgatgattatataatgtggatgatatcaagacaacgacgttatgatgaataactctttccaactcacacacgtacgatttttttttaacaagttataagattatataatttcttaaaataataaaaaaatacatgttatggaaaccaattacagtaataaaaatcgaaattaaaaatttgggtttattaacttctctcatctacgctacgaactattcttatcaaactggggacagaagaaaccaaacgacgatagctcaaattacagattccgctaatttatttagatatattggttgggaatttttttaattctagaaatatgacgaagaacagtaatgttcaaataaggtaaggaaacaaaagaacaacaactctttttttggccaaactaaaagaacaaacaactcaaagaaaataaataagtgaaataacataccaaaattttatatcaatttaatgcctaagaattggtcaaatgttaacttaagtacttaaattttaaaaacatcatatacactgatattcatctactaattataaatcaaaatttttttttgttaaagtgagaggatgatccgaattcacctaattcagaatttctatcgtttagtcaattgcttaggaaaacaaaaatatatgatgacagtatataatggactagtggatgttgggccgctttttaataaagcccaattaacaatttaacatatagagaagcaagatgtcgatgcatattcatttacacaaacaaacagaaaaaaactacaagaaatcttcttaaaaatacaaaacaaccgctgtagttataaaagagaagatgttaattattaattagtctccaaatttgtgtggattaatttgtagtttttgaatattacggtcttagttagggataaagataaaaccaaatgttccccaaaatattatgagtttctgaagaaacactcattagtaggaaaaagatttaggactagttgtttgaccaaaaaaaaagaaaaaaaaagaaaaaaaaaactttggactttaccactaattctttgagcgagtgagcttatttgtttctatcagaagcccactaacatttattctaaactaaatgtatttaattagtaaaacacattgatcctaatcaaagtcgcttacaaaccaaaatccacataaaaatagaaaaaaagaagaagatgaatttgtgatgatatctatcacacttagagaaaataaaggaaaaacacctactaactaaaacatattataaagataataacatattataaatcaatagatattctgtgtcaaaaatattaatttgcaaaaccatttttgtatattaaatatttgtatttgctcttatacaatacattgcaaattgtatcttaaaagtggttttgtgacaaaaaaaaaaaaaaaaaaaaagtggttaataagttcttataaaacctatttaaatatgatataaggttattaattcaatcactcactatgaatataaatacataaatatataaagagtcaaccataattatttttatttccctaagcaatgtaaacgatatttcatgtcatgaatgaaatccataaataaaataatttgctgtaaatatttacatcaatatcatgcatagttttaagatattcaaaaaaatcatagagaattttggaatattaaaactgatatgatacataaatgaatttcataaaatacaaaccgtcaaaaacaaacatatatcgtgtacatttagttttcattttttatggacacaacgtacataattgcagatgatttttaattaaaatttatgaggagaaaatgctaaccttgtatatattttcctgtttccgtatactaattgacttgaaatgtaataacttccgtgttctgttttttgatttttttcttagttaggctatgaaagctcttaaattgttacctttttttgttcaataaagctcttaaatagttacctaaaattagaaacaatacgtaaatttctatgttttttcttcaaagtaacttaagtggcggtcaaccaagaaaaaacatcataaattttattgtccatccaacttggagaaatattaaactgttaatctatttaattaaagattaaatatgaatttaattaaaatttaatctgaattgaatacaactcattattaagatttgttcaacttgcagaaaaaacaagggaacaacacgttttcagggatgactttcaaaattttatattggataacgatgtggcaaagaatacaaaattcaaagaaggaaaccatatgagatcggttaagattgaaaaattggagctatgggtcaaaacaaagatggacacatggatgattttacaccacaaccttaccaataaagagtcaacgcttaggaagtttagatcagtacatatcatagaatggcaatgtcaatatgatttgagttgactctaaccttctttttttttaaatgacaaattatttaattatttcaacttcctgatgaaacggttgaaatattattttatcaatttgagtgaaaatgtggaaatccactattctatcgaagttccaactctaacttggtggaaataagttgtataggataaaaccataatataatgggcattgtattaataccaaaactgatcccattccaaaagaaaaaatggaattttacggtggtattggctatattgatactttacttggagaaaaaaaaaaattgattgaaaatatgactaatattattagtcggacagtcatatcaaaatggagttgaaaaacaaaaatggctaatttggtaaatgctccatcgagattggaagtaagaaagaacatcttttcatgatttttaaattgtaaataccgttagtgagtgttttctttgtttagtcaccttgtgttacaagtcctttctataagccactgatcgttttgtataaataatcaagaaatgcaaggcagacccataattattttaataaacaattatcatagtcaacccaaagtacttccaattccagctatggttaagtttgacttcacgataagtttcacctcacgcttaaatatatatttccatctatcttttctttttgttaaaggataccttcattatgggttaaaaaagtgtaactgtcaatctgtaaattttttattggatacaaagaaaatttatattaacgacaacaggtatgtttaacacatgagacgataatcaattccaaatttccggtaacggcaactatgtcctaagccacaccttgattgagtccatttaccacaatttgattttttttttttttttttggtttgatatttagtaatatcaattcacaataatatttatgaaaatatcttaacatacttgttatcaatgctgatccaacgtcttaaccaacatacctaactgataactagttccagatgaatagtcgtccaacccatagcacacgatattacatgtacaacacatgattcaaaataaatcatactggattttgcgaaatgtttaccacgtatagctagaattttccaaaagtttttaaaaaatttgtactttggagatttaaatcctgatatggcatagaaacatgaattctttttaggccaccaccaaaccaaaatcgttttaagtttttatgtaccgttttcgtcagaaattaactcactgagtaacatgttggctctataattgtttagttaaaacaagaactgatgagaatggaatatcaatcattaaatgaccgcttcaattttacctcggtttatcgcttggccactattttatttccgaaacccaaaagtagataaactagtttcttttgcatggaaattttttccaccttactttggttagagattcttttacttcgtttttctttaaagaagattttacataatctcattcaataaatttatgatatattaaaaagtatctttttcagttcaacatcgcagacattcataataactgccaaaacccatttctttgatcgtaccgtaaaatgtgaatgcgaggcatgaataaatttcggtcttttaaaaataaaaataaaataaaaaatttcagtcttcatcagaacgaccgaacactacatttagtttttaaaattgaaaaaatcgttttaaggtatgcatgacccataagaagtggtagctaagttcacacggcattaccagtctcctcatgccacttcatctcaagtcgttatctttgaattagtcaaagtcttcgtttcccttattttttaataaataattgcggctttcacttgtttgactttctttttattctctttacaaagaaataacaacaactcatgtataggcatcttgtttttaattgaattatgtatatatagagacataacaggaacaaagtccatatcactttctttctccttttccccttatcgataaacttgcgaaaccctaaaagctaagaaacttaagagtttaaagtttaacaaaaacaacttaaaaagagttttgagcagtgaaattaatggcaataaaagagcgatcactagaggaaacaccaacatgggctgttgctgtagtttgcttcgttctccttttcatttccatcatgatcgaatacttcttgcactttattggtcacgtacgtatatttttcatttttatatttccaaatcttcctttctctctttttgcttttctccaaatgatacgaaagtacacattaatttagtactattacttttgcattttaaggttattaatgcatcatctcgctttttcttaactaggcaatcaaaatttattcggtataaccccataattaatctctaattcttcttttcacttattgtagtggtttaagaagaagcacaagaaagctttatctgaagctcttgaaaaggttaaagcaggcaagttaattcactattctataaaaagttgtcatcaaagacgactttttatattacaatatgataaatctttctctatttggattcccaactaactttcttcttttgttgttggattgtgatgaaaatagaactgatgcttctgggattcatatcgcttctattggttgtattgcaaacaccagtctccgagatttgcattccaagaaatattgctgcgacttggcatccttgtagcaaccatcaagaaatcgccaaatatggtaaagattatatcgacgatggccgcaaaattcttgaagattttgactccaacgacttttacagtcctcgccgaaatttagccaccaagggttatgacaaatgcgcagaaaaggcatgtaattcataattacttactaactatactagtatgccgcttttatgtttagcaaatatatatatcggaatcttatttcatattttcgatttcaggggaaagtagcattagtatctgcctatggtatccaccagctgcatatattcatctttgtgctcgctgtttttcatgttctctactgcattataacctatgctttaggaaagaccaaggtacatgatcttctctatacattttgtacaagtttatgcatatatttgtatgtgtttaatttgttttttaatctatatatggttatgcaatatgtagatgaagaaatggaagtcatgggagagagagaccaaaacaattgagtaccaatatgccaatggtatgtacatatacaacacacactatctcatcgccatagagtttatatttgtagaagtaattaatcaaagaaaaatgactaataatccggtagttgactttgccaaggttaacatcttgatagcgtatcagtgggaagataattgtttatttcattgattagtttgtttatttgattgagttagataattgaattgttgattaattacaacgtcgtttgtttgactcacgaataaacaatttaacacaagaaagtaacatcatattttatttttatttaactatatattatctgtcctctgatttaatttgtttagttcaattggttatttaactattatagatccagagaggttcagatttgcaagagatacatcgttcggacgtagacatctgaatatatggagcaagtctacctttaccctctggattgtaagttttcatttctttactttttgtgagtaatttttttatatataatttggttaaaaattgacaacaaaacttatggatggaaatggaatgcagacatgtttcttcagacagttctttggatcagtgacaaaagtagattatcttacactaagacatggctttattatggtaagtaataattagcatatactactagtaatacactatgaattgttgattaattactccaattggtgaattggtgcaggcacatttgccagcaggaagtgccgctcgtttcgatttccaaaaatacattgaaagatctttggaacaagatttcacggtggttgtcggtataaggtacagtatgtcccattttttatttttatttaaaccaagtttgttaatattttgttcaaacaatcttgcacaaaagttaaatatctgattaaatatctttgtgtgaatgcagcccactgatatggtgcattgctgtcttattcatattgaccaatacacatggtatgtcctaattctctaacaattcatttaagagattaagcaaatcgttatatatcaacgaaatatctttctaaatttcaatgtctttttcaaattaaaataggatgggactcatatctttggctgcccttccttcccttgattgtaagtaataaaaaatttcacttcaaagtcttcagtgtattaattatgtagctgtgaataaacaataattgtatatggttggtgtaaatattgaaggtgatattgatagtaggagcaaaacttcaaatgataatatcgaaattaggattaaggattcaagaaaaaggagatgtggttaaaggagctcctgtggttgaaccgggcgatgatctcttttggtttggtcgtcctcgtttcattctcttcctcattcacttggttcttttcacggtacacttatttacttttttacatttaccatcttaagttttttttttgtcaacccttttcttatgactttctaaattttgtttcttctatgtattttgtttatagaatgcatttcaactggctttcttcgtttggagcactgtgagcaataacaatccattttcttcttccaatttatatatgtttttgaaaaaaaattaatgattttggttatgaattaattttgcagtacgaattcacactcaaaaactgcttccaccacaaaacagaagacattgcaattaggatcaccatggggtttgttaacttcctcaactatacataacatacaacaaaataatattatcttttgtatgttttgaaccttaacgataaatttcttcttgttgtatacggcagggtattaatacaagttctatgcagctacatcactctacctctctatgctcttgttactcaggtacaacttttaacaaattttaaattgctaagtgtcaatgcgtcatgtttgaaacaattaagggtttgctacaaaattgtgattgtcccatatatagtttagattattttggatgtataggatttctctaacactaaaatgtgattgcagatgggaacatcaatgaggccgacaatattcaacgacagggtagccaatgcattgaagaaatggcaccacacagccaagaaacagacgaaacatggacactcaggatctaacacacctcactcgagccgtcctactacgccaacacatggcatgtcaccggtgcatctcctccacaactacaataaccgcagcctcgaccaacaaaccagcttcactgcttctccttctcctcctagattctctgattatagcggccaaggccatggccatcagcatttcttcgaccctgaatctcagaatcactcttaccaacgtgagatcacagattctgaattcagcaatagtcatcatccccaagttgacatggcaagtcctgttagagaagagaaggagattgttgagcatgtcaaggttgatttgtctgagtttacgttcaagaagtgataggactatactttttacattctgtttgttcattctttgtaaatgatatgaacttaggaatgaacacttttcttatttctttatctgaattttgctataagctcaaacgctttatgatatcatttcatattagtagacagactttagatctagttaactgatatgttttacacaaacgcttgtcctattcaatcaaatatgttttgtgttttggacttgcccaagaggtttcggtaaatgtaggacattttagagtggagaactctattaagtgttcttgaagcagagcaaaaggattccttgaggtctcggatattatgattagtcatatatcgttacgacaggcattgatcgtctgataggattagatatggaacgactctatacacgaaaatatttagtctttctgtagaatctatccctcttactaaggaaccctttgctttgggtcttgacaacaatatacattagtgattctggttctgtgttggtgtaggatgttcaggtaatcaggtacgaagtgcgactggagcagacagagataagtagttgacgtaaccttcagagaccgagatcacaaaccgatggcaagcaagcgcagtggtggtgagagacatgacaaaggaagtccagcagaatctgagcatcaaaactcggtcactctttgcagactccagtatctttctcagtattactctgacccgcttgtcattgattagaatcttgaagtctttgactgtaatgttgattcctgaagatggtggtgggtctgaaagagaaatgaatttaagggattcaattccaaggcttccaaccatccattggtacatcgtagttgcaatcgtcatgcaaagtttctggcgtatgacaagtgcctctcttgaaataaatgtccggatcagtgaagtcccgttctgttttatcaaaacagagaacaatacaaagtttattacttgagaggtcatttcctcagaaatacgacaaatctactttaatcacaagttaaagtcaacatggggatgaatgatgaccataaccagaaaggtaccttattccctgtttactttgttagagactaatctttaagttcagaaaactggcaaaaacgatgggaagaatagcaattaggatgtagaaactaaccgcagccatcaagagtcttctaagaaccacaccatttttggatgccaaaagtctcaagaccaaacttacattgtcagcatctttgtccgttagattggaactactatcaacagaagtttcatcccttgataactttagcagtggcgattgtttcctagacaaggtataaaataacttattattatacagagacctagaatacaagatagtaaacaatatgcaggggctaaacaagacagaatatgaatgtaaagatcattcaaatactttaatatcaaatcattaccagtcaaagctacgttagatgcctattacttgctctttgttgtgagccatctgactctttgtaactaaattattatatttcatctgatacttctgtaatttaacaatagttttctgttgctgacctcaagaaagtacttagaagagagccagaggcactaaaattctcatcttttccatattacctacaccactttatccaccagagctatacctagacataattctaatgcataagtcaaatgtctgattcacaatacctcgtagaacttttactcaggaaaagagcaaccctttcccatcggaattccttctttcggttaaggactgcctacagacaccaacagaagttaagaagttttctctgctatttagctttatgaaacagaaactataaaaagtcacttaaatggctctagaaactgtgtaataccgaatgaagaatcttccttgttgcagctgaattttcagtgatgagcttttgaaccacaaaagggtatgctgcctcaaatgtcttaaaatttggatctccagctgcagccagacctgggaagacaagaatagaaagcaaataactaaaggatggaaacaaatggattacatattcttctacgatataagccaacaaaaagaatgacgcaaaatgccaagtaaaggaaaccaagcatggctagaaagaaatgacaaataaagttatcaaacaaacaatcaaggactcaatcacaagtaccttccaagcaagcaagagaacggaggacaagtgtgaagtatggtggcatgcgtagctgatacttcagggccacattgactattttactaagcaccttgaaaaaattagaagcattggaagaaatattaatgaattcaatggtactcacgcagaagataaaactataagaattttagattggttgcattctcccatgtacgagctacaagatagaagttgctgccatataagagtgcagatggaacttcttagcatcctagcactttaagtaactaggttcaaggatactaacacagagaagaatgcgaaagaattgcaacagaaaccaaccactatactaatcaggtataccatgtgttagagttaaaagtcgtaaatataaacaaacttgcctctctaatttagactaaaatgcatgtctctaacaacaatttttgaaatacatgtctaaccttggtgaactcgatatcaggaatcccgtttataagtttaacctctcccaatgcatattccagatcctgtattgttgttttcaagaatcataagatatgagaatactaacatccaaacacattcagctatatattaattgaagatacactacactatctgagatcagaaattatataattaccagagtaaaacgacgggtattaacgcctggcgtgatgacatccatatcaatcaacgattcaacaagacaggcccaatcaccatttacgatatgcacaattgatgcgagcatggcaagctgatgttttctttgcatccgacaaactaaaccaaagtccaaaaaccttgcatagagacacgtggttatcaagttaagatcatcttgtcacagtcagaattttctgagtaacgctgatggatggttaggagataccctatttgtcttgatgttgtgtaacgaaggtttccaggatgcggatctgcatgcaaaatacctgtatcaaggagttgaactagagttgcctctacccctttgttcacctacagtggaaattaaaagaaagctaagtcattagaatataaaatattctagcaaaatggtactaccaaattaacatggattataacaaattacgttaaacatgcagttcaatataaacaactgaaggcatcagtaagattaattctacttttttttcagtaactgcattgaagtatcatcacagtaaaattacaaacagtcacacacctttactaatgaacatcaaaatagaacatcatgagatgttttatcattactacaaagcatatgttaacctaccagatcaagaagacgccttctcgcttcaattttttgtttctcatgactctcattgtcatgatcagagtaaccagaagatattgcgagtagatcggttgggctttcaccaaccatccattccatggtcaaaactcttttgcgcgttagatgctgatatacttttggaacccggatataggaaaatcgtgcgtgagcttccttcaaaatgaagtacttcggtcagtcaaagcatactagatacttgctgtaaacttaaaccacaaaattaaggaaataacatagatactagcacgaacagagagtacattgtgaaggaacagcataacaacatttaaactttgattgcacaagctatataagccacaattttatgcatggacaaataatgagcacatcacacttagagggaacaaaagcgacatatctatcagaagaagcagaaagcaataatctttttttctgttgtcaaactttttttcattttgtgtttgtcaaactacagaggcattggcaacctctcaagtattatgttttctaaaaacctaatgccgagtacctgaaattcagaggcattggcagcctctaaagtaaagtccaattctccagccaaacccattccaagctcatcagcatatacacgaatgtcattttctctctttgctacctttcgcaatacacctaactgcaacaatcaaaagaaatatcatataactatgacatgattcaagcagattgatttgtcataacttggtagatttcacacgaaccccaagtcgcagaatgtagatgtcgcgtagcactgcatgtctcagatcagggcgctgaactttcactgcaacatctgcaccatcgagggtccttcctcggtagaccttaacatatcatatcaagtataaggcatgcatcctacaagttgattcatatgatgcttacttcttgtaagataaaaaccagagtaaatacctgaccaaaggatgctgctgctacagtttcttgcgaaaactgactaaagaatgattcgacaggaccacctaattccccttcaaggatttttacagcctcaggccagggaaagggagggattcggtcatgcagttcagatagtgcctgcagtttcaaatcataacaaacatagtcagacagctacatccctaagaacaaccaaatgtagcatgcagaatagagaaagaacaatggaaacatgcaccagaaagacactattaaaagctaagagatttagacaaatgtgaccataacttctatctgaccttggagatttcagtcccaatgatatctggcctcgtggaaagcgattgaccaactgaaccagcagaagagagggaagaatcattcacaacagatcaaagtatctaatatatggcagtaaatgtaaatggtgactgatggatagtttcacttcaaaaataataagctaatcacagacctttgataaaagttgggcccaaatgtagcatggtttctttcaacaccatcccaaaaatctgctctgaagcttctaaacttttgcccttaactgatgctgatgttcgtaatctgatggcagcaatcgtgaacgcagaaaatacctatattttaagaatcaattaaaatcacatccgaattttccgtcactcaagaaaaacaagaatactaatgcgttaggctaaacgaaacacttcatcagataaacatcagtatctctaaagcatttatcataatttcaaatcatccagtgattagtagcagaaccaacaaaaactctaaacaaatacctcgagaagcctaaaggcaacgacatgaggcctgcaattaaagtaatctgcaacagcttgtgaatcataaacttcaggaagtggtcttgaccacatcttagaaagactgtaaaagtaaccagcatatgtctccaaggctttgacatcagccatgaacaaatccaccccagtgagccctaccaaacaattcaaaaactgcatcagcaaatgaatcaccactaacagtaaacaagaagaatacattaggaatggtcttgtcagctttttagttcaatttaacctatcaaattagctccaaatctataggaatgccattgattggaaaaatcaatctacttgattgatcattgacagtaatcgacttccactgatactccaacctaaagctttcaactttattatcacagtcaccattgcaagtatatctaagaatctaatcttcctctacttttgaaaaagatcttctctttcattcgaacgatgcatcaaatagttcagaactgagatatctctatcaaagcattgttctgatcaagtcaagcaacaaattaacaatcatgatcaccgaaaacgaaaacgaacacctgagtaggaaggctgaggccaagattgtgacttcaaattctgagaagtatgatcctcaagatgcctaagccaaaacagttcctcagcggatttagtcacttccggtacacgaaaagcctcgttagcccaacggagtccgataccgattttgttcttcaggaaatcaacgtcattgcgtacaacatcagcgaagtgtccgagaccgacggacacaggtgggatcgctcttctttgttttaatcgtctcaactcagcaacggcgaaagatgttcgtcgaagtggtatgggtatagtggaacacgacggagatggagatacggacgccatgtttgatcggagaaatatggtttaagttagaattgaaatcggaattcgtgagacatcagagagtgagagtgacggctagctcttgctcatgtctgagtttgtttttctgttttgtttttgtggcggagaggagtgatccacgtcagcaacggaagcttcaaagagtcgtcgcgataaggttgaaaattttgacactcatatataaatgggtcaaagcagtaagaatatggcagtatcgggcctatcggcccaatttctaaaccaaacaaaacaattaaaagagtaatatgtaaccaaaccatagtaaaccctaaccattccaactaaaccaaatcataaaacgtatacgctttgattaatagtatgattatgatatatgttggacattcacaaacatatcaaaccgaataatatattttatcacctttatattgataaacatatatatgtcttacattgtttatcgctttatagaagttaaatatagcatagacaatatattatttaacatctgtacttcaattattatcaaatacaaaaggttcacggtctggtctggtctgcaattttgtatgaaacaatgacttctacagtctgcaatctgcggcatgtttagcctacaaaacctacgattcttctaactcgtcccgtgacgaccggacacaacccacctatgtgtgaaattaaatcaaatgttcattatattatttcctaataatcgagaattttatttgtcttattgatatatatatattaaatcaaaaatatgtaagaacaacctgtaactcaattacatatcaaaaaaaaaaaagacaagtggtttgtataaatgtattataaataattttatgcatgtatcatgtatgaatatgagttggagtaaaagacagagaagacagtatctacttgacccacttaacacaagccgatgttctctcccttccaaacattgttctctctttaagcttgccctaaatcttgtgtgatcctgtgtgtgattttcttatattattatctttaaacacttgattttgtttaattcttaattcaatgctcacatgctattacgtagtttctcgttggcgtttaatgtacagatcgtaaccttaattaagcacataatcggagacttgacgttaaataagtttttaattcgactatcaacaatatatatgaccacgtttggtgcgttcgtttcacggtaaattcggaacgcaccaacattattcacaaactcgtgtttgatatctgtactttatacatacactgatgactgaacaaaccattttttcaatgaaagtatgggtaaacgcacttaggcgagcaatttgagaaatgttgactactatcataatgtggttattggaaatttatgaatatgttgagtagtattcaggttttatattgcgcactagtaatgttttggtttctcttatcagtaatttatttttaatgcataaagtgttaaaaatgaacaatcaaattacatttgacccaaaaaaaaaaacaatcaatttattaatttaccgtgatctattagctagtggttaagttgaagataagaattgaagaataagaattcgagtctttccatcatgattttttttttttacaatatatgctttagaaagttgagctcatcctctcttaacaaaaaaataaaaaataaaatcaagagggtaaaaacagaaaggagtctacctaattagtcacctttgaatttatgatgattaatatttggcttaatttaataatattaattttacttctctcctttcactattggttacaaaaaaataatgatagttttccaaaacatcaaacaaataacaaaactcaaaacatcaaataacttggaacagagaaaataccagtgataactactgtttcgactaaatattgtcatccaacttgaatcatttaattttaacatcatatgtaaagtagtttaggcgaatcacttactccatgtataacttcatgtaatttaggcaaatcatataacatcaaagatttgatttagtgtttggtcccttggaactaccttataaacaattgaatccaatcctacaaaatcgaaacaacatgttttgaaacccgacccggacgatgaaccggactacattctgggtcaccgggtcatcgggtcaaccgggttggaccacggattaattagttaaaatttatttaataaatttaatattaatagaaattttagagtattttatataaaaaaaatttagtatttataaatataaaacaaaaataatcatatcatatttaatcaaatataaaattatattatgtttaataaaatataaaattatttatacccaaatatatagaaaaaatcaaacaataataataaagtggttaaaaatttgaaatccaactaaatgtctaacaccgtaacaaatatattaagagatcatcaatgacagaaataaattaataaaacatcgtgaattcaaacaactaatctcggttgtctctctcaccattcgattcaattttaaggcggtattgtaaagtcttcaccaaaatctaaaatatcaaatgaatttaagaactgaaaaaacttttaaaaataattgaataaagtctaaaatcccatattttattgtaaaatcaagagaactttttaaaacccacacccggccggttcaaccggttcaccgggtcacgggttaattgcgagtttttgtgggttttttcgattttgaacttgttgggttttagcactaaacccaaaccggaaaagtgttcgggtcacaggttaaccggtcgggcgtaaaaacactggttatagctaatattatcgaatgttgacaacaagtaaatgctatgacgaatattttaattaacggcactgtttaagctaatatcacgtggagaaaggcatgtgctagctattcgaacatatgattaaatgcaaagtcaactattaaatccttttgcccgtactctaatttgcacgacaccagccttttttcctttcctaataaattgccttgctgtgaaaaacatttgccttaatttgcttatatagtaatttataactatctagcacactttaaaaacactgaattgtttttatcatttacacaaaattagtatgccacattcgataatcacgtatgatttggactttagagtataattttttttgtaatgcgtcgccatttccaataacataacagagctctaatcctcacagtcaaaattaaagtccgtacagaatttcatttatttcatacaaaaactatataataaaaatgatttaatattttttttcttggtttggtaaattccatctccctgaccaatatgtaaacttggactgtctctctccaatgaaccttcgcgcagacataaacagctcacttccaattattattacaatttttattcttttacaaaaaacaaaacaagaactgcattcattaacatgtctactcaatcacctctcagatcgattcttcttcttcttcaatcattctccccaaaacattcatcagctcaaacaccaaaatgcaacccaattctcacatcttcgtcatcatcaccatttcatcactcatcattacagtttctgcgtatggctcaacaggcacaatcgcagcagctttcggcgaaaacggattcttctgcgccattgacgcaagtgggaagcaagaagtcatctgttgggatagaggaaacactaaccgatcattaaaccgacccccaggtgaaatctccggttattctcctccaatgacttctctttccggtggtgaaggttttctctgcgccattacgtcgaacacttcgcgtgcgttttgttggaaccttgaagatccttctgagaatctcgttcctcgagcttttcagtataattcttacttacagattgcttctggtaacaatcatgtttgtgctattagtggattgtattactcaggtcctgattatggtcctgttcattgttgggagtatagtgataacactaatttcacttctggtcttctttggaattcttcttttcataatccttatatagatagtctcatgtttcgtaagattgtttctggagatgggttttcttgtggtgttactaaagatggagacttggtttgttggggaccaaaatcaaaccttttgaatttctccaataatgaagaattcgaggttttagcttctgggaggaactctgtttgtggtgtctctaaagattcaggtcaacttcattgctttggagatgaaacagagtttggttcgttaccaaaccggcctcggtttattgctctttcagctggtgctaatcattattgtggtatacgtgaggatgatcatggagttgagtgttggggaaggaacttgaattcttcttcatcatcttcagctcctaatacttcagggtttgtggcgatttcgtcttcggattcaacaacttgtggagttagagagcttgatttagttcttgattgttggagagttcatgattcttcgaaagcggattatagtcctcctttggagttatgtagccccgggatgtgttcgcctcgcggtaattgtggtgatggttggtttgctttcaatgcaagtatcttgaaagaatctgagcttactagcttgtgctcgtttcataacctcaacatttgtttacgttgtggaatcagttgcttggaagggtatttcccttccagcacttgtaatccaaacgcggaccgggtctgtactccttgttcgctatgtcagaatagttcttgttacggtatctgtaagattcgggctacgaaatcgaaggagcatgagcagaaagagcagagagaggtacggagattggtgatcatcatagggtgctctgttttagggttcttggtgatgttgattggtttgtctttcattccaaagatgacaaaaggtagtaaacgagatgatgaagagaggagtaagatgacttgttgcttctgtttcgataagaattctgtagaagctgatcctgatcctgtccctcatcagtcggttcttctaccaaccgctgtatctctcggggaaaccaagatcttccgtctatcagaacttaaagacgcgactcacgggttcaaagaattcaacgagctcgggagaggtagcttcgggtttgtctataaagctgttttatctgatgggatacatgttgcggtcaaaagagcgaatgctgcaacgatcattcactctaataaccgaggtttcgagtccgagctagagattctttgcaaaatcagacacaacaatattgtgaatttgttaggatactgctcagagatgggggaaaggcttttggtttatgagtacatgccgcacggtacgcttcatgatcatctccatggagatctttcacaactggactggagcatgagactgaagatcatgttgcaggctgcaagaggacttgattacttacacaacgaagtagatcctccgataattcacagagatgtgaaaacgtccaacatcttgttagacggtgaaatgtgcgcaagaattgcggatttcggattggtaagctcgaatgaaagggattcaagcaatagtgatagagaaggtgatgtgtatgactttggtattgttctacttgagatactaagcgggcgaaaagctatcgatagagagtctgatcctgcggggattgcggaatgggcggttcctttgatcaggaaaggaaaagcagcggcgataatcgataggaacatttgtttgccaagaaatgtagagcctttgcttaaattggctgagttagctgagcttgctgtgagggaaaattcgaatgaacgaccaaatatcagaaatattctgtgttttcttgatctcatcgtcaagtctggcctcactttttaagttgctgaagcctctcaaaatgtgaaatatattcagcattgtttttgtttctccttacaaattgtatgataaattgattgtcaaagtaataaaaacacggatttgtttttcaaactgaatcagaaaatgtcctaacttagtggttataactagttactggttaggttgttaatagtataatctgttgttgcatgcacttgcatagttcaatttgcaggctaatgttataagtctcttcttatttcttatgatcaaagtgtaaacatatttagccatcgaatattagaagtattcattttcaaccttattacttccattaacttatctaaataacgactatatatacttcgttaacatatatgttcacgtggcaattcagaactaatggaattagcaaattaggccggttaagtattagctaaaccggttaaaaaccaagagcaactttggttttcattctagggtattcattctttcttcatacaaattgaagtcacacactagaaagagcaattacgcagttatttcttaaattttatgtcataaacacaatcagttgttacttttaatcgggtttagtttcggttcattcatatgttaactctcttaatggtttgattacacgcatcaacgtgggcttctgttgtagtttagttggttttcacctaatcataaacttaagagagcttaacgtgaaaaaaaaaagaaatgagtctatagcactttcatctctaaaatctggcaaagtttaaggtgtattaatttaaaatattttagagaaacaaataaaatgttttagaaaccgtgtttaatatttcaaatagaaaacaattttttattttttgtgaaatggtttggtatctgtgttttgtattttgagatgaagaacattcaactttttataccactgcatatttgacatcactttctgattttgttttgaaaaccgtcttcttgataccaaattacgcgaatagctacaagacgtttttgtagcatatatatagtgcttggagaagacgtctttgttttgttgtttggacgaattcattttttggcatttctcaaaaccagtttcgatcattcctttgtaaaaatagttcatttcacagaagaaaacaacaattatgacaatattgtttaaatatttacagaaatcagtttttctttcctttttcagattcggacaaccctaaacttggttaaaacaggattatatcgaaatttactaacccaaaattttcttttaaggatggaccgaaactgtttttggactcggaccgaacacactataatatgtttatttcgacgaaaaaggaaaaacacattaatgatttaaatatacgaaaacaatagagagaataattttattttattttgtcgcagagagaataagttaataaaccacactcagaggtagaatctgtcttatatgtacatacaaatcacatcatgtcacagatcgataacggtctaagtataattagaatttagaattcgaaattacaagaataattgattggaaaaggtgaaataagcgtggccctcggttgttgaaattattttgttgacctactttgactgatatactagaaaaaaaaaatacatttcatcattccctaatgcccaatcacaagatatatagggactagtgtggtccatctccttatcattattataaacaacattttctttaatgattcttacaataatatttatttgttgatgatataaaaaagctgattcccaaagcaatgaaaacattatttccttctatttttcctttcatcattaccttaccacccatggttttatagtcccaatatcaaacttcatatttagcattaaaataaaatgataaaaaatgaaatatttattcagtgaagtgatgtactacgagtctatgaaacgaatattgactaactggcgaaatcaaataattgagactacaaagaattttggtacgtgttggatttcgaatgaatgtttcttcctcaacgcatatatcataatttgggtttgttccttatactaactaagatatattattgcacaagaaaaataaaaaataatattttgtttgtaaattttttacatcaaattgcattataaacttaatatacagttagaaatcttttcatattagaaatttcgtaaaagctagtcttaaatatattaaagatattaaaaattatattttatttatgttatgaatcttatggaataaaattgtgaatatgtgctgcataacataaataaatataatatttaatatcttttatctaatataccaattaataattggatttacaatctcttgagtctaaaatagccatgcatgattcctataatacaacttctaacattactagtatcaaacaacaactaatatttacgtatagttaatatttacataaataaaatatgtttatatacaaaagaatcataaaaatgaagaaaaagtaattaacaatttcttcttagaaaagaagaaatagtgaatagaaaactataaaaagttgaggctatacattgtcatgtgtgtttgtgtcaacagtctcacgcgtggttggatggatgcttggaataattacaggcaccgcaggctcaccctttcctagggtttctccaatttaataacattaaagttttcgtatcttgtttttttttcagatgcaagtcaaatcattaacaacaaatagtgtaaggttagttggcccgagaataataatacctgaagaaattatagtaatagtctaatagaccaagacaaacgacttaaaactgactttggttctcacattgctcttcgaatcattcattaagactcttacaaatccttttcaaatttcacattgtcactgtttaagaaaatctttaagagatcaatactcataaagttcaaatttgcaataaattaatagacacacaataaagtgactaacgaataaattttaacataacggcaacgcgataactgctacaacttatttatagcgtacatctgaattttctttttgcttaagtatattgaaaaattacttgtgcacttcagaaatttctatttattgttcttgtctagatacctaaatatgatttacttttagtggatttacgaaatatagatatagctctaaccaatatttcgtgaagaatgaatttaatctataatatatacatatccataactaaacaaaacaaacatattttcctaagtaaatagacaaaataggttgtctatttctaatcgaatcttacaaattcttgaactttatactcctaagtataagtttatcttaagtagtgtatatttttattacaaaagcataatatgaggcaatgtgagaccaacaaaccatatgcaattattgcaaaacctcacgaaaacaaaagtccgaaatgtgtggtgttccaacttcgtgcatgtgtaaacaattgtgcatttgaaaccaaaatttaacaagggttataattagagaaaagggtaggtcaaaaattatttacatatacaactagattcataaaaccgatatgattgaaaagatacaaaggctatctgaaccgtacgggaatgtaataattagctatgttataattaaccatttccttttaaaaaataaaacaaaatgccaaactgatgtgaacacagaagaaatcctcgtaaaaagtgctatgatatgacaaacatgtgtactggaaaaatacgaattgaaagaacggaatcagagagagaacgtcaccaaaatatctaacaaaggaatatatgggaagtcacaagaaaaaagcatatgatggattcgtgaggtacctctaatctcttctacacatgatgaggcaatgaacagagacttctacaaaacaagctcatcaacacaattcaattggtaccaaaacataattatatatgtatgaggatatgcatggctcctcatacgccatccacggaggtcatcgatactcgatgggctcagcatatggcatacagggagccaggcatacatatataatacatatacatctacatatgtatatgcgtcatgacatatacatggttatgtaaggaaactaattcgcctaaaacagatagctaattctatttttaagtaatgctctctccacctggtccatgcatgaacagatacaagcaataaataaggaggaatagaaacaatctatggcatggattgtgatttgcatgtacgagaatggaattggaagatcttttgttttctctccctcttgtggaggaattggggttactgttcttgaagccttaaatgacgatttggtgaaaagacaaaagagaagatgggaatcaacaaacaaaacatggaggtgagattggggatccagagagagatcgagagagattgaaggtgatggagagaggaggagaaatggtttatataaaacaattaagggtgggatgagagagatacatgtgtgtatataaatatatgtatatgtagacaagaggcaagcaaattaaaggagaggtgtttgggtcaaaaagcaaaaataaatcatgataaatgagaaaaattgaaaaaatgaacaaagggaaaaagaaagacccacaagaaaccctaaggaaagggcaagtgagaagagaaaggcaaaggctaaagttagggcatatatatatatatatatatatatatatatatatatatatatatatatatatatatatatatatatatatttttatttttggttaatttgtttagtcttttgagagtgaaacaaggattgctcgtggggttgcttttgcatctcatcctcacacacacccactaaatatagacatccatacacatcatcatccatctatcatcacacatgcatgatgagatcagatgatgcatcatggattggtggtgggtatgattaagtgagaaggagaaggatattttctcaggacataattaaagaagaggagagagaaatatataagaaccctaaaagaggagagagtgtgtttgaaatctccttttctgagtctggtggtcttaaaaaagctaaaggttgcttttctcttctctgaagctcattttgtctgcaagtgcttggatacacatggattcctctatctcctccacctttttccacacttccattttttattattatcatttcaattccacatatattcttttaattacctctttcatatattgtgtatatgcatataaaggctattattaaccgagaattatggcacacctcatatctattgtctactgtaataatgtaagcaacaaactatgaaaagaaaggtcacgacccataatcttgcaactaatgaatgattactataatatattcagtgagaggacattggctttaagaaagtatatagagagaaatgaagtaattgtttaaactttaaactaagattctctgtttgactcttctgtttagactaaggaacaatacatagtgttagctacctaatccttgctgtacccaccgattatcacatgtctttagaaatatatgcatgcgcaagcattcttatatagtatatatttttcatatttgttttgtgtttctatgtgagttgtacgtagatttattcgctcacacgtatctatggaatgaataatggtaaatttgtggaccatctgcatcgggtgtattctgtcaatctattttctcaaatattttggttttagcaaataaattgcattcatgttataagtcaagtcctagtgtggacatcactctaaagacttgggaattacatcagatatttcatacgtaccacaaaactgttcttcttgatttttttttttccagttatccttaacataaaacatctacaataactatttgtatatttaaggtttgcacaatttaattcgctgatgtgaatagtggcgtattagtataaacacattcattgtattcagatcacaattcgcaaaaaaaaaaaaataataactcccgtggagcactatcaaaattattttgcattttccggctattgttggcagtcgcgaccatttgttcacgccaattaatatataatcatatatgtaataatattatcagcctaatgataggacttaatatttcaagtagaaaataacaatgttttaaagagcaaacatggtaagtgtttagtttggtggtccacgcttggattagaaagtctccaaacataccatgcagttaatctcttggcgcgggatcaataatcaccccaagcaaagtaggtgccaactaatcaatccacataccctatttcttttaaaaagtccttaaatgattttgttttgatattaaactgaaaactaaacttgattaaaactcagttcatctttcaaccaaaatcgtgacatctctagctagcctctagttagtctatttttccgtaacttgcaagcatttcttcttaacatgtcaaattaggccgtatcctattttgttttttactttttcaatcctcttttacagcttgtttttttaggaaatgataatccatgttgttgaattgctactaataataaagttactatttttatgttttccaattcaatgactttgacttgttgatttatgttgcattctgaaaattaagcattttgttatcatgacaccccggatttactaaaataggcgaacaatttttgaataagttgaaaaatcgagtcctcaatgcgataattcggatctaaatagatagttgacaaattcataaatactttttacttaaagaaatgttctttatgatttaataaaacaaattcataaataattcaaacagtttacgtgaatatttttcatgtatacataacaaacctgtatatacaatagaaaaaaaaaatattctttcaaaaaaatattaataacatatttaatcaggctgttggatacttgaagaaacaaaacttaaattagtccacgaaaataattaaataaattttacttcgctgatataagtttgtgtgtgtttctacttcctttgttgaatattattcacaatgtatttcttttgaaattatgtaaaaccttttcactttttattttatgaatcatcagcttctttagttaacttgttaaaaaaaaaaaaaaaaaaaaaaaaaatttgttttataaccagcataacccgtggattgaactcgtatggtcaatagatataagcgtaggaggggagtctaatggtcagaccactttcagtagattaatactactaaattattcatctccagattattaaaagaaaacaagagtagacgaaatggttgaaattcgattttaggaccctactagctcaggctttagcttaattttgacccctttgaccttttgttggcccatgaggccatgaccatttgttattgtcgacaacccatgattatttaaatattcgtatgtgcttgttaatcagcattcgtttgtgtaatgtgtttgtatgttaacctaatgtgactacccatttttcaaagaatcattcgtatttgttttttcgtcgtccttatttaggttcttaatagatgtaagctacgtggtttcttataactatgtattgtttgtttgagttaaaataattatttacattcgccgaaagatattcagactcattatacattgcatttcccataagtatatatcgcgaacgaattagtaaagtgggttaatgacttaatgtctttgtttcgaattttttaattgatttctcattctcttatttttgttaaaccgtaaaaattttcaggagtacaacaatatccacacagccttatctctttattatatattatgaaggggttaaagacgtatttaccaaagataagagttgatcttgtaatcatatagtaattggaggacttgtttgaagtttcataaagaagttttaagattccgaccgaagttaacttgttttcttcttttgtccgaaatctcacaaacgattaccacccaaacgtgcgaggtaagaggcagacacgtgcgaaagatgacgtggacagagaacgtggacctaacaattttggggattattatcgtcgtcttcttccttatgcaccaatttttgtctgcacttcaccgtgaaggaagctcagaaattttactttttctttttgggaacccgtgatcaaatgataggaggaacaaatcaggagagacacaattctttattgacagagaaattgataatcgaagaaccctattaccaccgattctcctcttttctctctgtttcgtcgtcatctagggtttcctgtaagttataattatctcttcttctttctcaagttttgttcttttggtggttttaggagatttttccatctgggtttatgttattgaatcgctttggtgtttgaaggcctagctagtaaaaaattgggcgttttcattggatagtgattgaaggggttttaggtgttgaattgtttgctaaactgtgtattcttactgaaacttgaatgcttatggagttaaagtgatatttttttgtaattttagttttttggtgaatgataagatgttatctagaaattgtacagatgattcgtgtaggcaaagtgattggacatggttgtgattttgcattactctgcaacactaaatgtattagaggttgatataattagtcctcaattcattgaaggctctcttttgttaaccttagcttctcttggatcacttgtgaaacgtagtttgcattagattcctttgaagattctcaaacctctcgtttggtcaacattgttattggcattgtttattttgtattttctagttctgttttgattgttcttgaccaggtgtgctaggtttcctttgttactgttgattctagagaccttaagatgtttgggattatttttatttttttgttacagaatgcatgagttctctactgttgatggttttgcggagataaacgagagcttagcggagatgataaagtacattgcaaatgaaccctcagtggggctttactacattcaacagcacatccgaaacgcagcaccgaatgttattaatctcaacaacaacgttttggagaagtcccgtgaaacaggcttgcataccgaagacttggaagattctatagccatggtgaaatctatgaaagactgtggttcacctattgctgatgagatgataggagacattaagaactctttagcgataatgtcttcgaaacaaccgaggagaggggtcatcctcaactccacaagtccttggagcagatccagcagtataacaacaagaacgcgtggttctgataacagccaggataatagtgaaagcagcaactatttcacatcagtcttcatgacggctaaggagaaggcaagcaacatcaaatggccacaacttgatttcaaagaacaaaagtcagaggctgaccccaatgtgcaaagcaatgagttaaaagaagaagaagaagaggactcagggaaaggtgaacatattgtggagacaacaaagtttgaggagttcaaggcaggtaaagaagcgagtctcaaggcatggcttggagatatggatgggaatgtggatgttggtggtcgtgttgccgagagaatttagatgttttttcattaatgtcgctgtggttacgggagactgcttatttatgtaaatcattcacttacacagagaaaaaagagttaaaattttgactttactttgaacaagtttaaacaactgaataagagtcctataagattgcaagtgcaggaggattcaaactgcatttgggagataacaattagagagaattcaagttgcctctgtttaccgaggaactaagagaaactcgcatcaagttattcaagctagaatgaagcaggtgtgaatttgttgattgattgttatatgcatctatatgaaacgaggtatgataaaagccaccaatcatcttcagtttccgattccaataccattacaaaagtcatttagagaaacatgttacatagcgagactctcacaccaaacacttgacttcgagcgaaagattcttctggtgcacaggggagcttgtgatttctctgccatggtcctatgtattgttatttttagtaactttataatcgttgtttatttataatgccagatggtaccggaatcattagatgaaaaatggttagagacaatgggcccggtgaaagactaagcataccaccgtaagtttctaaaattattggtagtatcttaggttagtattagtttagttcttaggatttttcttataattaattttaaattttttgaaatgaaagctaagaacattttattctatttatgattaaattttttaatttataaccaaaattttctaagaatcaatctaagcaactactgataatggtgctctaatcgcacgacagagatgaaaataacaaaatttggttttaacacatcttttttctattcttttcaaagaggtgtgttgggctgatacatgaaaaaaattgacactaagaaatgtgaatactcgatacaagacttagtggacttcgcaaattcagaagaacactctcgcagaaatacgacaaccactattgctatctatggatggtgtcctcggccttagaatacgttagaaagtttgggatcgaaaaagaaccgtctcgcccatttcacgcatatgccatttgtcctaaagatgtacctcatcgctctccttctatagagctaagttacatatctgaggtggtgtggttgaacaggattgaagatgatctttgttatatgaacatccggtcgctgccagtatccccattttctttttcgaatatcgagaaaattggattccagagataatttacaaaggatctgtcaaattctatctttaaacctactatgcttaagagaacaaagaatcgaaaaggaaggtggaaatgatacgaataaatgaatccgtcattcataatttttgtttaggttttgataagttccaagaaaacaaaagattagtttattaataaattcataatgaatatcaataaactacttacaacaaaaaagtattcctaactaagataaagatctttgacaaaaaaaaaaactaagataaagatatactataatctaaacaattatattctgttttaactaaaggtaacagaggtttttaattgtttgatgaattggacatcttcaattcttccaacccaatgcctttagctcgctctgcttcaattccacatgcttccctagcctgtatgataattagcatatgaattgtagcaactaagaggtttgatttatttcgtctagtgaaactagctaatagataggaaatgggtaatagtctccacccattagtcaatcttattaaataacagtcaactaaaatcaacagacggattagaatcgaaaagaaaaacataaacaaaggtgaagcaagaaatgcagagaaacattacccaagatctgaaggaagtctgaatccacctatacggacacgcttcaatgaatgaacctggaaaatgtcaaggcagaaagaattagaatgagtttagatatcacgtaaaagagatacaactatacaagtctattgaaaggcaaaagtgaaacgatttggatgaacataatcaaatctcataatacaaagtctgcaattccaacgttagttcaccaatgagtatgttcacaaggaatggggtatggatactgtattaactcaatgttttctcagactcttgtggagctcttagtctaattcgagaagaaggtaaatccaagattagcaaggagacattttcaatgcataagaagaaagctgacctcaagcccagcatttttcactaattccctgacttcatgatttcttccttcgtgaacctgcacaggtccacacaatagacgttaattgagctggaaaaccatgcaaacaacatcaataggttagatactgttaacgcgtttggtttatgaacctataaaattgtcaaataaaaaggctacgacactattttcattagaaaaatccacattcttcacaagctatacagggttggggaagttatatatctcgacttcaataacatagtttgaagttaggtcaaaactctggcagtcagaaatatagagaatcctaaagtctagataatgtatgtggagatactttgtcgttcctagatttaaaaatccaatgtgactacaatatgtcccatctaattttcgataagataatctaggaccagcaaacagcataaggactggtgacatcttttagaatctataacaactgagaactctaaaactgagaaagctttggaaaagtaccactatacgcagccttgctcttggtatatcatgctgctttggcatcaactcaactgaatctgggacacagtggactccttccaccattgtgccttcactgatagccattaagtgtcgtttgtgtatatcaccgacaaccgtggtaatatatctgcaatttcaaaaaagaaagataataagagcagtataaatatacaaaacctttgaactacttagacggaacataaatcttcaaggaaagaatcactgcttgaatttataaaactgagaggatcctaaaaccacaatttctggaattggcgactactaccagcaaccaaagctcaaaaaataactctgcagtaaacatctatctgaattgtattcattaagaaatatttggcacgaactagcctatttcttttaccttacttaaccaaaggttcttcctaccaattatgatcacctaatcatgagtgataacggtatataaaaggaatatgtaaactcactctttcggtaaactagatgaaggatgtgaaagtttctgtgcgaaatctcctgcatagcaagaagttgaaattctttttagaagaagggaagagaaacatagttccttgaaccaaaatgtacaaaccaagatatataacataacacatggagttcaattaatacaattaccatcatttgtaacaactatcaatcccgttgtggcaacatcaagacgaccaacagtaaaaaggcgaggtttgggagtccccggattccttttatcctacattgcaaagacaagattcttaaaccaagttttctaatctaacatactttaaaagacaacgttttatgtacaggaaaacaaaatgtcttacccaagaggacaagtactcgtcaaacaaactaatagcagatttgatctctttctctccggaagaacaaatatatctgccatcaggatgatgcaagaaatatcaaacaaaggttacaagtctgtgatagtaatcctgaagctaggtatgagaaaaagctatgaagaaggctaaccctttaggcttgttcagagcaaaataaacctttggaggaagtttcttaggaatacgatttccattaacataaataatgtctcttgatggatcaactcgagtctgcattaacaaaattgctaagctttatcatcaaaacatcaaaatttgattcccacaatgagaattgttttacctgtggagtgttgcagagaataccattaacagtaaccttgccatcaaaaataagttcttcagaggttcttcttgatgccactccagcagcagcgagaactttgcttaaacgttgaggttgttctttaaaattctcattgtaaaacctacgcgccgctttggatagctttggctttacctctgagtgtgaagctggagatgaggcggtggtggtggcggaggaagaggaggtagcttgaggttgtttcttcttagatttatctttcttcttagggttttgagtagtggcatcgatggcgaggttgtggattaaacgagcaggaggttgagattggagtttgagagtgccgtcatcactacggacgatccaagggatgaagagttgttgaggggtgacgccgccgtgagtggaggagggtttgggtttgggaggagcgaaggagatgtcgaattcaatgggctcagaggaggaggaggagacagagcaacggagtgtacggatggggaagaagcgaggggagagagggaatgctttgattttgaggaatgatgcagcgaatgatatcgacgatgatgccgccaccgacgccattttcgccgatgggaagtgagagtgagagagagacggtgtgttgggttttcccgatagggggtttgggtttatccgataaattcggatattttagggatttttatgaaaatagaccatatttttgaaaaaagtaacaaaatagaccagatttttcaacaaattaataaactaatctaatactaaatcgttaataaattttaaagttaaactttaaattccagaaaaaactataccttcaaaccaacttcttaactaaactcattcctaaattttaaaatataattctaaatttggttatgacaaattttttataaaaaaatacaatcagataatcatttcaaagatttttcggcgaaatattaaataggataaagagccaagaattaaaatctataaagaatgaattggattttagagcacgtcaagagtcgtctttggcttaatacgtatttatgtgagtttagtaacatgatttaaggaatatgagtaatcctttcaaaattgacaaaaaaaaaaaaaaaaaagagtaatgctttcaaaaggatcaaattttgttggaaaacatatactgttagacaaattagaacctaaccaccaaaagacgtattcaaaagatgataagtagcagatttgtaagttcttaattagaaatcttgtaacagatttgtgtaactcgttgcattccatatctttctcttcaaagtttcttgaagtaggagagtaagatgttattttgcagagtaaatataatttgcacaaataaaatcaactataatgtgaactctgtaaaactcaaaacgtaaacatattcttggctagttggtttcattttttttgtttggtatgaaatcccaacatacacagtataaagtcgtagcattatgttatctccaaatccaatacttattatctccatatgtaaaatctaaccttcgcaccataggtacatatataataacataacatggttactcgcaatttatgtcacgaacagaaaaaaccttgcaaaacatagttacttgcaatttatataatgagcaaaaatcatcacaaaaagacaaaatgcaggacattatgtattattattattttgataaaaggcttatgatattatgttgacaatgagtatcattcaacaaaaaaaaaaaagaagaagacaaaaataaaacattgaatcagtgattgatgtgcaatatcattcttgagctgtctaaaccttcactgcgtcatcattttggcattgatttgtgtatcatttttgcaaatacttgtgaggacgatcttcctctcctctgtattaatatagtttcgaaaataaaaataaaatacaacaatgaagcatgtggggatatgttgaaggaagcggagaatcaacaaagagagatcaaatgagcacatgctcttgagttatcgtttcagaagaaaagtccaaatgaacgaccaacagatctacacatcatgtgattctgttcttacgattgtgatttttttgccggttcacctcaattaactagtcatttttgcagatttcgaaagtgagatagatatatactttgatttgacatacttacaatctgatacatacatgttcaatgaaccattttgtttttattaatctgacctttttatcgtatatcaactttcattttgaaaaattagctatttgatattgacctaatcttttgattgattactgtggctttttccctcttgttttatgacgatgcaatttaaattcaccaatctagatactccatagcatatgtgatatatactctgaaaaggtgttgctagctaaatgagatgaatcgctcattcatatgtggttttgatttttgtgtttctcatgacacttcttgttttcgttagcctcgctaaggcgtcacatttcatgaaaccttaataaaaaagcactatttggttagtttgttttaatacatgatcagattctcagtttgtatttctgaccaacaacaaaaagaaagaaagattctcagtttgctgttaaactatttttaaaaaagtgggatttgagacaatcccacaatcctaaagctgatgtattgcaataataaatttaaattatctccgtcagcaagatatggtttgcctacccaacaatgaagaatagtataatcatattctataataagaaattgacataaacagccccctcggattatgctaattagtccacttaattacttttatttaggtgtatcttaaggacattttcttgtctatagtaagtaagataaagaagcaaacaatatgattaaaaattatgacgtcgtcgagccataaataaaacaaaatatgtactattaaataagcactgcttaatctggcaccaatcacatattcacggcgtaccaccacttgagtttgcaactcgtcgtcatccagtcatctccttgttgtcctaaacttgtgtgttcttgtctttttattccactcgaccaaaagggcgtggacacactcgcctgatacttgtcacacgtccttcatacgggctctctgctaataaaacaagatggttttttttgttgttgatattttgttgtttccgttttaaaccaaatcttactttcacattgttttcacttttgtcttacgatctcattccaatttcttaccaaacatggtttaaaaatttaattaaatatcaaaacatctttgttaaaaaaaaaacccccaaattggtactcttttccaaactattacatgtataagcgttgggtttagaaaacagtaccaatcaaacttaaactgggaatctataactggaaacctatcacatattcaaactaaaaatgggaatctataaccacaacaattaatactcaatgattaattattaaataagtttagaggaaaatgattaatataaataaaataagttaccctaaaaagtatttaatttgaaaaaaacttttgtaaagagttttattatttgtagaacagagaaaaagccgctctctctccctctcctttccactctcatctccctctctctatatcctcctcctatcagaagagctctctcttctctccgcaccgattctgatccgaagattttcaggtaacaatatcaatgtctacaacaccaacgattctcactttcttctttcttcaatcctttttcatttgttttctcttttgccaatcaatgatttaagattgaatgaaattctcacgcagcgatgcaatcttatttctctcaaaattctgtttctgtttcgaaattccgacaatcttaccaatgttcttttgtttgtctgttttcttgatgtgatctggggactcaatcattgaagcttagaatttttttacatttctccataatcctgttcttgagacagaacaagagactgtttgactttacaggttagatctcgtcaccagttatctttattcggatttgattgttccgacaatcttaccatttattttcttttacacgaattcaaatcagatttcataaagtgaaaaaatgaatcacgtaccgtctgatcaaagcttttacattgagagcgaggacgaagacgataggaaagattacgtagaagaagatggtggaagccattctgattcctctgatgatgtttatgatgaaaaccaagctcacattaagcctagctcatacaccactgcttggcctcagagttacaggtttggcttctctccgtttccactctttattgtggtagttaagtgaatatgtttcatttccgctaatattactccatttcttgatttgatttgctacgttttaagagttggttttgtgtgttcttgataatgtttgtaggcagtcgattgatctttatagtagtgtaccgtctcccggtatcggttttcttgggaataattcgatgacgagattcggaagctctttcttgtcttctggtttgataagaagacatactccggaatcattacctactgttacaaaacctttgttagaagaacaagcagatgaacaagcactaccaaaacatagacttagctctcagggcttactctctcctattccttcgaggaggggttcgatgcgaaaggatgagaaatcatccatggtgtctcatgagattccaatgtctcgtaatagctcatacggacaagctgtactaaatggtcagttcatcttaatgcttgagttaaaatatcgtgtcttctcttcgttaaaagtggttaaatagttttaagagattctctgatgcttggcttgatgagagtagtaacgatggtagagctaattgctgctttcctagaactatagagctgcaatattgattgcaattgtgttcattcaccgttaaatactaatgaaaatatgtcaacattttctctgttgtttgattttcattataggaatctagattgtgtgtgtaagagggtctaagaccgtcttcttcggggtttaaagatgtatgtctctttataaattaagtgaatcgtacaaaacaacaatcaactctattgtcctatagcacatggagcacatgttggaccaaacacgtctaggttcaaagaacatgattgagatcttttgctcttagtaaatttatgatcatcttgtataacatgtgggtcatgtgcaggattgaacgttctttgtggggttggaatactttcaacgccttatgctgccaaagaaggaggatggttaggacttatgatactatttgtatatggtcttctttctttctacaccggaatcctccttcgttattgcctcgacagtgagtctgacctcgaaacctatcccgacattggccaagctgcgtttggtactactggacgtatctttgtctcggtaagatgataaatttccttaaaatcttcctctatagtgaaggtgatataaagttaaggaccaaatagagaaaaagaaaactgaatgaactatatacaagatcccacacaaaaagagaattgccttttggcctaggatcaaatagaacaactcaaaagcaaagggcaaaaagctaccacttttgtttcaagtatgaagctttattcttatgaaaaattactatcacgcatgtgttggtgcaattagattgctataagaagtcaaatgagtagaagaaacctattgaattaataatacatctcatcaaatagagcaagaaactacgaatattagcttctttaatagtggaatttgatatcaatttttattaatttattccttttattgtttgtattgcagattgtactctacttggagctatacgtaagtacttcttggattcgtccatcacttgactttaattcatattttataaaaattggaatcccatgactctttttgtcaagaaaagtacataactacagagattccaagttgtgttttaaaaaaaacaaacaagaaaagagatctcaagtatgtgaccccatgttgtgaaacacgttagcaaagggtcccatagattctgccactagttctagatttggcactacctgaagctgctttaaacttttctctttgtttcattttgttccttcataaagcttatatacttttgacgtcactaaagtagcaaagatatattttagatggaaatgatccctaaaaagcttcttaaaagctactagtgtgaaatgattagttgaatagtgactatatagtagatactagatgatacatctgcagacttgacatgagtctattcatattttcaggcatgctgtgtggaatatataatattggagagtgataatttgtcttcattatatccaaatgctgccttaagtattggaggatttcagttagatgcacgccatctatttgcattgctaaccactctcgccgttctccccaccgtttggctcagagatctcagcgtacttagttatatctctgctggaggggtgattgcatcagtgctagtggttttatgtttgttttggattggtttggtagatgaagttggaattcacagcaaaggaactacactaaacttgtcaacattacctgtggctataggactctatggttactgctactcaggacatgctgttttccccaatatttatacttctatggccaaaccatctcaataccctgctgttctcttgacatggtaagctt

SEQ ID NO: 350 - DNA, 102312 bp, Arabidopsis thaliana
gaattcgattaatcctctcgttcctccggcggatccttcaagctcacggatgagatctaacgcaaactccgttcgattctcgttctccggtatcggactcccgaattcggtgaaaaaacgtggaagactcgccggagatccactatacacggtgtggccacgtgacaagaagattaaccggtcaagcaaaccgagaacacgatgactaggttgatgaatcgacataattacgatactaccactctgagcaatcctcttcaatactttaaccaccatgaaagcactcgttgaatccaaaccagaggttggttcatcgaggaagagaagaatcggatcgtgaattatatcaattccgatggaaacacgtcttctttcaccaccggagattccacggtgaccttcgtctcctataatagttttagccgcgtttctgatacctagttgatcaatcaaagcttgcacacgaagcttctttttagatttaggtaaacttctcgggagacgaaactcagctgcgaacattagtgtttcttcaacggtaagcattgggaagagaaggtcatcttgcatcacgtaagctgatataactttgagcattcgagattgaagtgtttctccgtttagcttcactgttccttttaagcttcctttggcaatccgattcgctaatgcatcgatcagtgttgattttcccgagccgctagcgcctagaacagccatgatttctccatctcgtgtctcgccagagatattattgagaagggttttagtttttggcctcgccgtttgagctatctccggatcctctgttctcctacgtggaaagagattgcggaagtctagttttggacgaacagagacgttgtatgtgagattgtcgaatgagagaacgaatggaactgtacgcatgtaaccatcgttgtagtcttggtttaaggactcgtgaactggagtctcgtctccaatagccatttttctgacgtcactaacgttcttcagaagttgccctaaagttgaatcgtgtatagaggagatggtgtttagctccatggaatcatcatcattagctgctacaatacgagccatagatacaatagaaaaacttttaaagagtgatttaacaaattaacggccttaaaacactctcataacgtactgttctagaagaagaagaagaagaagaagaagaagaagaagagacagcagtgtttattgtttagtttatgggacttttgttggatatgtataaatctgttatgttactgaaaacttatatagaagcgagagagtgcatgaagagacgtgtttggatgtgtgaagacacgaaggctatgttaaataagaaagtctgggtgagttgcatgggaaaagtatgttaggttgatattttgactgtttggatgtaaatgcggttttgatttattgtttatttatttggggaaggtgaagagtccacctatcatatctaaagtttcttaaagtagaaattaccaaatacgtttttcttcttctttttcttggggtaacgagaaattaaaaatatcggtgggaacatatgacacgtggcgaaatgggttttattgacttgtgaattagccaattaggtaaagggtgtttgttcatctaacatatgcatgggtcgaggactttcgtgtgagtttcccatagttgcctccattaatgcttatttcatactactatttttgagtaaacaaatgttcaaattctgtgaatttatgtagaattaatcacacacaaaaaatccaaatattttaccggtgcccgtcgcttttaaagaagagttttcaagtgattactacaatgtagaggtaacaaacaccgtgtgatgtctaatgtctatgcctagttagaagcatctaaaatctgcctttttgtgaaatcagtattcttgattgcgttttagccttttatatagttgacaaaaaatttgcattaggtaactaaaagcaatttttaaaagtggaaacgacaaattttctactatggtagtcaaagcttgaattacatgattgatgaagtagttaaaaagcgaaaatattatcgaaacaaaaaagtcatgcaaaattgatgccaacttgtaaatggtttgtacatgtgaaatagtattaatatatactcaaggatctaggcatgtagactgatgttttatattggtctatttcatagtcggtccaattaaaatcaaaacgtaaatctatattaaatggttacctacaaggctagctagcttagctacttcacttgccaaacttaattaaaagcctagaacttaattgaaagcctaacactatgccggaaaactcttcgacacgcacatgcaaggttcgagtcaagttatctaaaataaatataaggttctagtcaactctttgtaacaagaatcttttggactttaaacccttaattcaaaatgctagttgtaacttatctgcttagtcgagtcggttttgcgaaacttatatgacaagagattaggcatccaaaaccttattgagtaagtcatagttttttaatgtggacaacgcctgacgcatgtctacattacctatgtgtgcacacatatggtaattggcaactgcaagcataacaatattatatcaatcatttatcgcaacctcctgacgaactagctagttaagatagcctagccattctaatttgaaaattttgtctcagctttaaatattgtgtggtgtgccatgttctaggttctttctatatagtgttataccagtttaactggtgcatctttggtataatatgtaatattaatagtaaatgctatttttgaagatctttatttgaattgatgacctaatttgaaaatcatgttccagtgttttctagtttctaactataacagtactgcaataggtttctgttgacaccttagtgtagatttgtaatcaaattaaacaaaaaaaaaaggcttagtgtagattggtacgatggtatttatgctattatgggcgaagttctgatcactgaaagtgaaaagctatccgatagcccataaaatgaatcgaggttttatttatccaaaataaaatgaatcgtgattttggaagttttaaatagttagtaaaaattttgaccccaacaaaaaaaaagttagtaaaattgcgggttgatgtcagtagtcaattctattcgatcccaatgctttttgttagcttgtttcttttgacgggccgctttttggtacctaatgtagtaatatcttaacttcttaagtgatattactctgaatttcaatccaaactttattcataatatattgtaaaaagaaaacttgtcgcataaattgtattgagatgggtcaataagatgacttcatttttttaattgttaaagaagatgatttcatatttaatgcgatgcatgtgggttaaagtcaaatgggtcaccaattaggtaatttatatgtgaagatattatcggtaaaggtctagcttgttgagttaatgctcaggtacttgttcatgcacgacggaacttggataagatcatatgaattcgatgtaggatgtggagtctttaatatcagtggcatctctttctcttacgatcgtccttactatggtgtgcacataagagattggttaaaacatcaattatctagccaaaaattcgaaggattaatttaagagattttgaacaaagcatgattgatgtaattatagagaatgtagcgaagcttttatgaatgaatataacgtgcgaatagtttgataatgactcatgtcattcgctagtgttattaatttagttaggcagtacaaatcagcgttatccgacacaagctttggggaaaagaatggatttttttcttcaaaacttgctaccaaattgatattgttggacaatcaattggtacacatactaatcacgaaatccgcatcatcatgaaagtcacataatattggtttctcttaccaaatattctccaatcacattgatttcaaaaccaattttgaacgtaactcactatcatattcctacctttctagaaatataatcctaggcggtgttagtggttaacatgtgtaagcattaaatgtgatagggaatgctttacatttccaatttcattttgacttttagccgtaattaattttttgttgactttttgcctactaacttctaactgtatttcccttcctgtcgccacgatcaaaggacgggaaagttcgttctatctatattacaaaagcttagaattgatttggaccactagcttttaaaatatttgttaaaacactttgtaattactagttaattactacgacagtttacatgtaatggttccaataactaatgacgtattagtagaattaaactgtaaatcactattttcgatgtgctaaaattattttcaatttcaattacatgtaaaggttatcgccaacaacatgccttccattttttatttttttgatcaagacatgtgttatacacatttaaacatagatcattaattgtctaaaaccatactccattaactttacccaaatcatatcaactctcaactttttttttgtttttttgaacttccctaaattgggccatgtttgcataatcggcccctctggataatcggggaagtaaatatcctggttatttctagtttgaacggcagatttatatatattttttcaaaaaccctaaatttttatcttcctttgagagatcacgagaggaaacgaacaatggcaatttagatcttccacgttatttgtaagagaatatactctctaggtttccggacaagtctctaagataactgccatgtacttgcaaactatggaacgcttaaccaaagatcgtggattcgtcaaaaaacgattccaaaaagaagcaagagaagtgatcgtactgattcattcaagcttttattcattggacgttgatttcattgcaggccgccacaacaccgaaattaaactcagcagattaggtggtcttggcgactttgatcaaatcgatcactgcgacggtttattattattacgtaccaaggaaaataacaaggcttgttgtgtgtaacccgtgttcgggacaaaccaagttgatccatgctttgaatcattacacgagtgtcatctttgccctcagataccatagagaattgtgcgacagctacaaagtttgtaggattttggtagtccaaaaatgggatattcggagctaaggtggagggctcttgatgacgtctttctcggttgcaacatacaatctcgtggggtatctttaaaagggaatacttattggattgcatcagaagtcatcaaagacttttcactactattaagtttcgatttcacaaccgagagatttggacgcctgaatcttccctttctacgtcttggttatgagattttggccttatcagttgttaaagaagaacaactttcagttttgcaacagagattggatacatcaagggtagagatatgggtgactaccaacgataagattgatcaaaccaaagtcttatcatagagcaagttgttggcagtggatttaagcacttattatgaccataggtttatgtgtcatgtaagtttctttatcgaccaagagaataatgtcgccgtttgttagtacaaagaacaagtatacatttttggagaggaatagaggatcatcactacggagatctcgatattggaggtcatggaggcgaacctatttttccagcagtgatgtgccaaggttggttcaaatttaacctgaagagagtcactgaaagaaaaaattgtcaaattcggacgatagttaagttccaacgagatgaaagatcgacaaaaagccgaccaacttcctatgaaacaacaattggttggaagtttttgacaagatttgatgccaaacttggttatgtccatagtccagaggcaaagaaagtataacgtaactttttacatctcatcttggtttttttttcatgtcttttgaaccattagtgaatttgaattgatcttatttatgttttatatttgtgtacataaaccaaatttctggttcgtttagtttctaaaattttttgcagcaattaaaggttttcaaacaagacactagagaactgaaatatatatatacatgcaaagagattaaaaggataacacatagaaagtatgacaaagaagcttaaattatatatcaattgataaacaatatcaatgtataaaacagtattgtgatccctcctgtacaaacaacacaatagtgatgaagatactcttcttttgatcaaatatttatctcgtttcttctctaaccatttgtgcgaaaactttgctcattgagacccctgcaatatctcccactccattcacactaaactgcatggtcgagccaacgacactcgcctctggcttatcatccaccattgctgctttctcatcttttgcttgcacctgaagcatgaactctaggttccacaacaaatctcccattgctggcctctcaattccgttttgggacaaacacttctctgttacctcacagtactttttcacctcttcaagctttacttttcctacaagaaatgggtctatgatatcttccaatttccctttcttcaccaacttcatcgcccattcgatcaaattcactttctctctcggtagtgatggatcaatgactggtctaccacatactacttcaagcatcaccacaccaaaagagtaaacatcagatttctcagttaattgttgtcttgttagatactctggatcaagatatccaaagcttcctttgaccgcggtactcacatgtgtttgatcaagatcaggacctgtcttagacaatccaaaatctgcaactttagccataaaattatcatccaatagaatgttagcagatttcacatcgcggtgtatgattgctcttgtggaacctgtgtggagataatgaagccctctagctgcaccaacgcatatctcaagcctctgtctccaactcaacctcggcttatcatccaagtcatacaaatggtccttaagcgttcccttctccatatattcatagacaatgatcatttcactgttttcatcgcaatatccgattaaagaaaccaaatgtctgtgtctgaactgagtaagcatttcaacctctgtcttaaactccgccagaccttgtcgagattgaggagcaccacgtttcacagctacttcggttttgtctctcaagactcctttgtaaactttaccaaacccaccaaccccaatcactaagctttcatcaaaatcatcagttgcttccttgattagagccaaagggtatcgataaccgatctttgagctcgaaaagattaagctctcacctgtttcattcttcttaatctgatgatcatctcctctagaatgaacagtctgcatttgtctatttcttcttcttcttttcctaatgcaccaccaagacacaaccacaccaaacactaaagcaacacacaaagctgcagacaaaccagctatcaatccgacactcgtattcgaactcttgttactcgaagaaccatcaggtaaaatggcatcaaaagcatcaagactccgcttatcattgcttagcttcgaaatctcaaatccgttaataaaagaaacagggtacgaagaaacatccataactaaaccaatagataaattcaagaacccttcacggcttttcgctttacgcatcactgcatcaacgaaaaaaggagccccaaaagttccatttaaaacctctgtcatatcaatggttctaactttctctgagttcacaaaaatgtcaaaacgtatctgacgctcgaatccaaaaggatccactattatgttacaaaagtgaaaccgaacaaagtaatcgaaaccaggctcgactttgaatgtccaagtaagattggcgttagtattaggatcaagatcagagtttaacctcgtggcggttccatagacgtaaactggtgcaatgtcatcagttattccaccagcactgaagttaaccgctttgaggttcataaccggtgtaccgaagtgagctttataagcagaatcagaatcccattgcctccacagcttatcttgatcacgactcacactaagattccccatgtttacacgagaaacagtctccatcgcatgactactgagcttaagatccttctgtgtaccaatgagttttgcatcttcaggtatcaaagtctctggaagtctcaaaacttccaaagcattgatgaaagaaacagaaccagttctagggagaaactgaagcaagagactatctgtggtaacgtttaaaatgtattctctaacaacagaagtcgttgagggtttatattctctgatcagagtgaaattctgagccgagactgagaatctagctgtggttaaatcttgagaagcagagactaatggtaaaaagtaaatacgaatcaagaaccaaccgtgttcctcgatcgggaatctgtaagttgatgatgattcatcggagaatactcttgcggtctgaaacagagtcgattcatcacctgaattcgaatcggtggttccgacagagaatccttgaacaagattgttgtcggagacgaaggttctattgttgactgttacattcgtcggagatccacagttgatgaagaaagtgtcagaaacagaggagatgtgtgaagaacagagtaaagttattaaaaaacataactttagctctaagaatagcttgaggtttatcatagccaacgaagaacagagaatatcgtaatttggagaaaagggtataacgaattcgtattattgtggacaattttgaaggaaacagagtctatattcggagaagataatgataagaagatggagagaaaaagtgagagatggttgcagaaagatccgtgaacagagaaacattcacatcaagctcaataactacgcgtttacacttatgaattgaccaaacgaattaaaagtcttgaatttattgcaatttagggtttttgaaaagggtttgaaagcaaaaagacgagagaagaagagacaagttgattaacaaatctgttgacaaataaaaccaaagttgattaaccaatctcaaaaattatcaacaacgccacgagatagtgtgtgtgtttttattttttttggtatatttcgttttcaacgttttgttgatcaagctggaaattcattgagtattaagtttcgttatgagaaataatattaaactgattatagaaaaatgaggataatcccaaaaaatggaagaggcccgagagcatatagtgattggagacattgtaaaatgacaattaaagacaactatttcccaccggcttcaaacgtgccgttaggtttgtagtggtcaagatagcgacagaataattgtatttcttgaaacagtcaaatatttattttgtagcatagcaatttgaattttatagaaattgttcaagttttttggtctaattattttcagacgtgaattgcaataatatttcaataaatttatacattttcatatatttatcaatttttcgtatagtaatctttgtgggttttgttatataccaatggaccctaaacaaatatataatgtaaacactaaagtatcatatttcagtttggattcaatgaacttagaacaatttgttttattttccttaattcgtattttttaatctttagtttgttaattgaattatagtatccacttttattacccttaaccgccgacaaaacatatatatttctttttaaaatttcgtatgtcccaaacaagatcagatctgataatataaaatagtagcatatctacatacaaatactcatttgatcacttaattacatgtctgattgaatttgtagttatatgaatcaatgcatcactatattataattggagaagatttagactatttctggtggtgttgcgtgtacataaaacaaaaataaataaatgaaccttttttcaacattttatttttgtccggctataactaggagaatattcgtatatcaatttgtgttcgatgaattgacctttagccttgcacaaaatcgttcgtgtaattaactaatctcaaagactgttatagtttacaacacttacacgtttagccgtttaggcaatcattctaaaaactatcgttcaacatgtcaggacagtgatcaaacaacggtgggatatcgcttaatacgtccaaacacatagaaaacgtagccagaagataaaatccaaatttatgcataaaagttatataatacgtacaaaataaaagagtttaaacagtaaaaggctaaaagctggtacattaatccatcgagacgagatgacgccatgtgctttgatattctccacacatctatgtaactcggtaaaacagaatgattatcaaacgtttttttctttgttttcttgtgatgtggaattttgttacccgaacctttttaagaatttgtaacccaagcacgtttacaaggataacgttttaatgttgccagatccgatttcaaagggccttatataatgttagtttaaggcctaactgaaactagagaccatattcttggattgcaaaaatacaatttaagagaaaaaaaacagattgaagatgtcgttaatatgggccgcatggcaatgagaatgaaagtggttttcttttttcagttttaaaattttgagttgttggtttttgctgtagattttgagttttttttttttttttcggtgttttagattgttaattttgtatttagtttttgatttttagttactataatacacttgttatctacaattataattacaataatcgaggttatagatccattttcattatatataaaaaatacaactattaatatatagtatctacaattttacatgactacaataaatctcaaaacctaacccatcaatagatgataataacaaggtacagctttgatgacatggttatcaaacaaaataaaataaaagagagaaaagtttagatttttgaaagtttaaattgatgcacacgcactaatcaaacacacaaaagatatgctaaagcagcccacagctttgggttctcttgtcccttccctccctcctaaatcgccttttaggtttgattattaattaataacactatgttttaggattaatgaataatgatgcgatatcattctcgtcatttggtcttgctttgatatttaattcacagaagtgtcctttagttcttggaagagacatgcactggagaacttttttttttctctcatctatgttatatatttaacaattccattccccctaattttgttcgaacaatgaaaagcaatatatagtgaagaaaataagtacttatatgattaatcaataatcatatataagattaagagagatcaattagtacttaatcgtaagcctgtaaccataaaaaataaataaagagagatgttaattatggttcataggttctgatccgtaagtatcaattgcaatatattatttaatttaacccttatatattactttagatcacatcttatttcagatgtgagatatttaatacgctccttcaaaatgcttgtttttgttttaggatcggcaacatatccgacttaggccatcatacttagatcaataatttaaaaattcgtataacatgttaagattcaggggtttagaattcaaaaccagttaacacatattcttatgttactacaaaacctttcttaatttaaatgcggaaatcctaagtcttaacaaacaagaaaccctaagttcttatactatatgcattaaaacatatatggttttcgtggaaaggggacttcatgaccttgtatgtatgatttaagtatgtatgtatgtatgtacaaaagttaataggacttgattgacataaaaagaggtctttagaaaagaaacttaacatagaaataggggactaataagacttcggaactcgacctaacctctaacgctgctatgtaagtcattcatgtcttgtaatgatgctttatattctttgaatatctccatgactccattagtatactataaattatttgtttacacaaattacacttaatttatggagcgaagtagcaatcagctttctgaaagcatggatccatgtttcccgatatatatcctccttttcaactttaagcagtgaacctttctatagtgataacgacggtctgactcttaacactcgtgtttagggaatcatcatttcagtctctcaatcagtctccattaagttttatatatttatatatatatatatatattttatttaaagattcttttctgctaatatcactacttcaggtgattttaacatgcaacatttattttaaagatatgtttaaaactagaggtattccaccattttcgcggacattaaacgtacaagtaaattgttaatgttgtaaacttttcaaaacaaagagtgtaaagttttcattacatatccttttagcttacaaattgacatgtggtgtaatgtgcttagtttagtatatcaagaatttagtcaaaacatgtatctagattgttgataaattagaaaaacgacatgagcaaaaaatgttggacaaacatcataaatatctattattagtttattacaaataaattattttgaatgtcgaaaatatcacatatagttaccattttagtgaagaaacaaaattccttagtaactctcactttggtattaaaaaaagttttaccacatcagaattttacattagacgacatgtgcattggtttacaaatccgaacatatttgagtcggatctaaaaaaaacctcaaatcacaagtaaaatgagttgaatccaaaaaaagcattgtgaatttatgtaacctcaaaacaaagaagaggcaaaatacaaagaaaacaaagaatttattctctagttctctcactctcgctcaactcttatttccttcttaactttcttcatgaccgatatctttagttagcccctaaacatctgagcccattcttgatcatccctagctgcgattcttgacgctgacaacgaacagaatccgacctcgttaacagtactatactgtttctgtttctgcttctgctgctgtgattgcttgcaatgcaagatagctccttggatagaattctcaatttcagaactcgaactcgtacttctcttcaaaaactgcaacggacgaaaccctaaactattcgatgatttgttgttagaactcttggcagcttgcctcctcatagaaactgaaaatgatctcctatggcttccggaaacagaaccattactctgttttttaggtctctctgttttgatctgtccaaaaggctttactcgcgaatacctcaaaaccgaatcttcgtctgcaactctcgcagcggaagacgcgcatgatgactcatcagaacaacttgtcttaccaaagaacgatcttagataagctctcgaagctttaatcttcgttccgagacttgactgcttcatcaatcttagtttcgtggtccaagatttcttcttctcatcgtcctcctccaatgaatctgaatattctaggaagtagtcttcagggttaagctctttactcacttggcaagactctgccggagagacggtgcaggactcgaacggagtgttgctcgtcactggagttgtaaccgttccggtggctaaaggagtgctgtagaattcgtcgtcgaaggtgtaatcttctagaatcttttggaccatttggagacgtggaggtaagtgaagagggagaagcttgcctttgtagaagagttcgtccgcaggggaagtggttttgtctatctcaagaggacaaagatgagacatttggaactcgaactctcgagggtagttgttgctcagagttttacgtacgaggtttgtgaaagaagttacttccatatcaatgtaatcttcttctacactgtcgcatcgctctagataagccgccatactttttttttttatgtttcttctttgtggtatgttttagtgattagagatatgagttgagttcagagttggagaggtttgtttttatatatgtaagagagagagacagagagagtttagtgttaggtttctgattggtaaagagggtacaactttggaccgttttgttttctttttaaaattttacttacatatacgttaataaattacatattatatgaacaaggtatattaatagttcaaatgagcttcttggatggaccaccacttaaaacttgtactcaatattttcttagcaaaggttttgccaagattaaatatcctactaatttcttgtactcaaatataagatggatgaagcaaacaagttattttatgacacccttttcttttgtacagctattttgattggctctagaaagttaatgggttcatattaaaaaaaaaaaaaaagataatgggttcatcatcgtcatcagtggtgattagaacataaatttatgaaagaacgaatagggagacaaagtttagaataaaacaaaagtttccgatattattggctgtgataattttgttacttattatgtttctaaagatatgtgtatttggatttgttttaatgtggacaaggacgatgatgagagacattaatcttggtagaagcccacgtgtaagataattttctgtcttattggttactcgagaattaaagaactgcataaacaataaccaaatatgattaagggtgccctctatatgattaacaaaaaaatgaagataaacaatatgattgtgtcgtgatcaacaatacacattgataatacaaagaaatttataaatttagacacggtaagtaaaatgatgtttgcttcttcttcttcttttaggttcatcatgtaaattgtttattggaaatctttttggtttctagcagaagtcacatcatcccattgtacttatgttccaaaatccaaacattttaccagattcccgggtttaattttctccaccttttaagtactcctccatgataaactaatgagaaatttgttttctatttgttttattagtttactaattacatgaaaacaaaaaaaaaaaacaaaaaaaaagttaatttgaaagtttttttggcaaaaaaaaaaactctttttatcttgttattgaaaaactgttgatgactttcaaagttttttatgagttttttagcccatgggccatggccttgatgagctgaacatgatttaaagttctaaaccaaataccggtctgaccggtttacacgacatttggaaagttaccggtctgagtagaagaaattgtcccaattgttttctcgcgacgaagatggagatggaaaaatccatgccgagcacttacgttgcaggtattcgactgaagactattcatatattgaattctatatctccttgtcttcgatgtatataacacatatctgttgtcgatcgaaatttcaaaaattagcagagaaattaaacgaaatcagtagatgattgatttcagctttgattgtgactcttttgtattttatgaaactttgtttatgtagattttacttacttttttgtttacttagatagttaaaagttcgatttttgtagtagattttgcaggttttatccaattttttagattttactttcttgagttttttttcttagttgtttcataactgtttgattcagttaatcactagacttaataaaaagatgtgcaacaaatagaagtgggcttacatatttaatatttcacataatccacttaatgtaagtgatgaagatactaagcaaatgttctaactgtgaactttagtttcttacacatccaagtgagatacaagatgaagaagacaaagaggaagaagaagaagaagagccactaagtattggtgttccatggaacaaatccgagagatagttctccaagttatcaggcttaaagctcaccagcatctctatgtttctctccttactcagcgttggcaagtacttaccgtaaaactctctgtattccggtactattttctttgctatggaaacttttagctcgttcctaagttttgcatctgttatcacacatgatgattgtttcatataagcttcttcgaataccgcgtgaaacctcttgaaatgtgttttggcttcctctggtgatagtctgctacttgttttctctggtaaagatatgtatacattggcccacgctgcgatctcatagtttgcagcgtagcttctgagttttgcttcgtgctttgtgagccagtcgtctccgaggaggttcctgaggtgtgttgaacgaacggtatcaaccacaaactgaatgttgttcactaggaagaggtaagagagggaaacatccttgtaactctctgctttgatgtctagtttgcataggaaaatcaagatgagccaagctagatggaccgagactgcgtggttgttgtgttcatcttctaagattggagctgtgaaataagattctagcatacgtgtgtttttcttaagtggatgctctgcaagaatctctgataacacacggctgtattcagaaagagatgatatgaaactcatggttgatctagtcagcttgtgaatccctcctcctgcagttagtgctttagaagaatccttttgtattgttgactcaaattccatgagacttgtgtagattgagtccttgagtttcttcagcgatgagaggaccagagttttaacagcagctactgagtcaaagtggaatatcagttctatgtctggtctaaggtcagagattgctgcatagagatccatcagcctgaagatcctctctggcgatggttttttctccgcaacgagttctgggaacttgaaaagattgattcctgcttcgttcactatctcgtaaaagcaagactctcttattgtacttgaagcagagaagacatgatcacatagaagtttctctccgcggaggagtgttatgacaccaatctttgcagctttgatccagttcttgatcatatgctcgagcacgtcccagtccattctgttgaaccgggagatcttgcacttttcgataccaagtaagtgtagcccttcatctacaattgactttctgatcaacttatagctctttatgcactctttaccatatccacagctgatcatagtctctgctatgaccttgaggtctgacatcacaagtgctgcagctttttcgaccttagtgatcgtttcaccagccttcttcagctcatcttcttcttcatcatcagaagattgcataacatcttcaaattctgaattgcttgaaatggaggagtgaccagagacagattcaggatcaagttggtctcggtttgaagacagaatctggaagaactctttttcgagcctggccatagcaatctgcatcaggtgctgtgcaagaactagcttggcagattttgagtgctgagagataagaaagtgcatggctctgcgtaagtcacggatgcatctgatgaattctttggcctctcttctgctatgactaaacagagagatgatctttgtgtaggatggtgagttcggatcccatttcttgatgattgattctgcggcctcaacggtttcctccatcatcgactgagaaaaagtctggttgagaggagaagccgggagagaagtgaatgaaggaaaagaagaaaggaatgatttaggagaagaggtagagaaatgaacagacttcggttttttcgacattgataagattttactacttactactcttctttctgaatatgtttaatggagtcacttgtgtcttctagtctcttgattgtctttgtaaggtacacttcaacattatatagagagatagtttctcaatgtatgaaaccaatggccaatacaaagttttgactgactttctctattcatgcaagtttttaatattcaatatataagtaatgtttcatgtagtttcatactggtgtaatagttgacccaatacattagttttcttttgtgtttaatcatttcgattcttaatacttcaaaattttcatcaagtcattagatggaagaatatattatagttatagtggctttgagtctattgacttagcaagaatttcgaaattccggtgatttatgtttatcttaagtaggatatgatgtagatgattgacggttagagtgttactaaattatgtggtgttgaacaattcaaatgttttttttacttggaaatattgaaaccatcattatatataactattaagctattgtttgaccaacaagatcaaagatacgcactacctcagatattatgtattttacacatgaatatatataatgacatgatgacaaggtttgaaaatgaaatctacgcataaatatatatacaaatattttgcagacacgagttcattgaaaaagaaaactgtttcttgcttaccaaagtcaattgtgtatcgatgtaagcaagttctgcaataacgctgaccagcaataagctattctacgtatagcaacgaccacacacttcataaccaaaccttaccaaactaagtgcatagaaaaagttgttatgtttgaaaaatgcaaaggtttggtcacttggatttcggctcatatgctttatctgtgtgacgaatttgaagaatattcatcctacagaaccaaaagaactaaaaggaacattcaaaagaatagagaatgtgtgaaaacaatttggcacaagagattatgcgaaagtcaactcttgccctataagacaagtaatcacaaagtcaaatttctcaaaatttgtctttttctcagaaataaattataaacaactgatgtttacatatgttcaacttcaaatttcaaacacgattacttaacaaaactacgatagtctctgatatattgcggatatatatcgccagcccccacctcttcatcttggtctaacaaatcttagtgaccaacaaagtgattcacacaagaggacatattttggtgtatcaattcttcttcttcttctttttggtcaaaatggtattatcaattcttcaaaatctcagattttttacctaatgattctctattggtgtgtaggtttcatatctgtcaacttatcttgcaaatcaccgcatcactttcgtttcttttaatatgattttttctcgggtcaaacatatgtacgcaattaaaagttttctaagaaagaatcacattgcctagagtttaccactggttgagtaatatgctagagagagtcatgtcgctgcgcgatcgagttgggtttagttgataagcaatgaactgctcaaggcaagatcgagttggagtgaagagtaatgtatagagatcactaccctaacaagctaaccctcaactgagtaatataaaagatgctatgatccaataatataacaatactgtttttctgaatcaatctttcattaagatgagcttttaatatctttaacaaggaaggaaaacaaagcaaaaactcacacgagctcaaattcaaacacaaaaattgatgtgatcaagataaaagcttacaccttaatagcatacttccttattggaaagtacatttctttcttcttctccctctctgtcttcaacgatgcctattcaaatcagccagcaattattccattcagtacaataaaacacaggatttgttcatcacttctcaatatcaatctgaatcacactaaagaatatacaaatacctgatgcttagtgagtctcctcctgatggctctagtcttcttgggacgaagatcaagaggcaaaagcttcttgttcttgtatgcctctctcaaagcagacttttgtttctgtgagatcactgtcaacacctgagcaatcgacttcctcaccaccttgctgaaatcaacataaaacataacccatttgagatcaatgtgattaaaaaccagtgaccgaacaatccaacagtgatataactaagcaagtaagctactttatctatctatagaggataatgataggacctaggatacaaaaattacactaaacaacttgcaaaacataagcagaacttaggtaataatatatgtccataacaacacataaacataattaaacctagctaaatatgattactacataaccctgactaaccactaacaccagcaagatcataaacaaagctatgaagaattcagaatccaaaaaaaaaaagagttaaccaaaatcagaaaaatgtaacatttgatcacacaaagtgtgtatagaggaaacacatacatcttagagagcttattaggagcacctccagtgaccttagcgacacgaaggagagcaagctctgccttaaattccttcaactgacccgaaagatcagcttttgatttctccctcagctcatgaaccttgattctcgctgttcagattccatttcacaatataaaatcaaatctcataacctaaacgtacgaaattgtgtgttaacagaggaaaaagtttgagaatttaggcttacccattgcgtcttcgagctctctctagcgtccctttactcttttgcggtgttgttataagagattagaaaccctagagaaaaatgaagaagaagacggctaagagttaataatcagattttaggttatatttgggctttgactgtgagtataaaacccaacacacatctaatgggctgagttttatatcttatgggccagggattataaaatcctagtagtgaaatcttgtaccaaaatcatttattaatgcaagaaaatactaaaaaagtgaatagagagttgtataattagacacgcgccgattgaactgttattttttgtttttgaaggagaattatttgatttcaaatataataataacataatttagcttttcagaataaatttcttctcttttctttttctttttgacatgtctaattagattgtgaatgaaggagtaatcttagaagaagttttggttaaagacgttatcgtaatcaataatgtgatggaaaagtgtaattatgagtcgcgtaatgaaccaaccatacatttgtcaacaagttgatacaaagacataaatgcatgtttatccatccccaagttcaatattcaaagactaaattatgagcatttcataatgactcagtatgccatttggtcaaatgaaaaaccaagccggtcaagcaccaacggctgaaacattcatattcaaatatgaaaagtaaaatcttggactcgttcaatgtttctggtgacgtcatctactacgaggaaaatatcccaaccaaaacgcagcgtaattgcatggtcccctgtttttttggggtcgctttattcctctgtgactcctctcttttcatcttctataaatcagacaacaactaactctttccctctcgctctccgcataaatccctttgaaacaagatcatatcttaactttgtataaaaacaggacaaaaaaacagaggatcatggttatgtatgaagaggttagtgtctttatatatgtttccaagctcatgtagagctctgtgactgtagaaaagtgatagttattcctttctttttttgatcctataatctcgatctagcagaatcattctattaggtctaatgcaagtgtgtgtgttttttcttttggcaggattttgtgttgaactcacgaggcatgaagttgttcacttgtgtatggaaaccagtgaagcaagaaccaaaggcattgctcttcctctgccatggctacgctatggagtccagcatcaccatgaacagttcagtcagatattaaaatatttactaacgttgatcaaattgttattatatttagttatgtactaacgacataacgaattatatgggattaatcaggcgcagccacgaggttagccaatgccggttttgccgtatatggaatggactatgaaggacatggaaaatctgagggtctaaatggttacatcagtaactttgatgatctcgttgatgatgtctctaatcattattctacaatttgtggtaattctcttagaaaccccttaatttgatatgtgtttagattttcattaatatactaaaagaaatggtaaaaataatttgtagagagggaagagaacaaggggaagatgaggttcctacttggagaatccatgggaggagcagttgtgttgctcttagccagaaagaagcctgatttttgggacggtgccgttttggtagcacccatgtgtaaggttagtaatctcttttttcagttaattatttttagttatctttagtcttgcattatttattggtgttttaagaacccaaaattatttcatagttttcatttaatttcaatgatggtttaagaatcagataaaaagtccaaatcaaaaacgaaaaatagtttcttaaagtgggactaatccatatttttcaataatgttctctacttattggattggtaataaatgcccttagataatacagaaaaatggttcaatcactcttcattagtcatttgtctcatagtttctatatatacacaactacttgttacaaccaaataccagtatatataccactaattaaacaagtaatcaaaactcaattatcgaaatgattatatcaactaccgaaagtcccacagagataatcaaaatgttttgtttatcaactaatacaatgaatgttgttatggacagttagcagacgagataaagccacatccagtagtgatctcaatccttatcaagttagccaagtttattccaacgtggaaaatagttccaggaaatgatattattgacattgcaattaaagaacctcacatcagaaatcaggtgagtgatactgatctaagacgccaaattttacttgtaatatcagcttgttattaaccatatatacatatgatttatgtgaattttacaggtgagggagaacaagtattgctataaaggccggcctcgcctcaacaccgcctaccaactcttgttggttagcttagatcttgagaagaatcttcaccaggttctaatttttttagacatatttatggatatgtatatttggttatataatgaagaaaacattttacaaaccttgtttattaattagttatatatatatggcttttgaactaggtatcaattcctttcattgttcttcacggagaagatgataaagtgacggataaaagcataagcaaaatgttatacgaagtggcttcaagctcggacaagacattcaagctgtaccccaaaatgtggcatgctttgttgtatggggaaactaatgaaaattcagaaattgtgtttggtgatatcataaactggttggaagatagagccacagattcgaacggagggttagagagtcagctaaaacataagcatgatggattcttgaagcataaataagtgaacgatagcattgtttatgtacccttttttttgcagcggtttatgtacttgtgtagtcctatatttttttttttggcaaacttgtagtcctatactttacctacgaagttacttgtgaaataagtagtgaagtattttatatttacggaaaatctctaatccgtagcacaacaactcattaacaaacctcaaaaaccacagaaatttgtagatagcacagattcaaggtctatgcatagttaaccgatttaattacttttggaccaaaaattcaataaatgtgacgccgtagttctgaaaccatttacaaatttagagaaactaacaataaaaaatatatttgacaccacatatttttttagagaaattgactaataaagccagaaacatttgctcacatcatgactattctaagttgtaattttgaaatttaatttaaaagaaccactaaccatttaacaatttcggcggaaaggtatcaaactcggctaaaatagaagtgaaagtttaatgcatgaatatgctacgaaattgtgccagtttgctatattgtaatttgtaaatggattcatgtaatttgcccatgtgcacttatggaatatggtaagtacattaacgactttttgtcaaatagaatgatcttatccatatgaacttaactacttttctaattatataactcaaaagtcaaaactatttcactgactacacttatcctatcttaaattccatgtacacttttcggaaactacttgtttgatttactaattagtgttcgagagttaggaattaatttaaaaaatttcgtaaggtagggtatattttgtattattttgaaagttgaaggggtgaaatgaaaacaaagaaggggaaagtcatgtatattattaagttgtcagggtcaaacgatcaagcagaactctacaattcttctatatactttctcaactcttgtctccaagattgcatgagagaaaaaaaaaaagtgattgaaatcaatctcttgtgacgtaatggttagttgattaacaatctctttttcttagattaggtttaaacctaaaagtgtattttttctttcaaatttctcgtaatgaattggttttggtgtgcaggcgattgaaacagaggacatcaagtacgaagaggtgtgtatttatatatgtatgcaacgcatatatagaaaaggctggcgattgattgatgattatatatttatgtgcagagtttcataaagaacactcgaggatttaagttgttcacatgcagatggctaccaacaaacagagagccaagggctttagttttcctttgccatggatatggcatggaatgcagtatcaccatgaatagttgagatcaacccacttcacaaattctatatattataatttttttatttttttttacatttttacatctagcttttatctgagacaaggaaatagctaataccgcttaattaatctggtctaagatccaattcttagttaccacaacaataaaaaaataaaataacgttcaaggtgaatatgattggattaggtactgctagaaggcttgtgaaggcaggatttgcggtatatggaatggattatgaaggacatggaaaatctgatgggcttagcgcttatatctcaaactttgatcgtcttgttgatgatgtctcaactcactacacagctatttgcggtaacgttgactttgtgatggtaaaagtcaacttattgattgatatttttgtgtgacaaaaaaacgttgtaatggaaaaaactatataattggtgaatccatatgaattttcttggtcgaacgtgcgatgatgcaagcagctgataatgaatatcttgaaagttgtttttctatttgacatatacttaattatctcttggaatgcaaaattgaaatagagagggaagaaaacaagtggaagatgaggtttatgttaggagagtcaatgggaggagcagttgttttgttgctaggcaggaagaaccctgacttttgggatggagctatcttggtcgctccaatgtgtaaggtatttcactatttctcatcttcttaaaagtttttagttacctaatatatattattgttaggctcgttaatttataatatgtaattgaaattaaacaataactaaccgaatatctatacacattttctatactacgagtaaaataagtcgagcagaaataaatcgtgtggtagctaaaaaactaatggcaaactttgttcggaggtaaactcttatgtcatgagcaagatgtagttttacccactattctacaagaaacaatcaaatggaaaagtctcagttgtcacatggatatatgatcattgcaaattatgactatgttgtagctggcctttattcatacacaaagaagaaacatatgtataattataaaaatcaagtgtttggaatttgttgtagctggcttagaataatgagagatcatgttgtagttgatttgaaactcagtcaactttttttttttaatcattatataccgtttcgaatccgttaaagtatcaatccaaattactagattttagaaatgatagtttatctatcattgatatccatgtttatagtatctacatatgtagtcagctatgcaactaataatgcgtattttcttatataataggtaattttatagagtgatgtaaattaaatgcatataaatgaaacatttgtttgtcagtgaagaaatattgtaaatgtggaatatatatacatttgtcacagatcgcagaagaaatgaagccaagtccttttgttatttcgatattaacaaagcttatttcgattatacccaaatggaaaatcattcctagtcaagatatcatcgagatttcatataaagagccagaaattagaaaacaggtatgtttctatataacatttagtaatcaaaaatgattagtttatcaaaaatctgtgtaagaaactgatcaatatgcttgatttaatttttgtacattttgctatatacgactaattaaggttagagaaaatcctttatgctcgaaaggacgaccacgcttgaaaactgcgtatgagctcttaaggatcagcaacgacttggagaagagacttcaagaggtaaattataagtgattacatatatatatatatatccaagatttccataaatgcatatgatattcagattggactcaaatagtggtaattaagattctaacgttagattttttttgtctctgtaaaatataaatcatccgatcgagaactaatgcacataatgatgataataggtttcattgccgtttttggtattacacggagatgatgataaagtaacagataaagcagtgagccaagaactgtacaaggttgcgttgagcgctgacaagaccttaaagttgtaccctgggatgtggcacggtttgctcaccggcgagacaccagagaacatcgaaattgtctttgccgacgtcatcagttggttggaaaaaagaagtgattatggaaatgataggtttgagtcagagcttaaacagcgtaatgatcgtttaaatttcaagaaatagtcgtttgacttattttttacacataaaagtgttttaatgaaattctggtgttttgcattttgatgtttaacgttgctattgtgaattgtactatatattttaagaaaacttatactatagtccaataatatttcctaaatagtccaacaaaataaagaaaaagttttcatcatctagtatgattttaaaatgagatttgatataacatagccaataagactccagaggaaactctctgattcggcttggtttggctaatgtttttagacgcaacgatttacttagatctagaaccatcagattaacaacataaaacaactttaagctttcgagaaacggaaaaccacaaagattcttagcaaagaattcatcaatgtaaagaacattgtctaaaatattttggtatagaggtgaaaactcataatcttgggaagcttgtatcgagctagggttttgtttatcgtatcagccttcagtcccctatacaaagttcctggtccatcaaagtatatgtaaggtgtgtcagaccatacatgcctccatcgtgtggacaagactgaagttctgatagctaaattggtcggaagagaggagaggatttgttggaggatcacatcaggaagcgagctgattgagtctatattttcacttgcatctcttgctagtttgacatctctgtagtgatgatgagcgtagcagtcaccggcggtggcaccgtctccgtttccgccgtcgtctgcctctgccattacgttatcaaccaccgattgtaaacctagatatttgtttgcaatgacatagctttttgagtttttgggtttatcacaaagcccagctatatatatccaaaatattttaaaaagcccattactaaacacgcacaacttttttcttgtccggaactcaaaatatgtatgtacttaacaacttaatctgtgaaaaaaaaaaaaaaaaaatgtactaccaacttagtcatgttgatgtgatcatcttcttcttggattgatattactagttgcagaaagtgacaatttgatctattagaaaataattgcttatactacacatttgttttctttcgtaacagattggtgggatctttaagaatgtatcgtcatgattctgattttatagaagaacaactttatttaagatgtgcttacatattctgcgaaaaaaccggcatgttgaatggttttagtctctctgaaccgacaacaagttttgtaatttttaattttatcttacagtcgtcacttgaatcttgatcgccaatttttacatacttgagaagaaaaatatttaaaaagccaaccgatttattcgtcaaagcctcaaaggctacagatttttttagccaacgagcaaatgatatgcacacgcggatatgggggatccaaaaattaaaatatttgttggtgtaactttgaagcattgacttaaaaaatagtggttttatcatatgaaattaaacacttaaaaatttttgtggaagttgatacgggatcacaattttacaaaaacaaatagttagtcaacggagtataacttagttttacgtctaatattgttagagttgacattttataacatgttaagtagtagaaattgtagatttgactttctagattcttcatttgatggttcttatgatcgttcgtttataaatttgtactacagaaacgattaatctaacattattttacgatgaagaactaaaatttgaacatatagtgtcactaggaaaaaagattgattttcaccttaacatctccaaacgtagtaagtagatgtgagtttgatttgctaaatcctaaatgaaaaaaaactaacaaaacacagtcaaacgtgaaagaatttttgagggggtgtttctgataaatttacgacttaaggtactagtttaatgttattttgaaagtttagggggtggttttgaaacgtcgccaaacttgaattgccacttgtcagggaatattttatcattttaaaaagaagtaacaaaaaaaacgtgttgccgtgtagaggggtgcgaggagaatctgttaaatcgtcgctatcaaacaagaaacggtgtcgcattatcgtatagtcctcttcctcaaaatcctacccaatataaacagagccgtacaacaaaaaactcgatatcttatcaaaaactcgctctccatccaacaaaacccgaagaaagagagattcagactcaaatctctcagtaggaatggttagttacgttaagatcaaatactctctggtttatatctctgtcagaccatatctgaaaatgttttaaatttgttcttcttatgtaacgaattggggtatttggtatgcaggcaagtgaaacagagaacatcaagtatgaagaggtatctgttttatattttttatatataaatgaatgtatacatgtagatagagaaatctggtttttgattggtggctatttatttatgtatgcagagtttcatcaagaacactcgaggaatgaaactgttcacgtgcaaatgggtaccagcaaagcaagagccaaaggctttagtctttatttgccatggatatgcaatggaatgtagcatcaccatgaacagttgagatacttcagccaacttcatgatttcttatgtattcatcaaagataatagatttgttaacaattttattgatgtatatatgattggatcaggtactgcgaggaggctggtgaaagcaggatttgcggtatatggaattgattacgaagggcatggaaaatctgatgggcttagtgcttatgtcccaaactttgaccatctcgttgatgatgtctctactcactacacaagcatttgcggtaatgttgacttttatttgtgggggttaaaagtgaaatattgactttttagacctagactatatcttttgaagacactgtcaaaaccgcttttttttttactcattcagataattttgatcaaataaagaatattttcttttcgaaattatctatcatgtcatcatgatgctttttgttggatggaagcaacccatacataattgagtgtcttttgtctgactttatcaaaaaagtattgcctgatgtttgtttattattgtgtgtggttggaataattagagaaagaagagaataaagggaagatgaggttcttgttaggagaatcaatgggaggagcagtgcttttgttgttacacagaaagaagcctcagttttgggatggggctgtcttggttgctccaatgtgtaaggtatatgttcattctctcatgcatcttttcatatccaaatgtttattatgggtcattgcaatatcgtttaggtgatgtttttttcatacgtaaaatttgttttgtttaaaaaagataagttcaaactttttagtgggaaaaagtgagagttacatatgcaaataattattttttaaaaatatagaaagtagaaccagtatgcattaccagcctggcttgtattttataggggggattattagggaaagaatctaaatttatgcttttctttatttttaagaaatatatattcacatatatagaaataattagccagactggttcatatattataagagggaagtttgaatatgattaaaacagtattattttggtgtgatgcaactttttgcccactcaattcgaaaggaacaaacatatattatgtgccaaaatgttggttgtcaatttttcaaactggtcatcatgatgtgaaagatgctgaattattagtatagcaactggttaggtaattattgaggagactcagactttatttacataatatcaatttatcttaactaatcttgtataattattataggcatcccactaagtttgtgaagtaattatggtatggataatgctaaaagcatattatcataaaaaaataaatctagggtgtaaataaaatttattaacatgtggcgtgattaataaatttttctgatgtcacagattgctgaagaaatgaaaccaagccctttggtaatttcgatattggccaaacttagtggagtgataccttcgtggaaaatcatccctggccaagatatcattgagactgcttttaagcagccagaaatcaggaaacaggtgttttcacttttttagcaagacattctaattcatatatatgtctaattcaaaacatataggtaatgataaagtgaattaatgattataggttagggaaaatccctactgctacaagggacgtccacgtttgaagactgcttatgagcttttgagggttagcaccgatctcgagaagaggcttaatgaggtattcattgatcatttcattacttaagaagacgataatttatgaaagaggttagtcatgtgagtaatttcacgtaatggagcaggtttcattaccgttcatagttttgcacggtgaagacgataaagtcacagataaagcggtgagtcgacaactgtatgaagttgcatctagttcggacaagactttcaagttgtaccctgggatgtggcatggtttactctatggagagacaccagagaatatcgagactgtttttgctgacatcattggctggttggataagaaagttgctgatgaaagtggaggctttgaatccgagcttaaacgtaaaaatgatggtattcctttgaaagggtagttatcactttaacataaacaaataaaggatagttaaaatctgtttgtctgtttgtttttctctcttttcctgaattctgtttatgttaattagttgttaccatgtttgtcactctctgacttagtgtaatactatttaataatttatggatttgatttcacaagaaaatatttgaaagaaattgtttgattatgtgtggacgtgtacaaaatatggttaagagacgatccataagtcaacaaggtgcatgagacattctttgacacgagtagaatattggcacttctagtattggttccgttatcgaacaaaaccatctttacatgcatttgttagtaagtagcaaatcattagctaatcaaaataagaaaatataggatcagttgaatttctaactcaactaaagcaaataaacaacaactccactccattctcaccaccttaaaccaaattctccaatgcctctttatataaactcattacaccttccatcaataaacatcaaacacaaaccaaagacaacttgagtaaccaaaccaaagactaaaaatggccaaagctcttcacataaccatctttctcttcctcatatcctccaatctcctcgcatttatcaactccgccagacttcttgacgagatccaacctcagcctcagttagtccctaccggccaaatccccactgtggctccaaccgaagctgaggaggaggatggaaccgatgacaacccaggactagcaaccacaaccacaactgcatcagcagttacagtcccagccggtccagcagaggctacagagccattactagagttctttatgcatgacgtgctaggcggatctcacccatcagctcgtgtggttacaggtatagtagctcaaactgaagtgaacggaataccattctcaaaggccagtaacagcattttcccggttgacaatggagtcccactggtcaactcaaacaacatcaacagtgtcattaacccaaacacagctccacttctcaccggacttggcggtgctcaaacctccaccgtcatccaaaacactaacggaaattccaacgatgcccttagcgccaacagtctcccttttgtaactgccgggaaccttcctcccggtgctgccctccagcatctcatgttcggaaccataaccgttgtagatgatgagctaaccgaaagccacgagcttggctcagccgttatagggagagctcaaggcttttacttggccagttccctggacggaacaagtcagactctttctctgactgtattgctacatggtgagcatgaccagcatgacactttagacgatgccattagtttctttggggttcacagaaccgcctctcatgcctcccagatcgcggttataggcgggaccgggaagtttgaacacgccaaagggtatgccatagtggaaactctgcataaccaggacaaccagcatatcactgatggtcaagacaccatcctccatttcagtgtataccttacctacaaagcttgaagagaaaatgagtgttaaaacaagaaatgattgcttttttatatgttcttgctcactagcttccgcttggggcctttttcctttgttgcgcaaatttgatttctaaagaaatttatttaaatgagactgtttcaatcaaaatcttgtttcattcacacaaaaaactttgttgaaacactttgacaaatgggtacaagtcacacaataagcttttgaagcaatgtgactgacttgctaagaggccaatcctagacctgacaaagaaactatttgtatacaaaactttctcaaatgctatacatctccctttgatgatgcaagccaaatgcaaccactactctgtttctattctcaatcaaaatgtaagaatgcaatgtgaaacgaaaaaagaatgaaaagaatcactctatataccctacatgaagctgacaacctcagacaacaactcatccactatcatactttctaattcacaaaccactgactcatcatcagcttcgagttctaaccactcatcaatgtctatgactggcactttggccaatgattttttcttggatcgcttctcttgcctagaaagtactttccagagttcttgtttcagtccacatgtgcttagcgcagtgcctagcctcctagaaacgggtttcttccatgttggtgtagctgaaaaggattctagaatctctacaagacttgaattgactctgtcaaacaaaatctttctgtcagatcttttccaagatgtctctgtgtaatacttcttctccagtttctcgaagatcttgggggtgatgactaaatcccgtttgccaggaacgcaattcttgtccccaagtaaaacttcagccaagatatcatcaatgtaagaagaatccctgctttcttgggtatccaagaacccaattggttcactttccttgctttctttgattgcagaatcaagtgcagactcctcatcgcttgatacttccatcccactcccatctgaataactctcagattcagatttcagggtttccagctgattctctagacctaatgagattaacacaagtagtttattaaagttttttacattgcatgcaacaacaaatatttttacagctacaaaacttgttccttacttagaaaattgggataaggaagatcttcactgtcgtctaaaatatcttcactatcgtctaagttatcttcataaaacattggctccagaacagaaacaggactaggttgatgagcatcttccgaattcgtctgacattccggagatccatgggagcaatctactgactcagcatttatatcctgcggtttagtaaacatcaacataagcttcaagagttcagtaatatgcataacataagaagttgcgagggggcaatatgactcaaaacggaatgctaaatatgtcagttaaggaacacaaggtaaaggaaacaattagaaatgctctgattcctccatacagtcaaactttggaatggttataatgagatcaatgaagttaccttggaaatgaaaccagaagaagataaatccctgaacttcacatctgctgcaactctgtccctagaagtactaaccaccaaactggatttaacttctctcacaactctctccttcttctgatcacaaagtttcttcatttcctttggtttctcctcctgaaaggaaaggtctttccctttcttcctatctcctaaacgagaaccactactgaaaccaagaggagtgaaatatctcagagaattctcttccttgccaaatttgtgtttcagaggatcaatacttgttgtgtgaagatgtctcagctttgacttgaagttttgctgatcatatctcctaccaaaaatcctatgaggaggcttagctagtgcatcaattatacccttggaagccaacaaattcggtttctggagataaactcgacaaagttgcttcgttggaatcactgtgaaaccagaattagactccttttggttaaaccgttttggtggttgattctgtttctcaacaactctcagcttatcttgaaagagtccattaaaacgcatcgatctctcaaagacagaggaggatctaatttccttagactccatttcttttgagacctctactcttcgagaataaccagaaatgaagtaatctgcagaaagatgatagctttatgaaataacaaatcagagaaatgtcaacaagttcaatctaggagtaacaaatcaagagcaacccagaaaataaaaaaatcaaacctttatcatcaaaagattcgccgatccaaatctgggaaaaaagaacctttttaacgagaaaatttgaaggataattagatttgacttccaataatgaaaactgaaaaatggaaactttgcttaaaattttaggtaaacgagatttgattgaaagagagaaagaaacaaacctgtgtcacaaacaatcacacttgttcaaattgttgaagagaagaaggaaatcgacgtcaaagttggtcagttacacgaaatctttggcaatttaacaataaaattcgtctgtttatttaatttaaaagagtccaataattttggcatgggaccgttatataatatgatacatcatacatgcaaagaatatgaaaacgacgtacgttctcacttggattcttattcaatttcccaaaagtttaaacgacaacaaaccatttcttaggctatcatatataatttaagtcagatttattatatgcagatttattatttttagattttgttttattttaatttatgtggtacagtcacctgaagaatgacccgctttctccaatctgctagaagatgacccgctttctccaatctgctagaagatcttggagtcttacgcgtttctttctcccttttctcgctttcccttatctctcgctcatgtaatgttagagcggactgcttaactcgctcttctagatttttattttctgaagttacctttgtaaatacttttcctcttaattgggtaaccaattatggagtttctttttaattaatgtatggttgaaagaaaaaaaaaatattttgttttatttggaaactgaataatagaaccacatagataatttgacccaaaacagaagaagatagaatagacaaaaatgagaaacctacatattgaaaagtcactaaaaagacaactatatcattgctcatatatgcattttaaacttagatttaatttagggattattcactaagatctgattacaattatatcttattaccttagtatacaaaattatctattatgaaaattcaatggattgcattgactttgttctgatgacaattacaatcataaaattgaataatataaaccgattaggttaaaaatttacaagaaaagaataagaaattacaaaaatatgtatttggaaacaagtaaaaaactaaaactaaaatagactaatattttcttctaatttcatttccaaaaatcataatcatagcagaaaatataatagcttatcaaatatactccacaacatatttgttcacctttggttttcgaagatttttcaaatcataaaacagaccaaaaaacactcatggaggagagtcttagaccagagataaaaattccaatgcttgtaatgactgttattaaaggaaattgaactgatttctctaaagaataatatgattttcatttcttataaaaaacagcttacagaagaaatacatgatccaggctcgaacaagcctgaagccaacaagccttgagaatttcatgtcatagatcacttacttgctagtttcacaagatgttttgttcaaaacccgaaacggtaattgccacttcatattttattctttccaccatgtgaaactgcaaccaagtcttcaactttcactggtttatgcagctgcagacaaaccattgttctccatcaagttaggaacagaaaaacttatgagctaagccaacaagagatggatggaactatacactcaccgcttctgcaatgctaaaccaatgaaaagagcgaaagaaagtatcgtcctttgaaggaagactatcgtgattccagtatgtcaggttattgaatttcgccttcacttcccaacactggttatcttctgtgggcatagaagcttttctctttccattagcattcaagttactcgcttgtctaagcacaaagcctgaacatgtcaaacacaaacgaattgtcaataaccaaaacataaaattcttcaacaccataatgataccaatagtagcagattcttcaggacatgtcaaaactctctaactaaaatctccatcaacaggaatgtgtaacattcatccaatcatactttgataaacatccgtaagaaatcaaaagtttgcaactttttctcagtaagaaaaaaaaggtaccagaatagccactagggagtgagatagttgctccctgcaacttccttcctctgaaatgagcttcttccgtttttactccatcgatttcaacatctacaaattcaacagctttccacattaatctcactatagaatacaacacataagtgaaaaccagaaatacataaacatacaagtgttgtttgttaccgctagatttaggcttgaaatagtgggaaacttcaacaggaccatcaaatctaatgcagcaagggagctggtgaacttgactgctgagatccacaatggagttttcatctgcagcagctctaaagtctatggttcccatcagagcccacttgtatcaattcctcagattccttctataccataattagccaaagttaacaatttggacaatggttaaatcccaaacccataaaacactagtcaaattggtatgagcaatcgtcttataacagtagaaaataacctaatctaccaaaatttgattctctgttatatcaatccataaagtatcaattttgctacctcgaagatcatagtcaaatgaacccaggagagaaatatccctccagtcccagattttgagttttagttcgaacaaaactcgaaaatttggtgacgagaattaaactctaccaatacagaagagtagagaagaagaagcaaataaaacggaaatcacaaaatgccaaacacaagtcttacattacaaaatcaagcaaaagcgcacgacggagattgagagaattggtctctgagagaaaactgctaatttgtggttttcccaaggtgggttctaaaatggtctgaatgtttgatttttttttttttttcactgaatgtttgattatatttacttatatttatactgaaacaatttaaattatttctcttaaacacattttttttttatggttagtgtttttcttgatagattattgtacttcattttcggacatccaggcttgtaaaaaaaagcatgcataagtttttatataatcatgttttacgggtcaattaccaaacttgagtttctcttgatgatttctactggtaatggttgacatataagaagaaagatagtgcaggatccatcactggactggagataatcattaatcacaatctccttttacacgtgatcactctactagtcactaaaacctgaatccatttactaatgagagtaatggcttagtcaatatggttactacctctagagaatttgaaattttaatcacttgaattgaacataagatcatttattcttgtaatatcaatgtcagagattggatctataggcctgtcttcaccttcctccatcccagcagcaaattcaccaggttctctactgtactcatctgccataccaaacaaacaaacataactagaattatcatcctaagcaaactcccaaaaccacgccctgcagatccaacatttcgaagcattctagctctagctattgtaatgacacagcgagcacttacttgagaaaacagatttttaggaaacaatttctcatatctccaataacatcagatgagaggaaattaaagagcggtgcgggcactcaccaaacaaggtattgagagaggttgggggtggagtggcgatgaagttgagaccaatgtaaaaagccaaagctaacatcagagtcaccatcaaatacgttggcatagccaatacccaatacctactagggtagtaatggattcctatagactccaacaacttatctggaacatatgcccataccaagaagatgactgtggcaacaacagtcgatatcgatcctacgaaaccgtacacctctgagggtttaggtccatgcacttctgatgctctaaatgaagatgaccttctactgtctgtatcttggaaaccaggcttttgcttatttctcttcgagaagcttaaaactcgtcttggactactcactgaatgagcttcttcaatgttttggtcaaaggaagagactgagaaatgaaagaaagataatcagttgttggtttttctctccttgtctgctgtaactagatatcaattatgaagattgtaaatagattctgtacagatcaagatagaccaatttgaaggactacatataaacgaattaaaatgaaaactttattaacctcacttagtggaagctaatgaggacgatattgaaactaatcacctaacgaaacatgattgaaaacattaatctagaccagttaaatagcgtctccatcaaaactaaagactaatggtagaagattcaaatccatcacgttctagtgagattcaaggggttatcaatgaaaagatcgtacctttagccggagacatggctcgaaatgattcttcacactagaaatctgtctcaggaaaacgaaaatcagttaaggatcggacaaaagaaatgtagggagatatcgagagacagattgcagaatcgagacacgaacctggagaggtgaagcagctgagactcaaactactttgttgggcctcgaatgggcctttaaccacaatcatcatctaacccagtaagatttggatcgaatataataatcctccataagtgacaagaatttcatttttttgtttgcacttttcacaaaaaaagaaagaaagataataatggtaaataggactcctcctcgtctgcacaagacaacatccatttgaatatgtggatcagagaataaactactaatggtttttttttgcaatttgtgtggtttctattatgtcttctgcttgagactaatctaacatatgtcaactttattcattgagactggaagagaagttataatcttgttgctaaatgaaacacgcaaaacaaaagtaaatagttacaaaggtattcctttatctcacaattgtctactaaacaacaatacagtgaagattaatttgtaaagatatagaaacgtagagatctttaaaaaggataaacagctaacagtgggatctagcgtgctcaggtttgtgagtgtactcataatcaagatgcacaaaagcccgttcgatctcctctagtagctcgagcttctcttgcagcgattctccaatgtcgtgagccacttgcagaggcatgtcagctgggagaacaatatcaacctccacaaaataatgagagccaaatgtgtatgccctcactgtgtcaatgtgcctaatggctttatggtggttccaacacaggtaagttagtttctgcagatactctggtctagctgatttcccaacaagagagttaacgttctccaagaccgtcattgaccatgtccgtattgtgtataatgcaagctgcatgaattaagaaacaattttcagcaacgaggaaaaaaagacttgattttgttttcataaacttggaaacttacaatgatagctccaactggatcaatccaataatcaatgtaattggccaggattactgcaatgagtccaatgatgtttgtgatgacgtcgaagaaatgatcttgagcataagctttaacgatctcgttagtgaaggatctgcagtaaagaaccagaagcagtttgaccaatgtaacagaaagcatgatcccaactacccaactctcttgctcttttgttaggttgaactccttgtgctgtatgaaagagatttcgtgaataatgtatgactttcaaagctctagaccaaagctaggtgatcaagattcagacatacgctggataacattgtgcgaagagattccaagataatctgcaatccaagtgttgccatcactgatgcaaagactaggattccctgaaaggatttgaaccaaaaatcacatattgagaaatcggaaaaactttattgacttgtcgaaggtgttaatagttgcacagagatatcaatagcagaaaacaagcttgcttaggccgattcaataacataacatataatagaaatatactaatggaagacagatcatgtgcattagtctttaaaaggatgatacaaaccagtggttgcatgcgtttcttgccaatgggatactgatacgggttgggtgtctgcatggagaaggcggtaaaccagaggatgaagccagaaagaagatcaagaagagagtccaatgtagaggcaatgatagctaaagagccactagtgacagaagcatagactttagcagcaaaaagaagcatgtttgcaatgtttgatattctaatcgccaatgtctcgcttttagccaaattatcctgctcttcctatgtacacaaaacacaaagaaattcagaaaagtatcaatcaacaagaacaaatgcatcatggtttcaacaaatgtgacaagtagtagcctcatttaggctaacctttgacattccaggaacaaagccacgttctgcaagttcatccatttcagtaaagccctcaagcatctctacttgctgctggtaataatctgccacattgtcttccggacctgaaaacaccaagacacatagcttcacaaaatcatatttgatctcttcacaaaatcatatttgatcacaaaatcatatttgttgacattacttccacatccaaaagaaagattagagacaaaaatcaaggatcgggattaatgaactctagactaatcaataccaagattcaactaaatctcaacttcataacaagagtaaaaatatatctttgaagaatcaaaaatgctaaagatagcaaacaaaagaggccgaattcaaatgttatcagctgctgctaaagattgaaactgaagaagacgataagaaaatggaaatgcggagaggaggagcaaattgtttacccaaacaaccaagacagttgtgtagtttactcggagatttcttctccttgtgttccggtgaaacctggaaatcatcgaaatttaactgccaggaacggtcaccgttaccgtgaaactcgagcagcgagatcccttcgtcggaatctggactagctggctcaaccatttttccggcggcggagagagactttgtatttttttttttttttttttgagagagagagagagtggtaaggaaatgggaaatttgaagagacggcgagggtaaaatcggtaattaagaaagattgaggctagctactacgactgttgtggtagtaagacattcctccacagagatacttggaccagcctttagaagagacgtctctgctaattatccacgtggcgttctctcaatggatttgggatctcgcacgtgattggaggagtcatcatacacacgtgtacagttgagattcaactgcaattaaacgaccccgtgacatgacatggttatgagtcacatatgtgccctctcaaactctattatgtagtataaaaactgtattagatacaaccgacccaagatatagaagaacctttgaaaaatggtagaagccagttcagctaaagctttcttcttcacaattatcgtaaaatattagacatgtagagcaggcttgttgttctcttattgtcaagcgtaagtaaatgattattgtttagtttcgtgaccaattggtttgttttttggttagccattgttcgatttgctttggtttggtcaaagattgtatgctttcaagtcaaaccaaagctgactaaattttattctgtaataatttactttggaatggcaaaaccaaagaaaggtcatagacacaagagaagaagcaaatatgtttcttacgccaaaagacacgtttgtatggtaagacaaaagacacgtttgtatgtttcttacgccaataccattacgttaaaaataaactagtaacttaaatttacgctcactttctatttgggttttacatgatgattttggtcaaaggcctatttacaatgttgcaagcccatattatcttttaagtatctttttgtgcaaccaaaagaatcagtgatcttatgctcattttcatttttttctaatgaaatttttcgtcacttatggcttatgcgtccgatggacgattatggtaaaaggcccatttattcaatccaaagcttactgggttagatgatgattgtggtaaaaaggcccattatagacccaactaagtatcttagggtttcagtttccactataaaacttgttgcggcgtaagttagggttttgagaatcagcggcttcacctctccaggttcgtgtctcgattttgcaaactatctctcgaaatcgtcctacatttctttcttcagattcattactgagcttcgctttctgggtttctatctaaaaatttcacagatttcgtgtgtgaagaatcatttcaagccatgtctccggctaaaggtacgatcttttcattgataaccacttgaatcttcactggaacatgatggatttggatcttcttctactagactttagttttgctgaacccgctagtatctggtctcgattaatgttttctaatcatgtttcgttaggtgattagtttcaatatcttcctgattagcttcaactaagtgagattaatgtagtatccaaatgaattttgtctgtagacgtgtttctgagtattcatgtattgaagtcagatttgtatcaaagtattatatgatgcttaaactctctgttgtatgtaatttgcagttgatactaccaagaaggctgatcctaaggccaaggccttgaaggcggcaaaggctgtgaagtctggtcaagccttcaagaagaaggacaaaaagattaggaccaaggtcaccttccacaggccaaagactcttaccaagcctagaactggtaagtacccaaaaatcagcgctactccaaggaacaagttggatcactaccaaatccttaagtacccactcaccactgaatctgcgatgaagaagattgaagacaacaacactcttgttttcattgttgacattcgtgctgacaagaagaagattaaggatgctgttaagaagatgtatgacatccagaccaagaaagtgaacacactcatcaggtactttaaagagtatttttctatgaagccttgttgtgagattgattatgttcaatatatttgacactatggtttggttttgttacaggcctgatggaaccaagaaggcttacgtgaggcttacaccagactatgatgctttggatgttgctaacaagatcggcatcatctaagtctatctatctctgcagttataaagactattgtggttttgtctcttgtagtctcagttttgcttttaagatatttattattactatcatctggtaattgtagtattttggagcaaaaacgttttacaatacattcatgttgcagtttattgttgaattcaagttctatgtttttgacttatcaagattctctttttaaaactcactaacttataaactgtaaacatacaaatgcagtatcttctctaaccagtaaatgatcataaatcgatctatcaccacatattgtttgcatctttcattatccttttatccacatgttgatgaatggagaagtccgagaaatgacgaaaatcagaaatttcttatccacatagaacactaaggcaatgttcattgatcatcaaaagtcttgtgaattgtagccactatggcagtctcctcactctcaatccgctgtggtggtttctcaccaacaatctcccacaaggttaataacactgttctgattccagtctccatttctgaaaactaaaaatcattattgttcattgattcatatttcttaccagacagaaattctctgtccaaatccatcactcaaagcttgttgtttactttcatccggtggtaaggccgactcctcggagagtagtaagaaactaaactcttgtgacattttccttctcatacgtaatacattgacttgtgtggattgatttttattaaaattcaatagcttaccaaaaaggcagcggaaacaattggaagagaaggcaagctcttgtgggagtaggaactttagtggcaacttcaattccagcaactttgcttcttgctgaaggtaatctgcaaaactaagggttttgtttttgcctctcttcttcattcttttgggaccaaaagcctaatatgttgattcatatcatgtttgcagagataccaaaaagctactcgccttttgtggatcgagaagacgggtattcttactattacccatcagactggagggtgggtaatggctttgtttccatttttgttgaaagaatgaaacataaatgaattgagaatatctctgttctgcccttactacgtaggaatttgacttcagggcacatgattcagccttcaaagatagatacttgcaactgcagaatgtgcgggtcaggttcataccaacggagaaaaacgacatccatgaagtaggtcctatggaagaggtatgtattacacaccttactttccctctaccatctatgtcattagagaattcacattggttcatcattcttatatatgttcatcaggtggtttatgatctagtgaagcataagtttgcagcaccaaaccaagtagctaccatctacgatatgaaagaggtcagatgattgttaacatcttaaagaatcatcaaagttgttgagagattggatctttataaacaataagagatgaaaatgcagagggtggaagatggaaagaactattacacgtttgagtatggactaagaactcctatctatgcaaccacttcctttgcaacagtggcagttggaaacagtaagcacagattataagaattatgagatagatgagagaagaaattgaggaataaacaagtgttatgactgatttgatgttgcagacagatactacactctcatagttggagcaaatgagagaaggtggaggaaagtgaaaaagcagcttcaagttgtggccgactctttgaagatccttcagatttgacaaacacaagaaacatcttactcctatatatctttctctctctgtggttacaaaactgtctgtagataacaatttgatattttcatattctctataactccaacgatggttttggcattgtgagttagattctgagttggttcagtaattcaatcaaacttgcaaataaagtggaaataatgtatttacaaaacagacatatttcttcctagccattacacacttctccacctaaatcactcacaacaacaaaaaagcaaacctcagcaaataaaattgcctctaatcttcagtttcaataaacaaatcgatataccttaagagaccaatcaatgaataaataacacagtcctacttcattgcttagcctcctgaaagaataagggaatctaacgtctacaaactcctaagttgcttacagaaactaaccgtggttgtacaacttctgctcatctgctgtcatcccggacccgataagcctttgatcagatgcatgtcctgtaactacatccaataacgttatctcgtggcatatcacatgatggttggtatgtgactgaactaatctcaattaggcacatgagtccaatctcttttagatcagttgatgtcgccgtagattcttgccaaaatgtggttgcattaaacggacatacaatccgtttttacccgctaaacaatcatgcgtaccttcctctactattttgcctccattgagaaccacaatgttatccacatgtctcatcatcgctactctatgcgctatcagaattgttgttttgttccccattatcaatgtatcaagagcttcctgcacaacacggctcgactcggattcgatagatgaactcgcttcgtcaatcaacagtattggagcattcttcagcactacccgagctatagcgattctctgtttttgtccttgggtaagctcaacacctctcatcccgatatgtgtgtcgtatccgtgaggtaagctgctgatgaaatggtgggcatttgcaatccttgctgcttccttcatctcagcttcacttgcattgtgccttgcgtatataatgttttctctgatcgttgtggaaaagattatgggttcctgttgaatcagacccatatggcttcttaaccatctcaaattatatgacttcaagtctcgcccatctaataagacctgaccagcaactgggtcgtagtatctctcgatcaacgatattattgtgctctttccagaaccagaaacaccaaccacagctactgtttgtccgccattgactttgagactgaagttgcttagtactaacacttccgggcgggttgggtagcagaagtcgatgtttttcagttcaatgcttccatacacgttaggcggactaagagccgaggtatcatcaggttcgattgtaggaactcgatctattatttcaaaaactgaagcgagagatctacggcgcttgagaatgtaaggtgctaatccgaatggctccacaagagcaaatgtagcaaaggagaagaccatgtactcggttagagctgtagacaatttcatatatctgcggtctactgataacgcggtgtaccacaggaggagcgcattacaggcgaagagaagaaactgtgagaagccaaacgcaaagccaatagccatcccatggaaaaagctctgcctgagtatccgttggagttgcagtctgtagagttccatcaccttgttgccggcacagaacgcgacaacagtatatatgtttctgacagcatcctcgagtactaaggacgcctttcgatgcatctcctggatgccctttgagaatccagcaagccaaagtttctggaaattttataatgttgttagaattgcagaacaggcgaatacttccaagctaagtgcatgaggataggatgaccaaaatgaggtataaagtcaaattcacatcttaaatcgctacttgaactggaaaccttttgcataaattagacgcacattttgactgagggaagcatgtgactactaaaccggaatcgggaacaaaaaaaaaaacataagaaaataatttcaagcggtcttcttgaggctttgttggggaagattgaaggaacaaaacaaacctgggcaatggcagaaagagtaagtactggcaaagtcgctaatgcaacaagggccaaacgccaaccgagcagcagcccaataagaatggcaacgataacagcaaaactatcctgaataaatatggaaagcctgttgctgaaggcagctcggacaaaagtggcatcatttgctaggcgcatggataatgtatctggactgttctcttcttcgtcataccatccaacttcattacgcagcattgctatcacatcagataaagtcaataagttaagtgaaagtagtaaacatgtagtgaagtgagttaacagtgagttaacaatgaagaaaaatatggcagtacctgagaacatcattcgccgcactctctcagtcattttctcccccataataccaaagtagaagtgctgtaagaaattggcaacaactgtcactattcccatgcaggcaatgatcaaacaccacttgtcaacctcttcacgcaggtggcttcccttgctcgtatagtatgtcgtcactactaatgcaataacataagctagaagaggattgaaagaaccaaagattgcagcaccaatactccctaatacagcgtatagccactctggaaaactaagctgtgccaacctccaaaatgaaggtggctccttgtgttgaccgtccttggccaccttaacacttgctgaagtgtcatctgagtgaccaagagggcggctaaaagtctgtgaatgagagcgctcattttggggatctgatatcaaaaggggtgatataggggactccggatctgaaccatttgatttctgacgttgtggacactgaatgtcaatttttggtaattctggtaaccgcatctcgaaactatcttgtcttttgatggtgggttccttctcaccaacatccaacgacgagccattttctcccagtttctctggtgcagggctatgatcattgggcgattcttcactattaaagcacaattcctgggagcggaaaacattatgacctctctgaagagatggagacttagccattttgggcgatgatggttcttggaagccacgaccagctgaagaatccctctcagcctgaaacgcagcagaatcgttgtagttcctaactggcatcctgcaaggcaacacgagttccataaacaagtagaatcatcaaagtccacccttccatagatcattaaatcaaaagcagccaaacaaaattctcaaccacatggactttactacacaacagactttacaagttgttagatatgtatatggtcttggctggaaaatcataccgtctgggtagctttgttgcttcttcacacttcagaagctcagcatacaaattaccaaggttgattagttcatcatgcgtacccatttcaagtagctggccctcctccattacagcaatatagtcagcatttcttatcagacttagtcgtcgggctattattatggtagaccttcctaacattagaagatcaagggcttcttggacaactctttcagcttcaaagtctagtcctccagtgacctcgtcaagcaaaagaattgttggatctaagagtacggctctagcaatcgatagctttattttctgctcctctgtcaacgttaaaccagtctttccaacctagaggacaaacaagtcattttcaacttctaaaaatgagaatagcaacaaaaacacaattcataactacaaacttttcagtggatagttacctgagtttcatatcctttttcaagtgagctgataaatgtgtgtgcatgtgcttttttagctgcttcctctatctgatccagagtagcatctcggccgtatgcaatattctctcttatgctcagactaagcaaagcaggctcctgtgtcaccaggcctatttggcttctcagccactctaattttagatttttaatattttctccatcaagtagaacttctcctgtataagagaaaaccacagatctaatcagttactaatagtatccttcgcaggtgagtatccaaaggggattattcagaaaaactgatacatcttaaattacacatcatagtacctagtgtaggatcataaaaccgttccattagaggaatgatactgctttttccagaaccatttctaccaacaagtgcaacagcttttttagccggcacagtaaggtaaaatccactcaagattggaatttcaggtcgtgacaaatagctgaaatatacattccgaaactcaatatttccttggacagcagacaaaataattccctcttgattagtcccagaggatgaacgacttatcatctcaaaaagcctatacgccgcaattcttccttgatcaaatgaataaaagtttgtagccgcttgatttaaacccctgcacagcacaatatgaattcaattagcaaacagacactggagaaaaaaaacaaaaaagaagaagataagagagtaaagtagaatcggaagcttacagcccacttaaaataacagcaaaaagggctgttatgatctctccaccatttgctctatgatgaataacaaagaaccgaccaatccaaagttgcatagcacatgaacatatagcaagcccataagtaaatccaagtccaagtccttgcacaagactaatcaatataccatatctcagagttgcttggagagaagttgcataagagtattttgcaagagtttcatttgtaaaggcatacaaagtcctaacataagagactgcctgcacatatagaataaaaccttttgagcgttagaaaatatattcagatgcgatctgacactataaacaaaccagaatgaagaactcaaaaaatggaccagtaggggatgcgtttcagaagaacttgaactcataagactgacgtgggcatgtaattgccatgcatccaagtcgatgcaatatccaagttatggatgctaagattaattatacatgaatcctattataacaaaaccgaagccatgacttgggcaatatgttgagatgaattttaattcacgattgcagtcgcattaaaccaagataagtaacctaaacagtccgacctgcctattacaatctaaccctcatagattctgcctaaaattttctgaacttaaacaagttttgattcaaataagagtactgtaaaagatatcaaattttgcacagcaaaaattaactttgatgttcacaagtcaaagaagtctctctgttataactctactgcttaaacatcattgtcattgtcggaaacatgtcatttaatgcttgcaacagaattcgtcaatcaaattgcgcgaatttctaatacctgttcagcaatgctggctgcttcagcatatgcatcttgaatattctcagcaagtctgtggagaaatatatttgatatgcctccagcagcaacaatgaaaggaccggtggctaacgtaatgagggcaatttcccagcagttgacaaaaccaataataagaccactgataaatgtcgccatgttatgaatgtaattcccaacctgtaaagtccaagatcaaaaagattaaggaaatccatgaagatgtatcattctttgcaaaaataaagatattcaataggaaacttgaaaccaaattcaaaagtgaaacatactttttcacttagagccgactgaataagtagaacatcactcagtacttggcttactatatccccgttattcccatatgtatcaaagaaactcatatcctgatttagtagcacttggacgtactttgacctgatcacagcagtctgcctctctccagtcagtatccagcaagacacctctataaaaaaggacaactaattatggtgacggataatagcatcattgcattagaggaaagaaggacacaactagattataatatatgtaaggattttagcaaaggtgaacttaccaatccaaccagatatgaaaacacctccagcgatatatacaatggtcagcgaaagctgcacaaagggactcaataatttagacgagcacattatttcaggattgttgccactgtttcaagattccagataaacaggtttgcaaacagataagacctcgaataaaaaaatggacattcagaagaccatacatagaaatccctagaggtgagaaatacgaaagcatagacttagaagataggttgtcttcctctgagcatgcatttgagtaaaagaacacgtttgatgattcaaagtaggcttcccagctaagtcaagaacagctagcttccaggttaatatgccatcttagaagcaaaaactacatgaaaactggtatacttaactagtcctccaaacaaaagcacataggaatcatgaaacagaaaacctactaacaaaccaacaaagatatagagcaaaacaatcaaaggatttcacactctcatgttaacttcttgaactaatacatttatgaccaaagagtgccacaaagtttgtcgagataacagacttaaccttaatgtggcaacccgctaaaattacaatccagctcggaaggagaaacaaagttccaaaatttcatcactaaattatatactaaactgaatcaatagctccaacacctaataaattatccaaattccatatcccctgaagctcactcagctaggaaattagaaattttgaaaagccacagaagcgtattcaagctgacctacctcgaggagacgattgaactgatcatcacttatcagatgatccgaatcagtgggaaatgcaagaacctgaacaattttggcgaagtagtgcaagtaaacaataagcgcagtaccatgagcagcagcagcaacggatccaaaaaccataagaacccaatcaaagcgatcagcacaagcaaatagctgagagaaaggaacagcagcaggaggaggctccatctcctccggctcctccatttcctcctcatcatccgcttgcgccgctgttcctgtaccaccgtgctcagcaccaggatcaaggtaaggagatggagactcaggaggctcggaaacttcagaaacaggagttaacggttgtatatgcggcggagaccaaccaaacaaacctctcgaaatcatcatagctacgacgggggggaattatatcacctccgtctcgtgaattaagaaaccctagctttagagaattcttcggattttgaaattttcaccggatctgttaaaaagcttaggaagaaaagtcttggaatcggcgaagaaatcgtttccggtgagatacttttttttttttttttttcctttttgttagttttgattttattttgttttgttttgtttttaatttttgggttttcgtgaattatgaagaaaatgggtcaaagagtctaaaaaagtgaaagacagacaagtctttgtgtatttctgtgtcatcttacataaaattaaattttcttaacacatagttttaattattgaatgtgatatttcataataattaaaaatcaaaaagtaacggtcaactacggcgacgagttttaagttttgtttttttgtttcagatattcttcgtttatgtctatttatgcaacgattatattatgagacttgactaaatgatataagttgggtctagacaccactagaccggaccagattattgcactgcaacatttattaacgtctttgcgtcattactttatatacagaaggtagttgtcgacaaatattgaactgtttcggaatcttttggtaaccaattttgctgtattattgaaaccttgtatgattcgtgctctaaccaacccatgacaatgatgatcacgagagtttcgtttgatgaaatacttttatgtagtaattagtcaaagttaaagattaatcaccattagttataagattgtaagaaacttgagaaatgtgcgaggttggttagtgtgccgtggagaatgcaacaacagctgtctttgtttctttctattttcactgtcaaagaaagaagaaaggtgcgggtgatagaagagaagagtgttaccacatgtgagattagcttatatacctagtgggggcaggtatgattgaggcagcatggagcttctttttctgccagtgcatttgatctgttccctttttgctcattcttacactttttttctctctttagcaaaactgctcatatgatataatttgtttggaacttgacctttatagttgggattatacgttttcaaaacagttttactgttgacagattcaatgagatagcttctatttttctttaaattgggccacaacgggacagtagcccaattgacttcattgctatagaagagattcgattttgagtgaggttgtactagttcttggtggacttatgaatgtcactataaaatgtggtcacttcttagatagtctgtttaaaaaaacgactgagatcttgtcattttagtctagtaaaattgtttgtataataatatagaagtccatagatcgatatttctaaactaaatttgtactatatgttgtaccatgcaatagtgtgagtaatgagtattcttgtgctatatatcatttttcagcatgttttattacacgtggaacttgaataagtctttgttagggtgtccatttgaaagttttgtaccacaaggcctgtctgagccatttggggttggtgtaaaaatgtccagtatatttttggccacaaaattattgttaattagagtgattgttttgtccacgttatgtgtcttcacatcatccgttggatgatatataacattttgtttctaaacgtaattgatttactttaaaaaaagaactcagagcatttcgaactaattaagttgtactaagtttaagaaagtaattccttagcaatattttccgaggcaattgtattttaaccaagtccaacgagcaaacttgatgatgtaatcaaaatggtttagttggtttagcgttaattaatcgatttaaaatgaccttttgatgaattgatgcacgcttttctttcgttgacagctgaagtttccacacatgcatgcttttgttgaacaggtcaaaaaaagagaagaagacacgtacatggtttaaaaacgatacttcacctaagccaaatatttgggcattataggtttaagttgcaacttgcaagtgtgtacgagaatttggatcccttatatatatacacatacttgcgaaaatcaacttgatgttgttttaagtaatttatcatagtaagtacattacaataatacatactggtgaaaaatctttaatctgtaaacttgacgtagccaaatttaagttccgtttacacgaggatttcttgtatagcaagaaatggaatatatccacgcgttaaaatgacagcaggttaattaaagcatgttcatacgtgtatctttagacataactcttttgtcgtttccattccaagccgaagtcaagaaattgaagacagtacaagcagaggctgatcgatactgactatctcttgtagagcaaatatcagttgattcttatcttcttcactcttgaatccttccaatttgaccacttctagatcccttagtactactcttgcatggtcagcattaacactaacttcttcgtttgaactataagtatttgaatcgatcttacaaaataaataaaggtattagcacgacgcaagaactaacaaagtaacaaggttttaggtgtgtaacacttacagtaatgaagaggcgctctattgatggacaaagtttgagaaaagagatcaaagaattaatttgttcttggttcatcgagttatcgatccaccgcaattcttgtaacttgtagaattggaatgatctccaagatgatgatatggacggtttgattacttcctattaacaaagatagtaacatataactttcgaattatcttagaacaaaagaatttagagactaactttgttacctcgaacatccatctgcatagtgtaagagattgagaattcttgatggtcagcgagagaggaccgatgtctaacgcgttgttgtaatagcttgggccttgtgttacatcgaaaaccgccttggtcaagttgaaatgttcatgaatcttgatcaaaggtagagatccttggtaatgaaaagttttaagcttaaatgatatgatctcgaggtatctcagcttcgggcatcccgagatggacaagtgaagaagcttagttggtgaatcaatagtgagagaagtcaatctcttacaacgacaaatcttgaggctgtcaagtaaagaaaattccaaaaccattgaggaaacaacctcatgggttaaggaattaacggagtctaaacaaagcgtcttcaccaagaaaccgcttgagtccacacgtcttgggatctgatcgtcgatctcaagacgccagcaaaagctctcttctttcttagaaccaccggagaagaagaagctcatatgcatgacgttatgaggtgcgagaatagtggacacgaaggttgacttgtcaacgtgtaactccagcttccgagtgtttttagaaggatcatgctcatcgaagttgttgatgaagcgagagacagcatgagatatgtcttcgatggagccgttgtggctgtgagcgacgagtatggcttggttccaaacggacctaaaccgtgtggagaccaaaggggttagtcttgcggattcgaaagggaggaagctgatgatgtagagtagaagctctagcggtaggcacgagaggatatctggtttgtgttcctccatggttatttcactgtgaggtattgctttgaatttgctatggagaggttttaaagaaatgtacgtttaggtacgtacggatttggattttcataaaactggattctcggcgtcgatcatgttacttttgttgttaaacacacttcttgatatatataatattgtatatctttttgttaggtattgtataaaagctaatacgtacatacatcctatgatgacactgaaaaggaaaaaaaagtcctatgatgataatatatgatgtcttcattcgtatttcaacatctttccggattttggaggaatccaaatgttcatacggaatattcaaagttggttttgaagtcagattgtcatggatatataaacgcagagaccagatattatgactttttgtgatatgtgatcggtccattttgtttggattcatagattggaatcatagactggtccagtttcaatttttcgttagcgttttacaaaatattattgggctttgattgggcttgggccagtttggtaacgaactttgttaaccaagtttggatgtaaacagaaaaaacaaaatccgaatcaaaattctcaaatagccgattttgagcaaattcgatgcttaacgaaagggtttaatggcgacgagattcgatgtgaagacgatcgtcaaggacaagagattctggattgcttccttcatcatcgtctgggctgctggtcttcaggtcaatttttgcatttccaatgaatttgttgattctagggttttcttacattgaaattttcgaagctcataaatctttgattttgaactaatttctgtaattaattcgtgttccagggtcacatgatgtggctgcagaagcaagaatctttcaagcagaaatttggaacaatcgatgaagacgaccacaagtgattcatgactttattacgtctctgaaactgctttctttttttgtatttgtgagtcttgaggaagagttagatttgtatgaaatttaatcatacagactctggcttactatctccaatggttaatttgccaaatgctagtagtttttgattgctagagatgtctctgtattttgagattttatagtatttcagcttgagctttgtttagtggactagttcgagatgctttatagtgatacttcctctcagttagcagcaaaccaaccatctttctcccgaaacatttcctgtgaggttgaacaacaaatttcagaaaagggcttgtggtgagtcaaaggttaagttttggtgttgtttcagaagatttacttcagtgaagcttgtagtgtagagattgttgaatcaactataactgagaggcagtgtactgaagaatgaagcatgatagagttatgaatgtagtctctgtagttttgtgactcgtagttgtaggattatgtactagtcaaatttgagaaatcaagaactagagcctgttttatactaagagttatggatagtggaactagatataggcctagtgttgttgcttagaagaagtgaggatcttggattgagaattttggatgttttctttgggatttgtttcactgttgtcaaatttttgaagctttgaagcattatcttgttgcttcttaaatcaaccatcgactgtatcagaaaagcaccaaaatttaaattgaaacatagcgtaattttcttacaatcaaacgccgcactatagttttgaatggaaacatattacagataaaagggaaaatattttattctattattcttctaactttctcaaagtttacagtatattaagaaaagtttatagatatggacttgagacaagtcctccaaattcattctctatggacaaagaaaacgtcagcagatgtgcatattattctttgttttttctttgtcaactatatagaaattattcgaaattaaaatttttaagcatatattatctgcaaacagatgtggatctcattgtccatatcatttattttacttttctcatattttatagatagcagtaactagtaagtattaaagagctaaaagtagtcatagtagtaaatgtaattatgtattttctcacataattcatttcagaaaaaaatatatcatacaaaatatctatttgtttacttttattattatgtagggattcaaattatcagtatttcattcgttcatttttgattcattcttctattgttcgctcgacctaaagctttttctttctactttaccgacgtcaagtaggatggtgaattggtgatccgataggattttgaaatgactaacgtagaatattcgaacaaaacagcaccatacactcaatgctctttcagtatgaagctttctgtaactaaagtacaaaagctgtcacatcaagtacaaaactatctcacaacgtgatgctttcttatataatgagatgctttcttatgtggcgaccagaaaccgcaacatgcagaatctctaaaacacgtcccaattcataaaaagttttgatttgatccattatgctccactacccactaccgcattacatcatactcgtgctctaaaagcattattttccaataactttttgtagattacgtatacaaagaaagaaacatgattatttttgttgcagatttattggccagctgttggaaatatacgtaggaaacccacaagtggttgaagaggtgttataaattaagaactcaaaacactatataattttaagtaaaggtacttttagtagtgcaaaacatttcatatattgtagccggatacaaaatttaacaaagccaaaattagcattacaataacactctaccaataagcaacgatcgatccggtgtttagaaatcggacactcattgttttctcttattatattttaataatcgccgttagtcttttctttattttagactgattcattggtgttaggcctcgagatcacaacacttgcatcatttgtgtccatttttgcatttgcttttgatgggagcacaatttgtggtgtactaagtggtagctccttgtccatgtctgaaaatgatgaagatggttcgtctttgctttttccccacaaaaccgaatagagtccaagaactatcactattgctccaagaatcctacaaaaattattcaatcaatgagattaaactaattaaatcattagatttttcaagagctttttgaaagtttacgtaccttccaaggaacataacctcagcaagaattatagaccccaagatcgcaacaatgaccatgctcaatggattgaaggcagtaacaaacacgggtccacgagttttcattatcactccttgaacgtagtaaccaatccctgaacatatgactccctgcatcaaatcaaaataagatcattttatttgattgtttatatatgtaaccggaatcaaaccctcgattgtattttagtataactaattaatcttacaccataaacagcagctagtaatttggaatccaagtggatggcccacgcagatggatttcctctttcaataaaaagtgccacaatagtgctttcaatagaccccaaaaaacatatgtaagctgtcaaggatagctctacagggtacgacttaagcgtgatcgcctgcataaacaatcattttagtggtttagtactatatataaccgtttctaatatattgaacaatatataaatattggtctttaaattacttggagattgataaaaccggcccagcagatacaaccgatagcgatgaggcttgcgcctttggttaggtcttgtttgactccggtattggatgagtcttgatgaatgtcgtgaggattagcccaaggcaaaggaattaaaggtcctttcacaacagtcataagcattgctccaccaactgtcacaattgttcctagaatcttggcttggctgtgtattttcttgacgttaaccttctcaagtctacacaacaataataatgatctctttagaccaaaaaccaaaactggaccaaattaaattataagtttttaatacctaaagatccatgccataataaaggcaaaggcaggaagaacatttgtcattgcagctgtgaaagtggcggaagtgtacttcataccagtgtagtataagttctgatcaattgttggtctataaacataaaacacataaattcaattaagcatttggaatataagaaataaataaaatatgaaaaaccaaaatagtaattcttactccaataacccaagcaacaatatcttgaagaagatggatagcgtcatcttcggccgtatttttctgctcatgatattcaaaaagtaaattaaagtaacatgatcagaaaaagaagattaacatattctgcgtgaagaatacgtagacacaagtctctacaagtacgtacgtataggtaaaagcatacatgcatgcatgaccattatacaattttatattccaaatggacatactatacctatccaagaaataggcaaatggagcaatgaaaattgtagcgacgatatggcgatacgacgctagaacgtgaggactcatgccttggttcagtgcgaatttcgctatgatcgacaatccagcatatccaaattgtagagaaacaacagttatgaatggcttccatgtttttaaagccatatctcaacgtagactttaatttgttataaagtgatagattggaatatgatgtaagaaagagctgatggagaaatgtgggaggggttgaggttggttttataggagggtttttagggttttgtaatatttttcatgggaattaaaaaaagaagaaaatatgacttttgagttaggaggaattctagggattccactaagtaatgcaattttgatagtagagtatattgtatatgctattcttgctttgtagaatacaacatggttttgatgttatctctgatttcttataggagcatacataattatataagtaattggtggtcgtgatgatgatggaaacatcaactacaattgttacttattaaattttaaattaagcttccggttttggtccttggtttcttttaagtctgaacttttaaccaaggaaactgagtacttctcactggattcaacaatattcaataccattggatatcccatagatttcacattatttcatactacagaaaaacaagttaccgtggttacatttaaaaaaaaaaaagacatgtcaaaattatcccaaattaacaagtttgctgttaattttgctgttttgtaactaacaagcttaaaaaagaaatattattgtaatagctaagaataaaaatagcattatataatttaaaagttattttctattgtactaatgtaataattattatctgaattttatttttatttttctgtataaaaaaaagagaaaaaaataaaagagttagcaaacgaatatgacatttagccaacaaatgggtatagtgagattcaattgaggaacacaagtggatccgtgtcgattatgcttttgctgtttatgaaaaaagataagaagagatatataattgaacccaccaaattaaatattacttgaaaggagctggaaaaacaattagtaaatgtatgtccacataacacattttataaatggaaaaacgcattatgaaatccgaatcggatcatatgtggaaggaaagaaaacaaaataacttttggccaacgtcgtggttgagatttttggcactttatgattctccccacctggaacctatatctcttacatagaataataatagtaatgttttgataaaaataataagggaatttatacgtatctgacgaatgccacagagtttaattcccgacagcctaattttgtatcgtaggcatgttatgcgaaccctccctgacgatatatattccaatcatctttcagtgtgatttgctaaacaaaattaattcggataataaaattttgagtagtgatgatgtttgttactttaacttgttaagaatatactatttttgtcaaatcagttatgatggttagtgaaattcaaacctgatcaaaattattctttaattgtaatatatcatgcgtttatacatatcatgaactctctttttctttttccttctcataaagacatatcatgaatttacacaaattaccctgtaaaaagattgggtgataatgtcaaattgcccactatattggacaaatttggcaaagctgagttgacaccgaattaacttagctggattttttaagtagcggatgcattacaattgatttgatagtttattcgtaataaaatatcacaattttcttttactattgttattcgatatagaagaatacagataagaagtcatgaacccaaataaaaatatcattcaaaatgaaagactcaaaacaatacagctttcaaagccggatattagacggcatattcattacttaaaaggatattaattaatatctcaaagaaccaattaatggtggttttatgcttgacacttaactatatgactaatttttttactgggattacaatcatggttggtcaatgtaaatattttagtggattattgttagctcggtacaaaatcagttaattataaataaataaataaataaaaaaaatcttaagaatcatgacctaaaacaaaacaaattttaaaaaattaatatgaataggaaaattcagtatataggaaaagccaatgcttcataaactggaagtttaaactttaaaaaatccaagtagacattaatacagtttttttttttttggtaaatgcagaaattttcaacactcgaagactaccataaacttcaagaaatatatgaataatatctttaaatgtcgaatcatctccgccaaaacaagtggtatagtgaagcttaagacttaagatgattcatcatcccaccaccacctgtgcaattttgttatgtgataaatttcatctgaaaatattgttcttgaactaggagcaattgaggctatgaaaccaaattaagaagcaaaggaaaggatgacttccattgtctaagaaaagctttagcatatagtgcggaatttctttatttttttatttaatgtaaatatataaaagaaaactctagataagatagtgccgagacacatctcagatatgtgttggtgtgctcttcaggttggtttcgtggtttaggttttgccattattatatcactctttgctccactcaaatctgcatattttatgttaaattctgttcgatttggtacatactccgatatgtttgaatttttggatcagagatttaggtatagtgtgtataaattgggcggatgtgtaatgtgtttggaaaactaaatccgatgtagtatataatggtttggtacaattttagctagataagttctacgtttcctttaattaaatacagactaattttaacgagtacatagataattttttgttaaatgtaattctttcgtaacaaaaacaatcatttgacttcgtatgcataattacaccaacacacatatagcatagcatggtgacaaagctatatctggtcaaatcatattggaaaacattacaaagttgtataatgatgatcagactagaattaatttcgtttggccatggcaaaggatgagaaaacagataaaacagcaagacagatgaaagcaaagagaagaagactggccgatgcgtagcctttgctaaagaacttatccactggatcagtcgaatctaatgcgactaatgctagaaatgtgtctttcaaatctttggtcactccaaatccagctgcagaacccgtcgccactaggtatgatattaactgccaaattttcaattatgatcattagttaggaaaaaaaaacacacattttcatgaaagtttcgtttgattcaaagtatcaataggttcaagaaattaatttggttagaaattaattaaataccttgtcaccgtaaaaatcaagttgataattaaaagggtttttcactccggtggcgaattcggagattgtgaagaacagttgtatgacggcgtaaaccagtccaatgacggcagctgaaagcatatatcttcaagaaggcaaaaaaaaaaaaaaattaaacgaaaaagtttgatactcttcggtttaattaataaccaaaaaatgcccaaatttaaattcctagtttaattaataaactcataaatgacttattacaagcacaaaccaaaattctttgatcaaaacataacaaattactttagtttatgactattgatttcctcaatcgtacaaaccaactcgaatataaatacaaaaaattgtaaattaagagtttcgttcaattacctataagcataaacatctttgaaatgaaatttcaatgcgcttccttgagatacaatggtgacactgttggtgctgaggatgattagcgctataacaaggaaaactcctgttaaaaccctaagtaaaaggagtaaaaccttcaacgaaacagctggtggcgaaggaggtggtggtgccataaaattgatcagtacgttgaatgaaatttaatgatcttcttaaattggtaatcggagaggaagaggaagataaaagtctgagattaatttataaccaaaacttgctgccagagggataagagttgacttttgctctatggcatgggaccaagtaatgacggtaaatgtcaaacaaacaaaataaagatacttatgaaatataccaaagtttattgttgaagtcgtgctcaaactggatcaccacgtctagcttaccaaatcaatgggatacatatttttttcctataatattttaaatctcaaacttaaaaaacacaccaagcttaaattaagtgcaaattaaaattaaggtaaaggctattataaagaagcttgtgaagatatagttagttatctaccggcgaaacttcaaagccgtttatcatttttctatctgcaatatcaatattgaaaacagttctatttaggaaataaaatctagagagtttgactatccgactaaggccttatataacggcgtccaatttagcgatcaacgttcacattcgctactcgtttacgatgattacaatttctcaatactttcatttagttgacgaattgagaaattgcacacggaaggtttggtcaacgtatccaaaggaactcatagagcttctcagagattcgatggtgacacactgacactgacagtttattacataaacgtataattagagggaagaaaaagaactgccatattaactatgtaaaatgtaaattttaagcaccttttaaaaacttatatccaaaaacaaatgcacccttttaggcttttatactagttgttatgatacaagattacaagacacggaatgcgcgaattaactaagcaaaaatattaaataatgattatgattacattgactataacgataggagttgaattttattaatgtcaacgtcaaccatttttaaaaaaaatcatagaaatgcatattgtttattttttattattatttaattgcaaatttgcaatcgtgaaggactcaaaagccgtatataaacgaattatgtaaattactaataacatttttggaaaaaatgtgaatattcaggatataaaaatagtataatacttaaattattgttcgtacaagaatgacacgtaactgcaaacgcgttgacttcgtaggcctaattaaaacgcttatgaaattgccaataaacacacacgggaaaatagtaacatccaaacattgcatggaaaagagtttaaggtttgtgaaggaatttgagaattttcttccttactttttttttctttctgaaattaaaattgttttcttccttcaattttgatgaagaagaaaacacataaacgttgcaaaacgacactatacatgttgacttttggtaggcgtaaatgattcgttttactggcaaattatgaaaagttagggctttttaataacattttttaatgatccgacacaataataattttgcatgatgattagaaataagaagacttgaccttatagataggttggttacatatgttttcacagaaatagtactcccaaacatagccttgcgagatatgtagccaacaaagtaatatatgtatttggtaacgtgacccaaagaatcttaaaaagcgtataatcttattaaattccacgattggtgaattaaaatgaaggaagcataatgtagggttacaatgatcatatgtgtgtttatgagactggaactggtcgtttggaaagagcaagggatgagaaaacggataaaacggcaagagagacgaatgcgaagagaagaagactggccgatgcatatcctttactaaagaacttatccactggatcagtcgaatcaaattctattaatgctatgtatgtgtctttcaaatctttgctcactccaaatcctgccgccgaacccgttgcaagtaaatatgatattacctgtccaaatttgaaccagattttgttatatatcaatatacagtatgacttataattttaatgtatttaaagatagtatttcctcaaaaatgatataaataccttatcaccgtagaaatcgaactgataagtaagaggatgtgtttttccggtggcaaattgggagattgttaagaacagttgtacaacggcgtaaactagtccgatgacggcagcggacagcatgtatcttcatgaatgatgaatccaaacatatatgcaaaaaataggtaaaaatagttagtcaaatattggatacaaaattttcacagagaaggtaaataatttatttacctataagcatagacatcgttgaaaggcaatttgatagacgtgcttgaaatttcgagagtgacggtgttggtgctgatgaggaccaccgttatgaggaggaaagccgcggtcaaaaccctaaggagaaggagcactgtcctcaacgtaacggacggtggtgccggaggtggtggagccatataaatcttcccgttaattaatcgttacgctttaaagagtaagatgaaaatgattaaggctaagatgttcgaatgcaagacatggaatgttgactaatttatagccaaaatttacgttgactcgagttcgaagagttgatttttgttacattataatatttaaccataatgtaaaatatatatatgcacaaattgtattcttcaattcgtgctggagcttgctggaactcgatcaccacttctaagttctaacttagtaattgaagtcgtgatatattttattgacatatggtattaatttagatttaaaacagtttttagccaaggaattgtaagtctaaattcatagtcttcgtagccagaaggcaacctttgatattatttttattatctatatctttttttttttttggacaaagcttgtatctacatctaactgagaaaaaagaatgtttttctttgtcatattattgttctcaaattctgattatacaacttttgacatcaaatcataattatgcaatcaaacaaacaaaccaaaaaagaaatatgcgactagcgtaatttttgcgccacaatgtattttatatgcatagcaaatcattagaatcctagtacaactgtacaaagttcgagttggacacctagcagcgataattcaaaccatgtttccatctaatgtaacagtatagacttagtcgtctatcaattttaggtgcaatcattcgtattaaaaagaaaacttagtttttttttcatactgtttagaggaacaaaatacatgtaacaagaggtacatttttgtttgagttaaattttacaatttttgaatatatagtcaacgaagaccgaaaaagttgagtcaattcctaagaatcaatctgccacatgcatcgccgtgcttgaagggcggctcactgtcttcttgcttattactacagttaaatctttttttttcaacatctaatgctatacttttaatctataatatatattagatgtgacttaaggaatttcaatagttatacataataataaaaatgaatatttgttagtgttacaaactgtgtgtcataatcatcattcatcaggatttcaaaaatatctcaaaattgttgtaagttcatgtaattcgaaatgaatgtgcactataagaaataaatttacaatttaaaaaatgcttcaatactggttacaaaaaaaactttcaatactagtattatactacttacttagtcaaaaaagtttatgaatatggttttttctgtatgttaatatttttaactgaaaatagtaccgacataacaagtaaagatatctttatttaaagtaacaaacattaatttcacttcaaattctcactattaaggattcctctctttgtagccacatttcaccatcactactttgttttcgcatatctttaaattttgtatacgtagcaaactctttcgagaaaacaagatgaagctcgtggttgtacaattcttcataatctctcttctcctcacatcttcattttctgtactttcaagtgctgattcgtgtaagtgtttacttaatctagttaataattgtaggtcatgcatgtatcattttgaaacaagttttctgaaattctaagattttacatatatatgtgataaatgaattagcagcatgcggtggaaagtgcaatgtgagatgctcaaaggcaggacaacatgaagaatgcctcaagtactgcaatatatgttgccagaagtgtaattgtgttccttcgggaacttttggacacaaagatgaatgtccttgctaccgtgatatgaaaaactccaaaggtggatccaagtgtccttgaacgttctttgaagatcctcatcacatacatataacttctacgtactatatgtgtggaaatattaatcacattctatgtttgaaatatataaaataaaatcaatgcccccaatgttggaaatcttcaatgtgatatcttaatatatatcacgaataaaaaagtttaaatttctcaatctcatttttaatctttaatctaatttcttaacacatcaacgaatctttaatctttaatcatgtagataattatcagagcacctaaacattgcgccgttttgtgattatacaaagtaacatcgtgctgtttttgacttttgaaaaccacagatccaaaaactgtttactttcctctaagagaaagcaaagccgagtgagtccaagcgagttttgagagattcgttgactcactaccggagaacgacgctatgtcagagaccgccgtgtcaatcgattcggaccgatctaagtcggaggaagaagacgaagaagagtattctccaccggtgcaatcatctccgtcagcgaatttcgagaaagatcgacacttgatgtatttggagatgatgtacgagttgcttccgtaccattaccaatctcaggagatcaatcgtcttacactcgctcatttcataatctcgggtcttcattttctcggcgcaagagaccgtgttagtctctttctcctctctctcaaagaatcgatctttgtttttcccctgaatctgatttagtgaatttcatctataatttctgaaggttgataaagatgttgttgcaaagtgggttttgtccttccaggcctttcctactaacagagtttcactgaaagatggtatttttcttgaatttagttagaagtatgtttatgagcaaattgttaattagttagtgatcaatgaatgagatgttcttgttcttctctgcaggagaattctatggtttctttggttcaaggagttctcagtttcccattgatgagaatggggtaattataagtctatattccttatgctttatatgttacaagatttatctttgttttgcatctgtgtgggcttgacagtttagtttgttgcgtaggatttaaagcacaacggtagtcacttggcaagcacttactgtgctttggctattctgaaggtcattggacatgatctctcgaccatcgactcaaaatcattgctaatttccatgataaaccttcaacaggatgatggaaggtattagttcttagagcttaaaaaagtaaaatgcattttataatgccataagtttattacttattttctttgttctaagtcgtttaggctagcaatattctcatttacatggtgcaacaagtttggcttgtcagcatataatgattaaataagcaatggggtctgaattgtgtttgatacttttttattttgctacagcttcatgcctatccatattggaggtgaaacggatcttcgatttgtatattgtgcaggtaaggaatagctacctaacaggatttacataccatgtctttatactttacgtagagtatcaatctagtttttttttttttttgtggttcagctgcaatctgttacatgctggatagttggagtggaatggataaggagagtgctaagaactacatattaaactgtcaggtttacttctgatcttgtagttgcttttgtctttttttcttccattgatatttgtcaatttctgtgttgagaagacattcttgtgcaacattctttgtgcagtcatatgatggtggttttggattgatccctggttctgaatctcatggtgagttgaaaacaatttttctactatctcacagttgattttttccatgtgcagtccaactaagtggcgcatatgttattactgaattgatcattgaggacactttagataatttagttccttcatctaggtttctacttcaatggcaacccataaagaaaagaagtttactatgttcttacgttatgagggaaatgtgtttaattgactccactcgtgtatgatgcttacctacgttctgcaacttagttatgcaggtggtgccacttactgtgctattgcatcccttcggttgatgggatacattggagttgatctgctgtcaaatgattcatccagttcaataatagacccttcattacttctcaactggtgcctacaggtactgcttcataaaatctgttaactttcacctcataaatattacctttagattcgtaatggcctgagtgatctgaaattttttcttaccttgcctgtagagacaagcaaatgatggtgggtttcaaggtaggactaacaagccaagtgacacatgctatgcattttggttagtcccctcaacttttgctgtcaccgaccctaattgttctcatctgcttatgatgggccttgcatatttgtaggattggagctgtccttaaacttataggaggcgatgcattgatcgacaaaatggctctgcgcaaatttttaatgagttgtcagtccaaggtaactattctctacatctcatatctcagctgatattaatttctaaatttgtaaagtaactgagtagataggcaaacctgcaactaagctaatatttatttagcaatattactagtagcagcctatagagccattaggatagtttggtacattgtcttcattcatgtgtttacatctacgattcatgatcggttactgatgataacaatctgcttaacgccgccattgtttgtgcatttttgtgtccagtatggtggattcagtaaattccccggacaattaccagatctgtatcattcatactacggttacacggcttttagtctcttggaagaacagggcttgagtcctctatgtcctgagctaggtttacctcttcttgcagccccgggaatttgatgtttagattgtctcaaagtcacattcttttttcaccacattgtaacatttatgtcaacattccgtgtggtaacattgctaaaactcacagaatgaatattgtaaaccaaagaaaagcaaatttagttgttgagttttattttctgttctttttagactagggacgaaaaatcaaaaacttttaaatcataaatctgtgaataagatgttgcatgattgtgtaagaaagttcgggaaaaaaaaacaaaagactattgtaagattgcagtttcgctttgttaacgagtgagtggtgttgttgacgccacttggatggaaaagtatcagacataaactgcaaaaactgggacaaaatcctaaaggggaagagattccccacttggcctctcatgagtcttgtctctattcataaatcgtcttattccaatttaccggtcgatgttcttcaatgccgtaaaaagaatcattcttactgtagtgtgttttgatgcaaatgatctcgaataaatcaaattagattagtatataattcttttaccttttctcttcacgtgttctgtttaactttctaactccatattcgataaaacgagaattaattcctttttaaaagtgaaagtcggtttaggatttgagtgttgagttcatgcatctttaaatgtcaaccacaacacttgtggtaactttgctacaagaaaatagaatccaaagcctatctttattcgcgtgatttgactcaaaatccacaaatttggctaacaaattctctatccaccgaaaatttacaaccggtttaatccgatgacgagctagaccaaaaaaaatgttgatgattaaggacaattaaatcagactaaaaaccggtttaattctattaatcattcctggtttttctctcctagacctcatcttcttgaatcttgattaccaaatccgattcttgaactgtgttttaccaaacttttaccacttgaatttactaagcttctgcaatctccatcactttcttcttgtaaagcttctcctctgcatcccttaagaacttgaatctcgacaatggcgaagatgacggtgaatgtgatgatgacaatggagatgatctcactagtctattaaactcagcatcagaggatgactcaaacaaactcgagatctcttcttttctaccattacaagactccattagcaatggagttaaaggaggcgtgaacaacgaaggagaagcacgaggagtgagatatggaggagttatgacaccactttccatattaagaaacaaatcattcaaactctttccttttgtggaaaccacatcttcagattccatttcttccactgtttcttccatgattgtgaacagaaacctcggcacaagccctggaccaccaacattctcaaacccattattaagaggacactgttgttgagtgtcaatgggtttagggtttgagaaagaggaagaagaaggagaagaagaagaagggtttgtgctactactgcaacagaagatgaagagaagctctctggttccaggggtagaatagtcatttcgaaaatcaggtcttctcgtcgtcgacctcttcttacaccaaagcaagtaataaagctcagcgagaagagctaatagcaagcaaccaaagactatgcttagagcaagtcccacactgctcagagatctcatctttcttcttctagataagattcacttctcttgttcatcgttactccaacacaaagagaagacctttttatccgattcgaccaaatgtgaaatgcagaaggaatggacactatggcggttgtttatgattctgagaatagcaagggtttttgcagagacggaagaagaaaataaagttgggatgaaagaaaagcttgggaatgtggaaaaaaaagaaagaaaagcttgggaatgtgaaaatataaataatttcctaaaaaaggtgttatatagccaagtgtgtaagtgtaagtgaaactctcactcatattttagaatcaataaatgcataagtgaatacgaaattttacccttaatgaaagactttagcttctgaccatttttttttcttttcaatttatatgtcaaatgatgattttatcattgaagatgtatgaatcgaactccatgcatcattattctgacaattctactaacaattaaaatatgggagagatgactcgcgcggtgttgtagtatatggatcatgttcacagtgattcgtgcatatatatttgaaacatatgaaattacgaggaacaaaacaactctacttcattacaccattctgaaaatatttggcaagtttatctctattaatcctatattaagaatagaactccaaacctagtacactaaattaattaataaacttattttggtataaccacgggatggatgatggaagaaggggactttcaattttgactactttatgattttctgatgtttgatctactacttaactttgttacaaaaagaataccattgcaacaaaaaatttctttaatcacaaaaataaacattgttttttttccttttatcttggtttcccttacaaagcatcatatggatagcacttcaaggccttatagcccatgtgatgtgacgcatatgaagtaagagatgtgaacttgaaactgattataacacaagtagcctgagatagagtgagatttgttttgttttgcggttcttcatgttgattgatatcaaagtcagagtcagattagcctaccaaatcgaagtgtcagtgattccacctcaataatacaatttcgtaatgtgcatcaacaactatctagcctcctccatcaaccaatcacaacttcatgtagtaggctagtagcattgataatgatatccctttttagacttgtttccattcgtcatataccacttgatgacttgtttaaatccctttattctctttagtccgtgtaccaatatttttgcaaagaaagtagaatcatggattactcataactaacagaaacgttgagaaattggaaaatatgttcatagtgctaaggaggaaaactacttcttcttctcttctcaacaattgcaaataacacaagaaactaaaactgtgactcagtcttggcctcccaagtcacaatttcatgtttacaaattttctcctgcaaatatcatttcattttgcaaattaataagtttagtacggtgattatattcccttggatttatcaaataaaacccaacatatgagtccattatgcatcctcacatgaagtattttgcatttccttttatacacaccacaaaatatacagcaaacttcaactaaaacacaatctaataaataaaaaatagaacacttagttcccaccacagattttattacaaaaaaaacaaaattatcattatccgtattttatatcgtgcatcacaatttgtgattattcattgtattaacgagcccacacataaaagatcttaattatccatctacaccttaaaatctacggaccgtcttacattaatacagctagttcaccttgtgaaatctcggtaataccctcagctgcaaaagatagaagtttcatagaacggtacgtgttcattacccaacccagctttaaattttcttcttacgtgtgtatgactagacacgtaggtcccactcagcaccacgacaacccaataataaacatataaaaacaaaaagaaattaattaattttttttctttcttcatatatataattcgtttcttcttcctttttccccgagatttttttcctctgttcggtcggccattgaattgttgttgattcattggctctaaaacgaaaatgggaattctcaacgacgacgccgttttaatcgaaccgggaaaaatctccggagatcccaccgtcgttaccgtcaattgtcctgatgaatccggtctcggttcaactctgtgtagaatcatcctcgaatttggtctctccattacccgagcaggtcaatattcaattttacttcgtatctgtttaggggaatattctctgtttgtcgtttagcttcacggaatattcttctttatgattcgaaaaattcaattctgtttttcttattttgagggtaattaatatgtttgtaaaaatggtgtttgcagatttttcaacagatggaagatggtgttatatagtgttttgggttactccagatattagctctcctaaaattgattgggacagcttaaagaatcgtcttttatcagcttgtccttcttgcttaggctctttctacttctgccttcaatccaatgtctctaagcctccttccctttatcttctcaagttcttttgccgtgataggaaaggattgcttcatggtatgtgtaaagttattgtcttttgtcttgtgcttggtgttttctttatatggttgattaaaagtttgtgtttttttggtgattcgtagatgttactaaagttttgacagagctagagtttacaatacaaagagtcaaagtcatgacaacaccagatggaagagttttggatatgtttttcatcactgacgcaatgtgagttttcttcttctttctaattctgatgtttcatttgagagaagaaccaacattaacgttgtggtttgtgactttgtgtaacagggatctattgcacacgaaacagagacaaaccaaaacgtgtgaccatctaacggctgtgcttggtgagcatggtgtgagttgtgagcttgaactagctgggcctgagttagagagtgtgcaacgattctcttcacttccacctttggctgctgatgagctgtttggcccagatgggtttgatattagcggctctagctctaacaaagcggttcttaccgttgataatcagttgagccctgcacatacgttgcttcagattcgttgtgttgatcaaaagggacttttctatgatatcctcaggacttccaaagactgcgatgtccacgtacgttaaaactgatctctctaacattaagagaacctaaccttacctctgctaagagaagttgggacttctatggttgaaagatttgtataactcaagtagttcttgtttctttatccagattgcatacggtaggttctcctccaaggttaaaggttataggaatttggagttgtttgttagaggcacagacgggaataaaataatggacccaaaacatcaagccaacttctgtgctcgacttaaggaggaaatggtgtgtcctttgcgagtgattatcgtgaaccgaggaccagatactgagctattagtagccaaccctgtggaactatccggaaaaggaagaccacgagttttctacgatgtcacacttgcgttgaaatcactaggaatctgcatcttctccgtaagtactgtataataatacattgtgttctctaagctttttgaacggttattttcggtttgttttaagattggcattgcgttttcttgtaggctgagattgggagacattcgactttagatcgacaatgggaagtttatagatttcttttggatgagagtcgtgaattcccattggctagcctccgtgcgagaaatcaagtagtagatagagtcacaaagacacttatgggttggtgaagcggatgagagtgagctttcatgaacgttatgctacactcaaggggacaaagaaacaaagtcttcttcgcttgcggcttcgggtcgatgaaaagagtgatgcaagggggttgtgattgctgttgtgtggagctaatagcgttgtaaagctttggaaattgtaaaaggattatataaccgcaattgcaatgaatgcttgtaaactcactttgcaaaggtaacatttccgttgactaggtggtcactacaagagagcgacagagttgacccgagccagaatcgcaaacatgttacatttagccatgtagtggcctttgggggataatatggtaattagacaaattgtatcgaaatatatttagagtgttgccatcaaagatctctgtgtttttgaattctttttaatcatatactgaaatttgttttagttgtcatcaatatattcatctactactgtactaatccctttataattgagtttatataacgaagaaaaaggagatatagatgcattgacaagtccataattatgtttagttgtttaccattggatctgaaatagattcgaaaaattaaacggttaagaaaaaggaaacgcgttaattaaaaataaaaaaacgaagcggtagggttaatttcgtcgtttcgttatccgttgtcgctcgctcgtgcttcatcggcggctagtaatccagtgcagcagaggtcctcctatcttaacgaaagctgtgattctccttcgtctttcaatatcattcttaggtttttgaaattcatgtgtcgtaagaaccgaggaagatgacgacaccaatcaccgggaaaaactctcctgttaccggaaaagaagaaggcgaactatctacctccgacgacgaagtatcaattctcgctactataacttatattttctgctattgattttcacagtctgcgaatctggattctgttgcaccctgaacatatcaactgatctctctcgatttgtgtggtttttgagatctgcctgtgttcaatttgtatgggtttatagatttggggtataaattgtgttagttcagagactagagcttatttcttagtgattgttcgttgattatttgatttcaaagctttcgtgttgcattaattgcggcaatccactgtttccagaatgttttattattattgattagcagatttcaaaaccctaaaatttcaacgattttgtttttcttaggtacaaccaatgcaaacaagcacgagatctcctcttactgaacatatatcagcaaacacaaatatccaaaggcgtcaagctggtaaatattatttgttatatgtaacttctccatggaagttgcctctgagacaaactccttgtttttcttttcattgtgacttggcaggaaatggtggatcttttattaagccttctgatgctacaccaacgaagctgacaaaccctggaggccggatttttgagacgaagcaagccattgctgccattcatgggaagaaatttcctgtaaggggcaacaacagcaacctcgtgataaacttctcagatgatgatagtggtagtgaatctgattgtaaaggacgtacacagacatcaaagattcaaccaaagggaaccatatctgggaatagaaacccgtctacattttcacaaacaaaattgaaaggaccaagacagattgatataagagccataacaaagaaggcattgtccactagcacctttagtcatgctgcgacgtccaaagtctccaacctttcatttgccaaggaaatgaaatccaataaatatattcattcctctgaaaggacggttagcaaagatgcacagcgtcctgaacagattgtggagtccaatagcaacaaacttcaggatttaaagcagcagattgcgcttcgggaaagtgagctgaagcttaaggctgcacagccaaagaaggatgccgttaacccaaaaatcactccagcaaggagggtcagtattatttctgatgatactagacatctagaaccaaacgaacctcccaagaaacgtttaaaagttagtggaattgacacaagtcagcctgttattgattacagagtggcagcatctgcggctgcaccaatgaatgcgccagacatccgcaaaagtctactgccaggtgagtctagaggcaaacattgaatttgctactggctgtttcacttaaactctatcttggttatggaattcagtgttttgatttttaccacatctgatatcacctgactctgatgtttatttcaggtgtcaatgcaaattctagttgcaaacacctcggaagtaagagtgatgagattgttccacctgttattcctcagcatactgtggaaggaaatacaagctcaagtgtcttacaaaaaagcaccgtacgtgttaccatggttttgtgttttatgctttactagaattggaaaatttgacgcaaagattatttaatatgctacttatgggtcagtatttttctttatttgagcgtttttatttttattgcagggcaaagtgaatcattacgaaggtggaagagaactcgaaacaatgaaaaatgttgataggagcgtgtcaagtgaacagttacttaaaatagtcaatggaaaccatcaggttttttctagatcctcaaataacaactggaagcggctggtaggaatttgtgatccttacttttgattttttttttgtgtctgcttgcaatctagccttgttcgaataattctggcctctacaacatcccgggaagtacaacagttcctggacatagtcaactggatatgctatccttgacgaacctagaggaatcgcttgacaaagagttggaggaagcacaagaacgaaaacgcctttttgaaattgaagaaagaaatgctcttaaggtttatagaaaggcacagagatctttgatagaggcaaatgccagatgtgcagaactttacagtaagagagaaattttatctgctcattatggatctctcatcgttcgtgactccagattgttgtggccttctatacatggtgagaatcctgaaaccgggtttcacttcttgaataatagtactggaagcattgatctggcaaccaaaacggacattgctcagcattctcagctagaaagcaaccacaaatataacagtgaatatgttggcagtcatcctccacctcattcccgtagtggacagaatttggggtacagtgatcttggtgctagtacctctgatggattgccttgcggtaacaagcaaactgcaagtagactatgctccccatcaagtgatgcaaacattttgccagatgacgagtcatttccagttgaccatgaatctaccgaggggaaccctggacatcaaaaagaaaatattgatcaaacactaggcaatcagaatgctttgcttcttgaagcatcattaagatcaaaattgtttgaccgtctaggcatgagggcagaatctagaggtggcacatgtttcaatgaagagactgtgatagatagaggggatgaaagagatttcggaagtgaaggaacccagagagataacggtagtcctttctccgaaatatatctgcataatgattctctaggtaaggagtttatctttaagagattggcattttgtttagttattatatgatttttttatcttatgtgtggctgtgcattcccttcaaaaaggaaaaataatagcatggtcgttttgcaaccatattttacattgcggatagcaaatgcatgaactggggtcaaatgtgattgagttcccatagcattgtcccgagatggatgaaccaacgtggtccccatgtgcttcactttcctttatattttcagtaagatgtcttcctgttttcaatttcagagccaggggccaataaactgcaaggaagtccatccgaagcaccagttgaacgacgctcaatcgaggaaaattcgctaaattatcagttatctatagatatggagtcccataggagttcaccagagaatgcccttttatcgtctgtagcgttgtccggtcctttatttcggagcacaatctatcatttgaaagtcccagggtcttcaattacatctctgggaccagaatatatacttcaaaacaagacatatagcctatatagtgataaaagacaatgtaggagcttgacggaaactatagtatatgagaaaaaaattggcttctacacctgtaatttgaaggtggacccttcttggcctctctgcatgtacgagttacgtggaaggtgcaataacgatgaatgttcttggcaacatttcaaggatttctctgatgacagtttgcatcaaagtctacatgatcctggtacggcagaatatttttgtaagagttctagaaatgatatttctttgctaaaatttctaatttttttatcttccagatggtagagttgggtcaagttcacatcagaagacacataattcttccaaaggatcccagattttggactcagtgttttcaccaacttatcttgtctccttggatacgatgaaggttgactcgtggtcttatgagtccgttctggctcaaagacatggacaaatatggtgcaagcactttagtgcctgcctagcctcatcaaactcgctttacaggaatgtacctgcaaaggaaaatgaaggtcgaattgtggtcctaggaaattcgaaaacatactcatcatacttcaggattaagcatagcttaatggtttgtctttgttttctctttcttataagttaaccttaaattttgctaatatctagatgcagatctgaccgatgttttcttcttttgttgatattcttattatcatcttgcactgacctgcttggtgcattcgtagaatatccttaaacaaggttcagatgctgctgttgaacccatggaaatggctcttattattttctttcgggaagttgagcagtcagaaggcttgatccaggcaatgttgtttgattcctgtcaatattgtgttgtatcaaatttgactctcgttctaattttagtggcacatatttcaggccctttctttgctttcacaaggtcttgaaggtgacccaacttctgagattctttgggctgtttatctcctgatttaccatgcatatgaaggatcagatgggaaagatatgttttcttatggggtatgttatccccttctacgatattgcctgcatctacatagccacaccatttgcattttatgattgattgtttgtgtatgtttgcatatattcatatactaatccaacttggtgtttctgatagtgttttacaattttcaaacttctatatagatgtcttggcatgttattatctttttcagtttcgttgtctagttactagttaattttttatctttgctatagaatgctttttgatgcttcacagtctttccacctggtttatatgggataacatttcaactcttcaggtcaaacacagtagcagatcatacgtaatttggcttatgtacatcaacagtcgaggacaacttaatgatcaattaattgcatatgataccgccctctcagcactttgcaaccatgcatctgggtccattgacaggaatcatgccagcgcttgcatattagatgttttgttgcagatgttcaaccttttgtgcatttctgggaatgtttcgaaggcaatacagagaatatccaagcttcaggctccagcagcagtttctgatgaccctgacttttcactgatgtctcacattctcacatgcttaacatattctgacaaatgtgtgttctgggtttgttgtgtgtacttagttatttacaggaagctgcctgactctattatccgacgacttgaaatggagaaggaactacttgaaatagaatggcctactgttaatttggatggtgatctgaagcaaatggcgctcagactatttgataaagggatgcgttccgtagaacatggtaccaacaatggaatacaaaagcgacctgctgggctatttgctctgaactacgccctgtttatgattgcagtagatgagttagaaagccgtagggacattttgaaggcatctgttcaactctacccaacatgcttggagctaaaattgttagcagttaggatgcaatcaaatgagttaaaggatatgttttcgtctgggtttgaagagcttctcaagcaggaagcaaaagaggcgtcatgcatacagtgtatttggaatcagtatgctgaatatgctttggaaggaggaagctacgatttggcaagagaactcatgtcccggtggtacggttcagtatgggatgttttgtcccataagtataagacagtacgaggcaatgaagaagaaggggatgataatatgctggaatcagctttatcagatctaaatgttgcatcggatcaggtggatgtgatgtttggatatcttaatctctctctgcataatctactgcagagtaactggactgaggctcgcttggccattgaccaagcactaaaagcaacagctcctgagcatttcatgcactgtcttagagagcatgctgtgtttcagctaatcaacgagttgcaagcaacgggtgaattttcaatcaacctacaaatgagattactcaactcttatttggatcgagcaagttctttacctgtaaaagagccactatcttggaaattcattagcaacagcgctgagaaaccaagagtcaggaagctagttactaaccttctggctccagtttcatctgaactctttgtggtgaatgttgttcttgaagcatggcacggaccatctcttgtacccgagaagctaagtaagcaaaaggaactggtggattttgtggaaacaatcttagggttggttccaagcaattacccgctggctttgtctgtaagtaagctgttaaggaaagaagagaaacaatcagattctggttcctcctcgggtattcatttctgggcaggtctgaatttggcgagtacaatatcttgtgccatcccagtagctccggagtatatttgggtggaggctggagaaatagtgagtgatatcaatggtttcaagactagagctgagagattcttgaagaaagcattgtctgtatatccaatgtctgtgaagttatggagatgttattggagtttatgcaaaagtatagaagagagaaggggtattgagatcgaagaagcagccagaaagaaaggaatcactcttgcttgaaactattaagtcttttgatttttgtccccctatatatagcaaaagtaagagtaaagggggatttttggaaaagaaatgggaatatacagtttaaaaagttttaagtcaatacgaattatacgtttaaaatgtcttctggttcagtttgtgttataagtttttcttcttcttttggatattgtagagtgttaataggaaagttcaatcattggctctctaatccaaaaaacaatgcatttcgttgggtattggcacaccatgttattgaacatccatcccgaagtcgagagctaactaacccaacaacatatgtgtttttgtttctagtaagtagtcgaactaacggtagaatgagtttactatctcctatcaagtaccaccagaccaaggccgtaaaacaacaactagtaatctccgagatccaaattgtttgtataaaaagatcgtaatccattcaacaagcagttaaacaacttgggactggccatagcaaggttcttgacgccaaaatagtaataataagcaaaagagtaacaatcgccaaaagagtaataataagtaaaccaatcgaaaaatcaataagaaaacactaaaaagactaacaattaagtcccaacacataaaatcataaaaatccctctagtagaaaaaaccaagcactttgcccccaacatttttcttcctagcctcttcatggtccatgattccagctgatgttgtcaggacaatgtacccaaactgctcaatttggtacacatactttgttagaatatcccacaatgatcaaacacaataaaccatgaattggtctcagagatttattaaataaaagaatggttagttttttacctgtcttgaagggagcaatttagcagtccaaccttcaatttccttgacgccaaggtcatatcgaggactaataacaccgcagttgttaagccttccattaagctcaaccacaatcttcccggatctgtgatcatccacatattcaaactctgcaatgtaacctataaaccaaaggaaaaagtttgtgtgtttcaagtcaaaactgaacatttgagagattccagaatgttttattcgatacggtataattcccttaaacctaaaaaaaaaagagagaaatcaaacaagaagaagctcattgagtaaaacaattgtaccatgcttttgcatcacagtgagaaacttaatgatcactttggaagatggtcttatcatgacttggcgtttcccttgtttctctgcattactcatgctcttgagacaatcgtttaagacgctagccctcaccattatcgcctctacacacataaatataagaattgcctcataagtttcatgacttgtgtgttgtgtcataaaagaatcataaattcagactttttgttacctgccgatttcaatttcaactagattacaacaaacgttaaaattctcacgcagacaaaaactcacaaaagttacttacgtattctggctagggttcagaaggttttaaaactagggtttttttaacggagaatatatagcacaaccctaatctctcttctatgtacgttcccatttactacgaaacccagtttttactgggcttaaaaaaaaaaaattaagagcccaaccggattcgaaccggtgacctattgatctgcagtcaattgctctaccactgagctataggctcttattgactttagtgtatactacttatatataacttaacaattatgtttctccaaaattctgttttaagtaaaataatgttctatcatgcaagtttagtatttctattagttagcatacactaaagtcaagaagagcctatagctcagtggtagagcaattgactgcagatcaataggtcaccggttcgaatccggttgggctctttattttttgtctcttaacagagatttcaacagattttccaatatttctcacaatttcaattatacttagaaagattttttgatacagtaaaagatagagaagaagaatcaaaagaattgagtattctcagacttctatccaactacaagcaggaactttcttaattcttgatacattattgacctctcctaatctccgatcttgactataatgagaaggatttagtggctcaagtttaacaagctgacacaatgcagcattgcttaaccacaaattacaatgcattcttgaagaatttaataaagctccccatactcctacacttgttttcactctcattcttctcatcatttccacagcttcaccaaacaaaccagccttccctaatagatctaccatacacgcgtaatgttcaacttctgcttcgatcttgtgtctctctcccatttcctcgaaaattcgttttccttcttcgactaaccctgcgtgtctacaagctgaaagaacactgagaaaggaaacagagtctggtttgagttcgttttcttgcatggacaagaaaagtgagaccgcacagcttgctagaccgtgggctgcgtaagcggatagcatagtgttccatgaaactatgtatttgttgcttatctcaataaagcatttctcggaagattctatcattccacatttcgcatacatgtcaacaaggctgtttcctactggtgtttgggaacaaaatccacactgaatgagactggaatgaaccgacattcctactctcaaggctgataattctgctgctgcgcgtactatgttaacaaaagtgactgcatttggctgaaatttctcaaccttcatctgacgaaaagtggcaacagcttcttcagcctggccatggagtaagtacccgttcatcattatattccaagatacagtacttttctcgaatccacacttgtcaaacaaaactatcgctgcagcgagggcatcacatttggtgaacatattgataagagcatgtgccacgtgacattctgaatcgaacccatgctttataatttgtccataaacacaagaacctcgagcatagtcactacagaaggcacaagtttgaagcataccaaccatagttcttgagtctgggcatacaccatgtaacttcatgttcttgtacacatcaaatgctttattggcatcaccaatctgagtatacccttgcgctagagcgttgaatgccacagcatctttaattggcagtctttcaaaggctttgagcgcgggagaaaatcgaccacatttagcgtacattgaaataacagctgtggcagtttccaactcagactcaatatcagcctttatagcataacaatgtatgctcttacccaatctagaggcggctactcctgcacacccttgtagcacactagtcaaagttacagcattaggcttgatatgtattctcatcatatctctaaacaaagagatagcctcatcgtgttgccctgcttgctcatacgacgcaatcatggcagaccaagaaacaacatctctatcttcaatattaatgaacagttgttcggctatctccaactcaccacatttggaatacatactcataagagaagtagcaactgagacatcaccgatcaatccttgttgcactgcgtaatcatgaattgcaatccccttcactaaatcccctacatatgcagcagcttgaagagcacttgctgcagctaccttattcattctaacatcatagtttctcataaggtcaaacaactccaatacctcctcaaagaacccattatgtgcataagctgccatcattgtaccccatgaagactcatccttcctccacacttcttcaaaaacagattcagcagcatataaatccgcgcagttgcaatacatgtcaatcagcccactagagaaagcaaagataaaacctttcttaatcacaagtccgtgaagacatctacagacatcactcttctctagcttcgaaaccgcagggatcagattatataaactaacatgatcaatgtcaacacaacacgaacgcatatcatgaaacaacagcaaagctgcactagaacatccattttgagccaacccggaaaccatagtgttccaagtaacaacatccttcacatgcattttatcgaacacttgtcttgcagaaaccaagtcacgagctttacaatacatttcaactaacgcagttcctatataaacatcagactcaagacccatctcagcaatcaaatcatgtatccgtaaacccttcttaaagtccatagatccggcacaagccttcaaagcaaaagtgaaactgtacttgtctggatcaatacctttctcctccgacatatacccgaagaatccgagagcttctctgtgcaaaccggctctcgtgtatcctctgatcattgaattccacaagacaacacctggatctcgaactgaatcaaagatgacgcgagaaaggtcctgtctttgaaagagagaataagcgtttatgagctggttatgaggtttaagacctgagactatcaagctgccgtgaacttgaagaagacaccggaagttcttacattcccggagcataaggaggaggttagtgtagttaattggcatttcaccggcgacgaggatgcatttgcagttttttggcggtttataggaaaaaccgttaaatttgaaagcttcaaaattttctgtaatatataaattataaaattgaagtcatttaattagagcgatttagtttataagaggatcaatcagttcctaagattaagactttaatctttagttcatgccatgaagatgtaaaactcaaagtagagcactgtcattggaatgtttgagtagtttaaactttttttttttttttttttttgaacaaagtttgagtagtttaaactaaaaccaaaaaaaaaaaaatctagagctgtagtagtttcatttcatcatttataatccggtaagatttttatcacatctattgaaacaaagaccgacatattttctatcgccttagctttccttgagcttgaccagaaattcagagacatcaaaactatatcctctctgcagaaaaccagcgtggacgagttgttattcccaagaggaaatgctctatgtatgttgttgtctatgtgtctcatacttgatggatcttccacatgccagttctgtatcccacagacattaaagcaagctcccaaagcatgtttggaatgctcaacatactgactttagacccgggaatttcggaccatttcacagagatttcaaccattggtatattaaaacgcttgcacaagtacaccaattcaacatcaaagcaccacctgcgcatagaccgagtcagatgagactcttattgatgtttttactgctagtttatcatcatcgattcatttactcatataccttttcagatggacgtttgtgaaaagtctcctagcagcagccctagtaaacatcttgaagccacactgattaaaaaaaatgatgtttagttattactattcaagattggtgaaacagagagtgtagaaggaaacaacgaatgagatttaaaaagccacctgtgtatcccgaataccaggaccagcagctaatagaaccacaagatggaaacccttcatcagaaagttgcgataccatttcctctgaaattgaaagactaaaagtcaattatctaagatgcgtaataagtatatgcatctgtgtgtgtacatagacaaagaatgatgttgtctagaacagaagtttgcaagacttaactgtagcaagagctttctcctcgagatgagcacgagaaccaaatgcggatacttgaacatcacctattttgaaatccatatccttagatgctggatttctgattgaatattcttctctggctactgcattgatctgagaggctaggagatcaggaaatttatagcacaatttctagtttctctgaagttttaacagtcaaaactaagggcaaacctgattttcaagtttttctaggtccgttactttagttgctccatcagcatccaacatgagaagtagctgaccccgcgaatgcaacattccctattcaatgctttcaaaaagtagaaagcttcgattatttttttgtactatgaaatgacaaatttacagtcttactcaatcacataaaataaatatatagaattgcatgcgctacgagttgaactcacttttcttatagcttctcctttgccttgattcttcccaaggggtataacccttatgttgtcaattgtgtactttctaatgaaatcaaaagctactctttttgttccatcaacacttccatcatcaacaatcaccacctaaaaggagaaaaggtaaacttaatccactgatgcatatagggtttaaggaacacaataacgacttattgagaaatttagcatgagtgggcagtctatattgatagattaataagttgtgagcattactctcctttttttaatagagttaggtaaatcaaatttagggacaaaaaacgtttaaaagctcatacatattcaccataacaaaggccatatctatgttaagaatccaccttaatcagttgtaaggagaactacttagtatggaaaactacttagtatttacctcaaaagaaaaactcttgtcccgtgatgcacgatcttgaaggtaactgcaaaccagaggcgaattacaattatgcctctgtagtatgcataaataagacttgtgctgctgtttcgcaagagaagcaaacttctcacgattggaagcagacacacaatccagtaaaagggagattcgaataagtggaagttgtctaacttactccattgtttcctcaagagcagcaggaagtctcagttcttcattatacgctggaactattaaagacaaatacttctcggcagggtcggtaatatgagggcaaggaatctgataataaagtttgaaaaacagggtcaggaaaagtaaaatcagattcctcaaccaccagaaaatgcgatcaagcaagtcaaactcgttataattgacaagacaatctatgtatggattcaacattataatggaacacttaatttttctagctaagccactaacttaagagtttccaaagtctgcatctggaagagactccataaactacttatcaagtttcacacgactatacaatataacttctcaagcttctttgctaaaccaaaatgtaacatttgatacaaaaaaagagctaaactaatggaaacagttcctcttaaagactacgtgaagcttcaacattcgttttagcgaaacacagaatcaagtgttcaaatcgccaacgcaaaacctttttaacgagaaaatctcagttccattaactataattaactgattttcaaaacgctatcgttctttgccacactattgccagaaaatcactgtaaactaatacgataaatcaatcagacgttaccggttttatagatttcggatcgtcgagtgtagtcacggtctcgacagagctgagaaaatccaaaacaaatcaatcaaatcttatcctcagaaatcggaacaaattcgaagaaattgagtaaaacgtacacgttactgtgtctccttctccaagcttcaaaaacaacaacggatagaaatccgaataagacgatcagcagcagccagaggctgaattccgcaactgttaccagaaactccattgttgctcccgagatttgagatctgttttgctttcacgagaaagagagagagtgaagaaggagagatcgaaaccaatccgtgaagaataagcaagaaaagctaaagtctaatgattgatccgtgaagatggttcaatccctaatttcagattaaaatgcagcagagctcaatttgagatagccatttcggtttgacttttggtttagccatttaggttccggttcgtttggtagtgttaatgttgaacaaaatctcaaattataataaaataaagttttattgattaacaattttcaatatacagaaaaaaatgtggattaaaatatgttaaagaataaaactgatcaatattatgatttggaaatggcagattatatatatgaataactagaaaatgaatagatggaaatgacaaagtataatttggatattttaccatatgtatataatttttctttttcatgtacatgtctacataaatatttgaaaaatataatgaaaattaaagatacaacataaaaacaacgaaaaatgattgttcttataatgaaataaaaggatcttgttttattgatttttttcagtttctgtagttgctttttaaaaattcagagcgttactgatgctggtacgacgcatgtgctagtgcttgggttggtagtagtgacgatgccactaccacggaagtcacaagcgtctttggagtatcctttgctctcgtaataagcgttcattatgaacgtggatcgagtcttcatgttgttgttatcaaaacatatgccaccaggtgatattggtttacaatcaataccttggctacacacccaatcaatattagcttgtagttgtgtctctgtcgcttcttgtttcgccatacaccaatttgcacttttgctttttgcgccattgccgccgccaccttcccctatcggtatagggcatgtgctagtgcttgggttggtactggtaacgatgccagtaccgctaaaatcacagacaacatcaacgcatcccttgctttggtaataagcgttcataataaacgaggaccgagtcgtcatgttgttgttgtcaaaacatatgccaccaggtgagattggtgtacaatcaataccatggctgcatacccaatcaatatttgcttgtagttgcattaacgtcgcttctggttttcccacacaccattttccattgttgtttatcggtggaaacggaagcgggcttccaccgccttttagaactccaacatcatacatcggtgaaaaatccggtttaaatatcccccaatttctctcacgtgttggaccgggttttccatcttcattgaacaatgcaaatatgaagatatcgatgtggcggttgggcattagaggtgtccctataacttgtgcacgcttgatgatattgaggttgtagttttcagcgttttgaggtgagcaccatgaagcgtcacaagccgtgggccaaccggtctcccctaccgcgatatctacgtcgccatagccaagagctttcatagcagaatatgttgcatccatgactgcgtcaaacatgttggtgtaggtttgttgtgtattggtatccgttattgcatttgatggaccaaatattgcgtaattgacattgttcgtgtccatcgtgaaaaaagtgtaggcgttgatcatgaatggggacttagcctgacgatgaaattccaagatctttgtaaaaatatctttttgatcgttagtaaatctgctctcacttggtgtattacggttatagcttatggtaaatgcatgtggagttgtcacctgaagccaaataatggtggattaattacattttgttgatagtagtatcaaataacaacgtattcaaaaaatatttatgaaatatgattcatatgtaaaaaaacaaaaaaaaaaacattcatgtattagtattagtgttttcgtaaacgcaagtttttttttttttttttatcatcatgacttgaaactaaccttgatataagtgagattggaagcttttaaagcttcgttaagactttgcatcgctggtacaagatttgatatcaagttattgtcgttactagcaagaatctcgtttccgacacaaacgtatttgaacttgatctgctgctgaaacggtaagacattggcagcgacccattgacgagcatttgcaacgttgaccatggcaggaatgttaccgttagggaccatgatggtgatgttgatttcagagcccgcgaaggctcggaggatgtcgggattagcatcatagatcttgacactgtcaaaagtggtctttgtcttgatgaagtcaaccacttgttgtggaggttgaaggttccctagtgttccatagttgataccaatggcggaagtcacggctgagagttgaaagatcacgccggcgactatgaggaggaaagggagaatgaaagaccgaatcgttttggccattgctttgttttgttttgttttgttttgtgtagtaagactaggctaagaataagcgtgtatttatactactaatgtagattctccatgtctctacaatttttctttaaaaatctagtgaaattaatgtagatgataagcatgaacgttgccttttatattgtaatcaaatttgatgtaatataaactaatatagaagaaccgggcggcaacaaatggtacacaattttattaagtttacatcactaagagaggtagatcttatacttaattaagaataaaatggaatttaatgggaagatcttatacctaattaagaataaaatggaatttaatgggaagatcatatactaaattaagaataaaatggaatataagtttggataacatgtcatatgcatcaaatacatttattattagttcatcatggatttattgaaagaaagaaagaaatatatcattggctttttatttctggatgaatacaaaattgtggatgattggatatgaccgtagatcttagaatttagaaggcagatttaacttgtttatgtgacttaaccagatacggactaatcggaccattagtccgataattagtccatcgaccacaattaactaattgcatttctggcgtaactgtgcaatagtgatctgaaatgagaggtcataacatacgtataccacattggtatgaataattataagaaacattgatcataacagtgatttgttaatcatattttcctggtaaattgttattacaacactcaataacacggggaaaagaaccccaaacagaaacatgcttattagaacaatctctcccaatgtcgaatcatacaacagcggcaaaaattgcggtacctttcgtatattatcttctttgtataaagcctaaccttggctgttattgtaaccccaaatgaatccatattaaaaagaaaaaaagacgcagccgcaaaaatattacactcgaaaacgactcaacagagcaaaattctttggcctcttgatgcctccaaaaaacatctgtacaatctctttaaggagcacgagccccttgaattctcattatctcgggttagttcctgcggctaaaaccgctcttcttcttcatgaatctctcggcctcttgttcaacctggagagcaaactgaagcctctttaaattctcagcacactgtccatgtaatcccggtgagaacattccaggaccttgttgatcgataggaccgagatgccttttgtgaggtgaatgccatttggatcgcaggtagttcaaagatctccatggaggtaacggcattgaattctgctttaaggagaatttcgctgcatcaaccattacttgaaggaactggtttaatcttgcaacagttcctacataaaccacaggaagtgattccattatccgttggtaagaatccacagctctagcgatctcaaaatgacttctgaaatcaatatcaacaatcaaacgatcatcttgaccaacttcagtatcactcaatatgatatctatatactcattatctcctgcaaacaaacaaaacatatcattctctcagaattctatgtccagaaacacttgtataagacggttcttagaagcgaaaacataccaccaggaactttgccaccaccttgccatctagctgaacatacagctgcatcatatccagaaagtctcaaaagcttagcgagataaaacctgatgcaactagcgttacatgtaccggatttcacagagtgtagatctttctccttaatagtaagcatcaatgtacgaaccaccgagagaacctcggtttcgtgttgagccatagagtacttgagatactgcagatacaaacacatactcttaattcaacaaaatgttcttcaccattcctagaaacctatgtactaaaacatgccttccttcaaattacaacaaaccacaaacgctaccattctaacaaatccatgataatctctaaaattctctaatcgcgagtggaaaacaccgatgaatctaagctaataggataaatcaaaatggtgcgatggtggtggtacctgaatcttatcggaaaggtaagaaggatctgggaatccagaatcgctgtcgctgctgcaccaggaaccagcaccaccgctaccacctcccgtttccagaaaatctgtaaccattaggcctaggtcatgttcaccgtcgtgactcgaatctatccctcgattcaaccattcctccgccggaacaactctcaagtccatacccatcgttcccaaatctcggtcaattgttcaaatttcaaacccagaacttatgaataaaattgaattgaattgaatttgagtctgtacaaaataaaaaacgcgtatcgtcccctttcacgagtcttgtgtgtgattgattttattatattatatagcgatgagagagacagagcttgaaggttctttttagcgaaagagaaaaatccaggaagataggcgaaaaggaagatgaagcgaagatgaggttaatataatactcatgttaaatgacaaaaatgcccttatatgattaatgatattaccatttgagcttgctgtggaagctgtaacgaaccgaaaattaaaaacagaataacgaacatagacggagaatatgatattattcgttttaccaaagaaactaacaaatagttttaactttatctaacaaaggggtaaaacgggtaatttgtttgggatgaggtggagcgtagcggacaatcgagaaattaaaagtttggcttggggacgaagttaaaggtgggctttaacgttttaaattggctgactcggacgatatttcttgtatttaataccaaaaatgaatgactttataattcatttgtagattgaaagttacgtattgattcgaaaatcaacacattgtgttttcaagtgggcataaactataacaccttgttgattgattaatagattacctaaagacattatggtttattactggtctttcaatatatttttatcgcattgtcaatgatattgtttttgtatcccaagtccactgttttggtctctacattcattttgattgggatttatctttttaaaatttcttctaatgttttttcgatatggttattacttgctttgattttcttttcagtatgtgtattgctttgcaaattgtttttttcttaagatgaaaaacaactcattaaattgtttgagaaatactactaaaacaaataaacaatgaggagaattatggaaaacaaagtgtaataggctttaattcattgctagtgggctttttgggcctatgggcatattacttaccactatccaacccaaaatgccaaataaccgacatgtctcacacaatccaattttgggccatacggccgaaattatttaaacctgtgctcataatttactttacaaattattacttttccataaattgtggaaaagttatctgtaacatccgattcaactggagtctagactactatagacattgatacgttttgagtttttagatacttggaagatatatgcatttatgaatacagattacagacacatactagtactactgtatgtctgtatatggatacaaaaaaaatcatgtatgaatactaaaattttattagaaatctatttttcaattgttgcaacaatcaagttgtcaaatttatttttgtaaccgttaaacaaacaaatatcgatttaggtttctaatctgaattgacatctcaaacaaaaaaggctgaatactttctgaaaatagtgtatggaatgaaggtggcttttagagccattataaccggaagaaaattcaggtgacttttagaaccattataaccggaagaaaaggtgaattttaatttttagctgtgtggaagacacggcaagtccaagtagtaccttcgtacgtcaatattgtccaaccggccgtgtcgaaaatcttcttgagaaaaattggattttcatctataaaaaaaaaaagtccaagtaataccaaacaaagacagcgacgtgtaaaacaatacaagactcataatcacaaacctaccacccaagtcaaacctatattccatttagtgaattcttgattatgacttcttgaaatcatttgtattcatatgtataattatttaagtcatttttctgtaagtaaaatttttatatatctagaataacgagttccctacgacaagatacagttgaacgtaaatgtgacatctcaattttcattggtgtctagtactctagtgattaggttttcgacatttattgtactgattaagtaaaaattcatggtacaaacatcgaatatatatttttctgcttacacacaccaattaacgtggatagaccaattgaaatattttgttacgacaaagcaaaacaaaacaaacgtcatgtttcgctgtttgtttgtcgtcccgttaatggtaatctttcagacacatacagtacccaaacaagtaatttgactaaaattttctctctgtctaaatttcagaagaaaaaaaaactttaggatatattgccaaaagatcttaaaaatgggtcatatcattttgatcatatagaatccaacgacctttatcttttcgccgaactatacttttttgtgtccatttgtttgactttctttcacacacacatccacaaagaaaaaaggaccattcttctccttcttctagtcacccctcgtgcctctctttaacaccaaacccaaaactcccttctctttcttccttcctctccgatctccgttcacatctctctctcatctttatcttcttctttttttgccttgtgggttgaaagtttctatattttctctttctcttctgtttacataatccattttcagctcaagcagctgaagaataacgatcaagaaccaaaaaagaagaaaacgaatctgttcttagctttgatgggttcttgcttcagttctcgagtcaaagcagacatcttccacaatggtaccatctctctccaactatcaattttcttgcaatctggaattatgcatctctctgtttttaattcatggagatttccgattttgattattgtaaatggtcaacatgtgtgtctgtgtaggtaagagcagcgatctttatggtctaagtctctcaagtcggaaatcgtcttcgactgtagcggcggctcagaagacggaaggggagatattgagttcgacccctgtcaaaagcttcacctttaacgaactcaaactcgccacaagaaacttcagaccagatagtgtgatcggagaaggtggctttggttgtgtctttaaaggctggttagatgagtccactctcactccgactaaacctggaaccggtttggtcatcgccgttaaaaagcttaaccaagaaggttttcaaggtcaccgtgaatggctggtactgtgttttcatttccccaaacttaagagtcatgtgttatatatgtgtgaatgcgtgtctgatctgttgtgttgtgttgtgctattcagacagagatcaattacttggggcaactgagtcacccaaatctagttaaactgatcggttattgcttagaagatgaacaccgtcttctagtctacgagtttatgcaaaaaggaagtcttgagaatcatctattcagaagtgagtcccatggatcatctttatctttgattaaatctgttttcttttgtttttggttctgatggaaaatggttttaatataggaggtgcatattttaagccactcccatggtttctacgggtcaatgttgcgcttgatgcagcaaaggggcttgcttttcttcacagcgatcccgtcaaagtgatataccgagacattaaagcctcgaacatcttacttgatgcggtatgtagagaaatatacacattcaaagaattagatgtcttcatagtactttcctgatgactttgattcccttaaacaggactacaacgcaaaactttctgactttggactagctagagacggtccaatgggtgatttgagttatgttagtacaagggtcatgggtacttatgggtacgccgcgcctgagtacatgtcatcaggtaaaaatctatcaccttaaatatgaattatgactaggttgatcaaatgttttagagcataaggataattgtttttaaatcctcgtatcatttcaggtcacttgaatgcaagaagcgatgtgtacagtttcggagttttgcttctagagattttatctggtaagcgagcgttggatcataacagaccggctaaagaagaaaaccttgtggattgggctcgaccgtacctcacaagcaaacgtaaggttctcctaatcgtggacaatcggctagacacacagtacctacctgaagaagccgtgagaatggcaagcgtggcggtgcagtgtctctcatttgaacccaagtcgcgcccgaccatggaccaagtggtccgtgccttacaacaacttcaggacaacttgggaaaaccgagtcagaccaatccggttaaggataccaagaaacttggttttaaaactggtactactaagtcatccgaaaaacggtttacacaaaaaccttttggcaggcaccttgtgtaggtcaagttgataactgaattc

SEQ ID NO: 351 - DNA, 39141 bp, Arabidopsis thaliana
gaattccgcaactgttaccagaaactccattgttgctcccgagatttgagatctgttttgctttcacgagaaagagagagagtgaagaaggagagatcgaaaccaatccgtgaagaataagcaagaaaagctaaagtctaatgattgatccgtgaagatggttcaatccctaatttcagattaaaatgcagcagagctcaatttgagatagccatttcggtttgacttttggtttagccatttaggttccggttcgtttggtagtgttaatgttgaacaaaatctcaaattataataaaataaagttttattgattaacaattttcaatatacagaaaaaaatgtggattaaaatatgttaaagaataaaactgatcaatattatgatttggaaatggcagattatatatatgaataactagaaaatgaatagatggaaatgacaaagtataatttggatattttaccatatgtatataatttttctttttcatgtacatgtctacataaatatttgaaaaatataatgaaaattaaagatacaacataaaaacaacgaaaaatgattgttcttataatgaaataaaaggatcttgttttattgatttttttcagtttctgtagttgctttttaaaaattcagagcgttactgatgctggtacgacgcatgtgctagtgcttgggttggtagtagtgacgatgccactaccacggaagtcacaagcgtctttggagtatcctttgctctcgtaataagcgttcattatgaacgtggatcgagtcttcatgttgttgttatcaaaacatatgccaccaggtgatattggtttacaatcaataccttggctacacacccaatcaatattagcttgtagttgtgtctctgtcgcttcttgtttcgccatacaccaatttgcacttttgctttttgcgccattgccgccgccaccttcccctatcggtatagggcatgtgctagtgcttgggttggtactggtaacgatgccagtaccgctaaaatcacagacaacatcaacgcatcccttgctttggtaataagcgttcataataaacgaggaccgagtcgtcatgttgttgttgtcaaaacatatgccaccaggtgagattggtgtacaatcaataccatggctgcatacccaatcaatatttgcttgtagttgcattaacgtcgcttctggttttcccacacaccattttccattgttgtttatcggtggaaacggaagcgggcttccaccgccttttagaactccaacatcatacatcggtgaaaaatccggtttaaatatcccccaatttctctcacgtgttggaccgggttttccatcttcattgaacaatgcaaatatgaagatatcgatgtggcggttgggcattagaggtgtccctataacttgtgcacgcttgatgatattgaggttgtagttttcagcgttttgaggtgagcaccatgaagcgtcacaagccgtgggccaaccggtctcccctaccgcgatatctacgtcgccatagccaagagctttcatagcagaatatgttgcatccatgactgcgtcaaacatgttggtgtaggtttgttgtgtattggtatccgttattgcatttgatggaccaaatattgcgtaattgacattgttcgtgtccatcgtgaaaaaagtgtaggcgttgatcatgaatggggacttagcctgacgatgaaattccaagatctttgtaaaaatatctttttgatcgttagtaaatctgctctcacttggtgtattacggttatagcttatggtaaatgcatgtggagttgtcacctgaagccaaataatggtggattaattacattttgttgatagtagtatcaaataacaacgtattcaaaaaatatttatgaaatatgattcatatgtaaaaaaacaaaaaaaaaaacattcatgtattagtattagtgttttcgtaaacgcaagtttttttttttttttttatcatcatgacttgaaactaaccttgatataagtgagattggaagcttttaaagcttcgttaagactttgcatcgctggtacaagatttgatatcaagttattgtcgttactagcaagaatctcgtttccgacacaaacgtatttgaacttgatctgctgctgaaacggtaagacattggcagcgacccattgacgagcatttgcaacgttgaccatggcaggaatgttaccgttagggaccatgatggtgatgttgatttcagagcccgcgaaggctcggaggatgtcgggattagcatcatagatcttgacactgtcaaaagtggtctttgtcttgatgaagtcaaccacttgttgtggaggttgaaggttccctagtgttccatagttgataccaatggcggaagtcacggctgagagttgaaagatcacgccggcgactatgaggaggaaagggagaatgaaagaccgaatcgttttggccattgctttgttttgttttgttttgttttgtgtagtaagactaggctaagaataagcgtgtatttatactactaatgtagattctccatgtctctacaatttttctttaaaaatctagtgaaattaatgtagatgataagcatgaacgttgccttttatattgtaatcaaatttgatgtaatataaactaatatagaagaaccgggcggcaacaaatggtacacaattttattaagtttacatcactaagagaggtagatcttatacttaattaagaataaaatggaatttaatgggaagatcttatacctaattaagaataaaatggaatttaatgggaagatcatatactaaattaagaataaaatggaatataagtttggataacatgtcatatgcatcaaatacatttattattagttcatcatggatttattgaaagaaagaaagaaatatatcattggctttttatttctggatgaatacaaaattgtggatgattggatatgaccgtagatcttagaatttagaaggcagatttaacttgtttatgtgacttaaccagatacggactaatcggaccattagtccgataattagtccatcgaccacaattaactaattgcatttctggcgtaactgtgcaatagtgatctgaaatgagaggtcataacatacgtataccacattggtatgaataattataagaaacattgatcataacagtgatttgttaatcatattttcctggtaaattgttattacaacactcaataacacggggaaaagaaccccaaacagaaacatgcttattagaacaatctctcccaatgtcgaatcatacaacagcggcaaaaattgcggtacctttcgtatattatcttctttgtataaagcctaaccttggctgttattgtaaccccaaatgaatccatattaaaaagaaaaaaagacgcagccgcaaaaatattacactcgaaaacgactcaacagagcaaaattctttggcctcttgatgcctccaaaaaacatctgtacaatctctttaaggagcacgagccccttgaattctcattatctcgggttagttcctgcggctaaaaccgctcttcttcttcatgaatctctcggcctcttgttcaacctggagagcaaactgaagcctctttaaattctcagcacactgtccatgtaatcccggtgagaacattccaggaccttgttgatcgataggaccgagatgccttttgtgaggtgaatgccatttggatcgcaggtagttcaaagatctccatggaggtaacggcattgaattctgctttaaggagaatttcgctgcatcaaccattacttgaaggaactggtttaatcttgcaacagttcctacataaaccacaggaagtgattccattatccgttggtaagaatccacagctctagcgatctcaaaatgacttctgaaatcaatatcaacaatcaaacgatcatcttgaccaacttcagtatcactcaatatgatatctatatactcattatctcctgcaaacaaacaaaacatatcattctctcagaattctatgtccagaaacacttgtataagacggttcttagaagcgaaaacataccaccaggaactttgccaccaccttgccatctagctgaacatacagctgcatcatatccagaaagtctcaaaagcttagcgagataaaacctgatgcaactagcgttacatgtaccggatttcacagagtgtagatctttctccttaatagtaagcatcaatgtacgaaccaccgagagaacctcggtttcgtgttgagccatagagtacttgagatactgcagatacaaacacatactcttaattcaacaaaatgttcttcaccattcctagaaacctatgtactaaaacatgccttccttcaaattacaacaaaccacaaacgctaccattctaacaaatccatgataatctctaaaattctctaatcgcgagtggaaaacaccgatgaatctaagctaataggataaatcaaaatggtgcgatggtggtggtacctgaatcttatcggaaaggtaagaaggatctgggaatccagaatcgctgtcgctgctgcaccaggaaccagcaccaccgctaccacctcccgtttccagaaaatctgtaaccattaggcctaggtcatgttcaccgtcgtgactcgaatctatccctcgattcaaccattcctccgccggaacaactctcaagtccatacccatcgttcccaaatctcggtcaattgttcaaatttcaaacccagaacttatgaataaaattgaattgaattgaatttgagtctgtacaaaataaaaaacgcgtatcgtcccctttcacgagtcttgtgtgtgattgattttattatattatatagcgatgagagagacagagcttgaaggttctttttagcgaaagagaaaaatccaggaagataggcgaaaaggaagatgaagcgaagatgaggttaatataatactcatgttaaatgacaaaaatgcccttatatgattaatgatattaccatttgagcttgctgtggaagctgtaacgaaccgaaaattaaaaacagaataacgaacatagacggagaatatgatattattcgttttaccaaagaaactaacaaatagttttaactttatctaacaaaggggtaaaacgggtaatttgtttgggatgaggtggagcgtagcggacaatcgagaaattaaaagtttggcttggggacgaagttaaaggtgggctttaacgttttaaattggctgactcggacgatatttcttgtatttaataccaaaaatgaatgactttataattcatttgtagattgaaagttacgtattgattcgaaaatcaacacattgtgttttcaagtgggcataaactataacaccttgttgattgattaatagattacctaaagacattatggtttattactggtctttcaatatatttttatcgcattgtcaatgatattgtttttgtatcccaagtccactgttttggtctctacattcattttgattgggatttatctttttaaaatttcttctaatgttttttcgatatggttattacttgctttgattttcttttcagtatgtgtattgctttgcaaattgtttttttcttaagatgaaaaacaactcattaaattgtttgagaaatactactaaaacaaataaacaatgaggagaattatggaaaacaaagtgtaataggctttaattcattgctagtgggctttttgggcctatgggcatattacttaccactatccaacccaaaatgccaaataaccgacatgtctcacacaatccaattttgggccatacggccgaaattatttaaacctgtgctcataatttactttacaaattattacttttccataaattgtggaaaagttatctgtaacatccgattcaactggagtctagactactatagacattgatacgttttgagtttttagatacttggaagatatatgcatttatgaatacagattacagacacatactagtactactgtatgtctgtatatggatacaaaaaaaatcatgtatgaatactaaaattttattagaaatctatttttcaattgttgcaacaatcaagttgtcaaatttatttttgtaaccgttaaacaaacaaatatcgatttaggtttctaatctgaattgacatctcaaacaaaaaaggctgaatactttctgaaaatagtgtatggaatgaaggtggcttttagagccattataaccggaagaaaattcaggtgacttttagaaccattataaccggaagaaaaggtgaattttaatttttagctgtgtggaagacacggcaagtccaagtagtaccttcgtacgtcaatattgtccaaccggccgtgtcgaaaatcttcttgagaaaaattggattttcatctataaaaaaaaaaagtccaagtaataccaaacaaagacagcgacgtgtaaaacaatacaagactcataatcacaaacctaccacccaagtcaaacctatattccatttagtgaattcttgattatgacttcttgaaatcatttgtattcatatgtataattatttaagtcatttttctgtaagtaaaatttttatatatctagaataacgagttccctacgacaagatacagttgaacgtaaatgtgacatctcaattttcattggtgtctagtactctagtgattaggttttcgacatttattgtactgattaagtaaaaattcatggtacaaacatcgaatatatatttttctgcttacacacaccaattaacgtggatagaccaattgaaatattttgttacgacaaagcaaaacaaaacaaacgtcatgtttcgctgtttgtttgtcgtcccgttaatggtaatctttcagacacatacagtacccaaacaagtaatttgactaaaattttctctctgtctaaatttcagaagaaaaaaaaactttaggatatattgccaaaagatcttaaaaatgggtcatatcattttgatcatatagaatccaacgacctttatcttttcgccgaactatacttttttgtgtccatttgtttgactttctttcacacacacatccacaaagaaaaaaggaccattcttctccttcttctagtcacccctcgtgcctctctttaacaccaaacccaaaactcccttctctttcttccttcctctccgatctccgttcacatctctctctcatctttatcttcttctttttttgccttgtgggttgaaagtttctatattttctctttctcttctgtttacataatccattttcagctcaagcagctgaagaataacgatcaagaaccaaaaaagaagaaaacgaatctgttcttagctttgatgggttcttgcttcagttctcgagtcaaagcagacatcttccacaatggtaccatctctctccaactatcaattttcttgcaatctggaattatgcatctctctgtttttaattcatggagatttccgattttgattattgtaaatggtcaacatgtgtgtctgtgtaggtaagagcagcgatctttatggtctaagtctctcaagtcggaaatcgtcttcgactgtagcggcggctcagaagacggaaggggagatattgagttcgacccctgtcaaaagcttcacctttaacgaactcaaactcgccacaagaaacttcagaccagatagtgtgatcggagaaggtggctttggttgtgtctttaaaggctggttagatgagtccactctcactccgactaaacctggaaccggtttggtcatcgccgttaaaaagcttaaccaagaaggttttcaaggtcaccgtgaatggctggtactgtgttttcatttccccaaacttaagagtcatgtgttatatatgtgtgaatgcgtgtctgatctgttgtgttgtgttgtgctattcagacagagatcaattacttggggcaactgagtcacccaaatctagttaaactgatcggttattgcttagaagatgaacaccgtcttctagtctacgagtttatgcaaaaaggaagtcttgagaatcatctattcagaagtgagtcccatggatcatctttatctttgattaaatctgttttcttttgtttttggttctgatggaaaatggttttaatataggaggtgcatattttaagccactcccatggtttctacgggtcaatgttgcgcttgatgcagcaaaggggcttgcttttcttcacagcgatcccgtcaaagtgatataccgagacattaaagcctcgaacatcttacttgatgcggtatgtagagaaatatacacattcaaagaattagatgtcttcatagtactttcctgatgactttgattcccttaaacaggactacaacgcaaaactttctgactttggactagctagagacggtccaatgggtgatttgagttatgttagtacaagggtcatgggtacttatgggtacgccgcgcctgagtacatgtcatcaggtaaaaatctatcaccttaaatatgaattatgactaggttgatcaaatgttttagagcataaggataattgtttttaaatcctcgtatcatttcaggtcacttgaatgcaagaagcgatgtgtacagtttcggagttttgcttctagagattttatctggtaagcgagcgttggatcataacagaccggctaaagaagaaaaccttgtggattgggctcgaccgtacctcacaagcaaacgtaaggttctcctaatcgtggacaatcggctagacacacagtacctacctgaagaagccgtgagaatggcaagcgtggcggtgcagtgtctctcatttgaacccaagtcgcgcccgaccatggaccaagtggtccgtgccttacaacaacttcaggacaacttgggaaaaccgagtcagaccaatccggttaaggataccaagaaacttggttttaaaactggtactactaagtcatccgaaaaacggtttacacaaaaaccttttggcaggcaccttgtgtaggtcaagttgataactgaattccaggatggacatttttccggcggtttacttgaaactgccgatatccgttttcgacggattgaatgcggttctggacaaaccgtgcaggtcaagactaataaaggatacattaaattttccggttacatgtcccatacccaaccttagagaacatgtgtagcctttagcttaggcttccttgtgtgctgttatattgagtatatatgaggtaatttttgcctcttgtgttgtaacacttgtatttttgttcctttaacatttgatgtagagatttttcctatatcttcagttttgaaacccaaatttattgcaagtcaaaatatgaaaattctaatcaatgtgcaatgaataacacaaatccgaattgtgctttgttggctgcagacctgcagttaacacaaatcttataaatttgaaatgtcgttcaaactccaaaccacaaaaaggggaagcaaaacgcaaccgtttcacgatttttgtctagtttggtccaatttctcaattacggttttgtgaaatgcgtgtcggtctttggttctgcattcgaactgtgtggcgttttgtgtaacttatccacttagtgagcaaaactactcgactcgtagtagttgcagagaggttttagccgcagaagaaaagggtttactctgtcttcttcagacttctcagtgatcgaagctatgatgacgacaacaaccaatactatggctatgcttcaaaacctcgtcttctctgttccaatctctcgtatggtagttcggcgtcactccctcgctaccaccttctccgctgccgccacaaccgtcgtaccgtctcctaaaccggtatcagccaaaccggcgcgtactccacacgtggactcacatgttctcatcggaatgtcagagcctgagcttcaagagcttgctatcaacctcggtcaagtaaagatctgatttttgcatataagattcgagaagaaggaatttggttgattaagctgagaaagttctgatttttcaggaaggatacagaggaaagcagctccatcatcttatttacaagagaaaggttaataaagttgaagactttagcaattgtgagcaaattcttatcaagttctatgttttttgaagcgtcttcattgacagttatgcaaatgattaaccaattatcttccaattttcatgatgctaaaagtgccactgacgtttcgtaaaggacttgtggatggtggatttaaagtgggaagatcacccatttaccaaactgttactgccactgatggtaccattaaggtgactttggcaatgctgagatttttcttgcttaagttttttttgattgagtgtttaaggttttcaatgttctgtctttggttggttttatcttatagcttctgctaaagcttgaagataacctattgatcgaaactgttggtataccagttcaagatgatgagaagggcataacgcgcctcaccgcttgtgtctcttcccaggtgaatttgactttcttcttgttagagatttgtttttttttggttttgcatagttaagttttattactgatatcttcaagttctgctaggttggatgtccgcttcgttgttcgttttgtgccacgggaaaaggaggcttttcaagaaatctgcagcgccatgaaattattgagcaggtttacttctatattgcctcttgttttctgcatctgattgattatgtaaaatgaaatctattagaggtaagattcttatagaatgataatgaaaaaagagcatgatacaggtttaggaattgttgttttgatgccaagatgaaacacgtaggatcagatcttaagtagaataccttatgcaataatacgaagaagactatcatcgtactgtatattgttttacatcatagagacgcataaagcagtatttagaagcagttgtgtgatcccatttaagacccggaagaagaattcttagtaaaatgttaatgtggcttgtgtttacaagtgtaattttgaatgtcaaggtgttggctatcgaggacgtgttcaagcatagggtgacaaatgtggttttcatgggaatgggtgagccgatgttgaacctaaagtcagtacttgatgctcatcgttgtttgaacaaggtaacatttgccaatagccatttcctgtttcaacatggttttgtgcagaaatgattgaagttcttgctaagtatttaggcactgtaaattaattggaaagctaagacaaagacttgaccataaaaaaaagtaatgtttgaagcattaataggatagtaagttagcaactaggatgttcaaatatatgatttatttctatgcacaaacgttagttgcatattgttaaaccaataagacatagcactcactcatggtatacttttcctttacttaggacattgaaatcggacaacgaatgattacaatatcgactgtaggtgttccaaacacaatcaagaagcttgcatctcataagcttcagtcgaccttagctgtcaggtgcgtcatcactttctgattttattcatgtgttgttcaattacttaaatgatcttttatacaaatttctctcgagtacttttactttactcagctttcttaccccaaacatatcatgaaatgttctgttctaatcctgtaacatatgctctggatagggctcgtctcattgattttcatgtttctatgttatttactcgttcttgagctgttcttttggtgaatcagcttacatgcgccaaatcagagcctcagggagaaaattgtaccaagtgccaaggcttatccgctggaagcaattatgaaggattgtcgtgattacttccaagaaacaaatagacgagtctctttcgaatatgcccttctaggtatgtgagacttgagatgaacaaattttatgttcgtctccctcattatatcatctactttaacagaagttcataaatgatgatgcagctggagtcaatgatcaagttgagcatgcggtggaacttgcagagctactccgtgaatggggtaaaacttatcacgtaaatttgataccttacaacccgatagagggatcagagtaccagcgaccttacaagaaagcggtatgttaataacaattaagcacagctgcacaggcattctgttttgggattggttttggtctacaaacttcaataaaaatacaaattgtgcaggtcctagcgtttgcagctgcgttggagtcgcgtaagataacagcaagcgtaaggcaaacaagaggacttgatgcaagtgctgcttgtggtcagctgaggaataagtttcagaaaagccctttgcttactgagacggatagtcaagagtctcagccagatgcagaagctgtcgcttgttgatgtcctggattgcacaaatttccggttttgccattggatggctctgttcaactttggtttgaagaggagacatggctcaatcacggaaaggaaaaatcgtcgtgagggttggttggtcagtgtgcaaccaaggatgaagagattgaagcacgtttgagatgtgacgactttgacgataggtgtgatgatatttactttggttaataattatgacaagggaactaacttaaagtattgttgttactcagtgaatgatgtcaaatccgtaaatctatatttcaaaattcctacccgaattgtcatttcactttacgatgtggtgttctattttcatctcttgacccagaattatatgatggtcgatacagttgtaaagttttaatatacaatgaagcagtggaaatcaatgaacgattccttaggaagcttacgaaagggtataagaaaactagcataactgattgcaaagccaaaacagaagtaacataaattttctttcaataaaaccgatatcggccatggtacattaacacaaataaaattacaaagtgaaaacataaagaaaattacattacaaagtagatgatgcttcttcgctacacctcggagagaaactactcaagcttttcaaaataacaaacatctttttttctgcatatcctcgaatatgttttgtattattagaaccaattatttattgaaataagtaactgtattagcaactgttctttagacgacttgaaaatctcatttacttgaacacattcaaaacaatattcattgttttcttttgcatatcctggaatatgtccaatgtcttttctagttcgtcgatatgttgaacttagaatacgctatgttggacttagaataattttctaagatccaccgataaatggtctattcgcttgtagagaaaaatcacaacaaaacaatgctgtttcatctcgaaaacatccgtaacccaacgaaatcaaagaagaggacgggaaggaacgaaactgacacatggctggtgaaaattggaccgggacattgaacctaacttctgacaaacgcaatctcaaactaactatagacgacgctctactcgatactcaaaagaagtaaacgaaagtacctttctatgagacaagaccatgactcgatctaacggcggaacatgatctaagaacccatctcacttttgtgttaagatggacttacagatcgtatttgcagagcttgacggcgctcttgtttttctctttttggtatttgacgtcgggcttagccgtttaggtttaggtttgtgaggtcgataatgactgacttgggtttatatatataatgccaacgcttccctatttaaccttacaattttgttaagtaaagaatatatatgtttagtaaagtataacaagaacaaaggaaacaaattgaactatttattttatagaataatctttgtttgaataacaatttccccttcttttcagttgactttatactttacaaaatattcaattcatttttcttagtcaaagagagaatccaaacatttcactttttaccatatagagtatctttcattatatttagaatattttcatattttgtatgatatatgcatagcatagatgtgtgtattatatatttagctacataactgtttcaagtgaattgggtgattgttctctatcaatgacaccaaagcactccaaaataagcatgtatcaggtaaataaatctagatattaaaattttaaccgaatgatctaaataaagaatgatgaaaaatattatgatttcctaattgggtgaaacaagtattgtaaagtttggtctttatctgctggataatatgacatgttacactgaagatcctaatcattttatttcttgtcatattctcccatctcttcaaaatgctttctatgacttttactgagtcattctttcctcctccatgctccgccatttacctaggattacatttcgtattcactacatccattgtgtttttgtgttttttttattaacgataaaaacatgaaacattaatggcccaatagctaagcggcccaatacatatcaaaaggagaaccaattttgaatcagaataagcccaaccactgtttgattctatgtttgttttattgaatttttatttgggttagtaggatcctcaatcctgaattcctgatattcggtggaactggtttcttaagttcaacgattctgattggatttttacttttcaagcaattaattgttttatttgattccattttacatgaaatttttctaatgtttttctaacgtgtttgatttgcagtttcaaatgtaacaattaaagccacacacgttacaacataatcgatatgtatagcatagcgaaaactgcaagaatatcagaagtagcaacgaaactgattatttgattagacagtgaaaggtatcaataatgaacataagataatttttcctattaataatgaaattacaacaacagaagactacactaaaaggtacaaatacaatgatccgagaaaattacaagtgcaaaagtgatgaacgctctttaatgtgcttcacaatgctctttcaacatagtttgctaaaaacttcactttcgacatatatcctcaaacatcaatgatgtcttttgtaatttcttcatcacacaaccatatacctagttttctttttgcatatccatgaatatgtttagtattacaaaagatataaaatgaatcttatatgtttactaaaacaaagattatcaagatccatcttactcttttgcatatactcgaatacctatatgggattaaagacctatgtttctaccatccgatcaacaagagttacaactttttttacggggataagactgaaacatatatgtatatcccatttctaccatctggaatacttgaactaccatctaaatctattgaacatcgtgtttcaaaatacacaagttcaaactataatcaagtgaatagtttaagtatcatcattcgcttggagagaaaaatcacaaaaccatgtcgtttcaactcgtaaaccgccgtatttattctagtgaaaccaaaaaacagagaggaggagccgtgactgacacatgcttggtaacaaatccattgtatcatccaagatattatcattaaaccaacttgtaactcgtaaactcactcccaaacccaacctaaagctatagaagatgctatgataggctactcatagaaaggactagctataaaagtacctttcagtgggatacaagatggagaatcaatctaacagctgaatctgatcttcgaaacccatcagtgtgacaggagattctgtcctctgaatccaacacaactatagtgtttcaccaaagtggctcttttctcgatctctttgcagagcttggcggcgcttatacttatttttctctttgtttttgacgtcacgactaggtttaggtttatgaagtcataagttgggtttatatatcaaaaacgtttccgtatgcaaattttcttttttattccaaaaaatatgtgaatatttggttataattagtaaaatttgggcctttcttggcccagctttctctagtaaacaactcaacttcattgcttaaaagaggtaggtgtaggtgaaaagatgaaatgtcatcgaatgggtcagtctgtctgacactgtgcaaagcgttatggactatttttggtcaaacagttaaactatttcagaagaacaatcgaaaccaagaggtctttacggtgatggagttcacgtcatggccacctctaagaaactgtgtttgtaattataacgccaagtctactctttttatcagaatctgatccgccgttattccggcaagtctcatgtgacttacattatcccttcttaacaacctcaagtgaccaaaaaacaaaagtcaataactgttttaatactccgaaccgacccttttaatggctcccacgtttcactctaatcattctctttctctacttagacccgtttccttcttcttatgtttctctgaaactcatgaaatttgaggaactactcatggaagattcatcacagctacatagtaacaagagacatgacttagaggaaggagtaagcacctctgttcctcactcaaaatctctataccaataatttgaatgtttgtgtttatgtaggtgatgcatcttaaagagagactagaggaagaagaagcagtgactagaactttacgagttgcttttgatggctctattgtttctctcccaagtctctcctcattgtttcttccacctcaggcaataccaataaacataacctcacataatgttaattatttcttaatgatcaaacaatgatgagattttattgttcaacagttttctgagctcatacaagaactagccatcgtggaggcagagattctctgtctagaccgaaaaatcgaggagctaaagcttaaactgtattccgaacagagacaaacgcaagagatacaattgcagatgaccgagcagaagaggacattggcaagacagagccatgtgagacagagtactctgccactaagacatgatcttcatcaacgatctttgtctcattgttaccaacgttctacactagacactgcctcaactactcattcaagactctcattctcttacgctcctgatttcttggatgccacttcttcaggtggcttcacaggtaaagtagttgcttattccgaatgttttctctaagcctcacattacactcaaagtcatggttttggtgagcagacgaatttgatggagtcacgaggatgcagatgggtagagtaagaaaagggcttcgacttgttgaagcaaagaccaaagacgacccaaacgaagtatcagaacaactcatcaactgtcttataggcatttacttggaactcaatcatgtttcatcaaagaccaaaggggatgtctcgctctcaagaaggccatcttcttgtagccggaaatcaaacacatatagttattatcaaaatgcaatgaatcttgatccttatcacgtattgccagactcgagcggaggagtcaccagagacattggcccttacaagaacttcatccacatttcaagaagttccatcgatgtgacacatttcacccattattgttcaccggctgttccacgcttgaggtattaagtctgtgaattcatcatacaaaatgatctcatcaaatagtataattcctgatgaaattgttttattgacgtattatgtgtgttggcagcgttttgatggagaaattatcggaggtagatttgagttttttgacctacaagcaaaaactagccttctggatcaatatctacaacgcatgtatcatgcatgtacggccacatttacaaaagaagttactgaaattttcttataacataacacacaaaacttgaacttaaaatcaaattttatgttccaatgataggcatttcttgagtatgggttaccatcgtcacacaatagactacttaccttgatgaacaaggtaacttgtttgatcaaaatcccaagaaagaactctaaatgttaattgtagaaacattttaaacctaatgatgccctttgtaatgtactggcaggcttcactcaacgtaggtggcatagtcctcaacgctttggcgattgaacatttcgtcttgcggcatccttgtgaaccagaagatgtaagtgcattccatcttatttcattccaataaatataatcaaataccacaagaagctaatcaacatcttcatgaaagaaggactcgcttgacgagaaagaaacgctccttcgtcacacttacggtttaggatattcagagcccaatgtgacatttgcactttgccgtggaagttggtcttcaccagcagtgagtggacaaaacatagttttatcatgacgaatgtatatcactcaaatgtacttatagatgatgaaattgatatgcttgtgcagctaagagtctatacagcagatgaagtggtgaatgatttaggaagagcaagagtggaatatctagaagcttctgtgggtgtttcaagcaagaaaaagattgtggttccacagcttctgcaatggcacatgaaagattttgcagatgatattgaatctcttttggaatggatctatagccagttgcctcgatcagggaacctaaagggcatgattatggaatgtctaaagagaaaagcaaaagttcctttagctaaaattgtagagattcaaacatatggacacgaatttcgttacttgttgtcattgtaaacatgagaggtccttatctagaatagaataacaatgtttggtaacttctctctcggatgtacacattctcgtctgttgcgatttacaacaaatacaatatagtttcatgtgaacactttgacaaaagaaacaagacaaaattaatattcgacaatcctaaatgtttgaataggagcggcgaaattttcatcaattaaagcaaaccctaataaagtgattattaaaaatatttaatggaaatgagtataaactttagctaaaatttgtaagtggagaagacataaacatgttccgttcatatcaccaaaaaggaaaaatgaagaagtagacgacttgtggacttatggttacgttttgcatcaaatgctgtcgggaaatacttttttaaaaaacaaatttcatcggtcaaaaatcaatcccacttattaaaggcttttcatagaccaatagccattgaattattcttgcttctcgttctactacactaccaaatctaagtgggatccccgtggatctaacactaacgtgcatcaactatttggtaatggctagttagttagaaataaacaagaagattagtagtattaagtatcaataatacaaccatgttttaagattacacgagattaaacgttacaagttgtaacttacaaccaaaccatgtaaaatactttaatagctgcgggctgttacaaaatgttctcacagccacttcagctactcactttctctttctccctcatttccccctttatcactcacaattaaaacaccaaacccaaaaaaaaaaacattaaaaaagtgaaaacacacacaaaagtcaaagatactttcccctgatttttctctcctttccatatataaaatttagtaaaaaaaaaggaggaggaatagcgaaattagcggagagttttcttttgtctcgaaccactttaatttctcgaatttcctccaaattttagtttctcgaaactcgccttaaaccctgaaattcttcccgacaaaggtttgaccaaactgccagttagaaggaaccatgttccaggaagtagatgttctacggtcactgcctgtgacacggaaagagagtgcttgaccaaccaaaacagcattagattgccagttttgtccccagtttctgctcaaactcatccaaccagtccgtgatcctttcacactagccctcacgatgtctcctgctccagccacgttagtgatcagaaccaagttgaagtaacggtgaccgttgattgtgaaccttatgcctcctctctttctacatggcaccctacaaacaaaaccaacatttcacactcgtttagtcactcacttatatgtccatttagtgactaatttgtatactagaaacagctaataaactaaaatttagtaaaatatcatcaaaatttgattttcaaggacttaaactacgaatttttaactattattttaaatatttaatgaaaactaaaaagtatcatttagtaaagttaaaaggtaaatagagaacaaaatgtcctccactaatttttttaaagttaattacagtatggtcttattatcttctaaatattgccaagaccctagacatataaacaagatttgtacctgcggtatgagacggggacaatgccggcgcgatattgagcgatcttaaggaagacaggcatggctaggtcaaagtgttcacgtggtgggttgcaccatcctccgttgtcgctaggctgagccaagtttggtgggcagaaattggttgcggtgatgaggatcgaaggactacctgagtgacaccattgagggtcgttggcgcattttagctcaaagcaggctccacaactcataccattgttaaacagcgccgtactcaaagcagccgtgttggtcccgtacccttggctgtataggttaccgtaaccacaagctcctcctgtaatgaattaaactcattttgttaaaaatgacttttaatagaaaactttatactaaaaaattatatttatgctctgtttttatgggactaacccattgtgccggaggcgtcgctgccaccgtaaaaagtggcgtgtgcgttttgccatgcgccgccggagtaaataccggggattctagcgtcggcgaggctaaaaagaacaaatgtggtaaatagaattgctagtttaatagccattttgtgtgtgaattactagaaacagagagttttaaagttactatgagggtgattgttaaggagaaaatgaagaaagaacaagagcgccttcgagcttgcgctcttgtatagagaaagagttaggtttgttgattgagagatgaggatggtggaggaagaaggagtgaggttcggtatttatggagggaaggaaactccaaagttagagtgagagagagagatcgagagataattggctaaattttaatttccttttgtcaaagttaaaacttttaaaataagattactatttctacgtaaggtggaggtaggtttgtaaccgttttgtcatttttttaatgtaatctaattttcttagatgatataatgatacttacaaatatattatctcgttgaatcctggattttaaaattggtaagacttggaaattttgatgctaaaaaaagttcgacaaagaatatcgagttgaccttatttgaggcgtttcatacttatgaagagaggttatcttactttatattttattttatacaaatgtatgtttgttttgctgaccaaataaaatgtaaacatttataagcctttaatatgtcttttgactctgctcgtttttcactttttttttaacttgcgcgcgtagtctagttcaaaggtgaattgtcttatgcaaattccatgaatctacgtacagattctctcttcttttgaaaaaagtaaatattttctaaagcaatacattgatgagaaagaaaaaaactagtacatttctatcagaaatatgcgttcatgagtaagtcatgtcatataagaaactgtgcatacaaattttaaacaatacccaaatgtggttagctcaaatgttattcagtcatctactccaaatttaaactttttaaatccgccaaaaatatatgaaatctggtctgcgatattgagatataagaaaattacagagcatccagatatatgagttttattggttaatctaaaaaaaaaaggtgtgagtctatttctaatcgggttaagtgaaagggagaataaatttggtttgcttaaaaaacaagttgtagctagcatcaatcacgaacggaatttgctaagctcaacagtatcgccatcattacttctttacccttttttggtcctaaacacttttactattttcatgcatgtcattgccattgtcatttgcgacttctttcacatctttaattttgctaaaaactcaatactaacctcaattattaatcattaagtatatatgataagtagatgcactttatagatatatgtttccattcaaaaatgttttaccgattgccgccaatgtatttaccccctaaattttaagagatttcgctttaggaggtagagaaagactcccacttacatagaagaaagtgaatttttaattagaaacaaattcaacaagtttcagaaaaaaaaaaagcaaaaaaaattaaggacccatattgccgcattcatcggaccacgtattgcgccgtgcattagccgtacgtaaagtgatacgcccgacccgacccgatatctcatggacctattcggtcaatgttttatgtcacgaaactgtcaaagatatacgtttaaagacaaagctttctccacttcccagttctcactcacgtgagaaaagtcaaagcttcatatctccctccactcccactattcaacatttctttactttagcaatatgataaaaaaagtattatgaagatggatccaagaaattaaacatccaatagaatattggaatccagatataaactacaattctcataactagttttttgtgtgttgaattataaacataactagttagtttgaaaactttagaagtaatggacgactttagcgtttctatttattttcacattccagctcaattataattaagttacatatctaaactattactgattttttgtgtaaattaattgatcatatttctttctttttttttcttcttgctgaaaaaaaaagaacatgcacactaactcactttaatctttatgcatcggcgcgccaccaccatcaaagacatcaaaaacctattatagttttaaaacttttttaaaatttaagcatcataaatgtcgttagtttccctaataaaaaaatattgaatggtgaaatttagaaaatgaaaataaaaataagaataagagaagtgataattggaaaaaagaagaaaaaacagttaaagaggcggtgaacgtgagaagaggttgtgtcgagtatggcgatgacaaggcatatctatgcaccaaccagatcttcatatatctgccacgtcagtccaatctgtgccagcttctaacatctgtttttctgtctggtttttttagattgaaattctagatggatttgtttggttaccgacgatttttgttccttctcttcctcgagatgatagggggacatatcccgtatatcggtatatggttacaagttaagaaatgtgaatagcaaattataggtggatgaaaatattaaaaaatgataggtgtatgtttgagtgagtatatatgtttgttatttctgtccatatacatgtgttgtgcattacaagttttatttttggccatacacccagtgtactatatatacctaatcatacatacttgatatgtgatatgtcacatttgtcgaattaatcctggcaacgagttagtgaaattacaattttcggaattattgtatgcaatttattttcttatgtacatccaaaatacacatgcacgtatagtagcctaagaagcctttatcatgagaacacaaatgctcttgcatgtgaattaagtatctaccactcctctcccaacaaattcacgtctttacatttatttcgtgtcagcatataacatttataatattcagcatcatttaataataataaaataaataaaaaaaatatatatatatgcaattcggacacaaaccggactaatatatatttcgaatgagtgtagtcgtagattgaaccaacattggttttaatcaaaccctattcagcaagccattaatcaatcttgacaagtaacatttttgtaactaaacctgcataactagaaccatttttaagggaaaaaagagtttaatataaatcgatttctctcaagtaaatcaggaaaaatcttatgttttcacagtttaccatccgtatacgtttttagtagcaagacaaaccgaaatactatgtgtttcgaggattcgtctgcgattcggttttgcctacggttaaacaaaaaaaaagtaatacaaaatgatggtcttgcttaataatggatattatcagaccaaatagtatgagcagtgtgatagtgtgaatgttcaatgacaagcttatttaatacttaggcgtaaaacataagtacgtgtagattgctgattgatattcaagcaacaaattaaatcattcccaaattctattattagtgaaagtataattgcatatctatttacataataatttcatcactcaacaacataccatttgaaaacctcaatgagagtgaaaatttctatatccccgccaattatttgagtgagcaaaaaaattctagaatgttattccacacatctataatctttgttgtttacatctaattttatttacactctctttgaagagcagtaaataaaatgtatatgtgagagtaaaatataaaccctattcaaatttataaattgagaacaattggatccatcaatcttctatgagagggtggggtcatagatcctgagttgatataagtgggagaaagagaatttgtatgccaaaaaaagttaattgagaccacacatgcctatgtccacaaccacattgtaagaaagattcccctcgaaacctagcaataaaaacaaggagatctacagttaatttttcaaaaaaaaatcaatacagaaataaataaataaaccattttttcgcatgcatcatctttattattatagaaacatcgctaaaattttaaatgttgcactagttaataatgtttagagcatactctttgtatcacttattttcgatactactcaaataaaataaatgctacttcatattttccaatggaaatttggggcaagctatggtgacatattgggggtctgtgtctaaaaaagaagtggattcctttgaaaccaccacgtgaggtcattagaaagaaaagaaaaggaaaaaaagcaaaacatgtcatgtagagattagtgatatcaaaagaagaagatctcatgactacatatgttaaaagggtttgagagatttcatgatgttacgttggaagaggatatgatgactatatatgcaacgcgaggagttttgtcgcttcatggttactttatcatggtttttgttctgtcatgtatttgaagtaatttctaacatgttaataagagtgagttaaaaaaaaaaaaaaaaagagtgagtttcgcaccgacactctaaatgtattgatagacaaatgatttaggaataaacatacaagtatttttcaacaatgagtttggaatacaatcagaaattgataagtattttgttgatttatatggctacgagtgatataaaaaacttgtatggtaccaacttagtgttgggctagtagtggagttatgtccttcctagaagtgtgtagtctggtcttttttatttgatttccgattgaaaagagctatttagttcacacatagaaatatatggatttgaggttataattttttttattacttatttatagtgttttttatagctaaaacttataaagttttgtagtttttgctattactacagatagatcatgaaattatggcgaaactcgaattagtggatttagtaatatattagaatttcatgaaacaccatttttaatggatcatcttttagtaatatcatcaaagtatactagtatgccataatatcctcaatgaaacacttaaaaacagataggatttttattatatatattcgacgtcgatcgataacgataggactttcttttagaagaaaattaaagctaatgttgaccatttgcatcttagtttccagtatttgaaagaagaaaacatggagtgattgaatttgttcaaactatgccgaaatactgggtacttttacaaatcttccaataaaatatatacgaaatttgaaattgatcactgcatatagtttccctcgcgcatgccatagctaatttgaggctatagtattagtaagatgaaaagcaaatgttcgatagcgtaatcaatcatttaataaaaacccttaatttaaggttaagggattggaccaaaaaggaccattgctaaatttgtgtctcccctttacatgcatcaatgtctcgcactcatactgattaggctttacgcaacactctctttttgccaaagattagatcccaagttttgtcacgcaaagcaaaaattggaatcctatatatctgttcatctttttttttgtttttttccatttcataggattcccttatttttccatatatgtatttacatgggtaaaaaagctcataaataattttctctaacattttctataatttcaaagaagttttgactatgaatatttatatattgttcttcatagaaattctacgaagtgaatgattgacccttttgggctactgtcactctgtcagactgatactgttattgtagtcgatagtatttgtcgataaccgaaacattttgaattccggttccattaagattaacacattttatttagttgattatattaactacactaaataactttttaataatatgttttagtattactaacaagatgaagctttactagtagtggtgactggaatatcttgttgatatttaattacaaaatatgagcacgttgcacgtacgacggtgttgcttaagaaacaagccaagttatatattaatatataggacatatattgatttgctttatctaaaaaaagtaccaatcaactaactaaacctccatgacgttatctttagttaagttcacttgtctccatatatgatttcctttaacttaagattctcagaaaccaacattacctttgttctcgttttggttttgtttgacattttgaaatatatattttttttattttggccaaccaactgaacattgttattacttatttttatcatttctaagttcaacgaccgaataaaaaagtttgaaaaacgatttagttagcaagagaatcaactagaacaaggtcaaacttgatgaatcaaagaggttgaagtaaggttggatgtttttagaactgtaattgtgatattggccttgagaacgtgtacactctactcttcttttgcaagtaataagatatcaaaggattccagacctattgtgtttttttttgtgtgtgtgataaatgcccaagtgaaagtaaatgaaaatgttcgtaaagaagtgtagcaatgaagacatatatgcgttactgggccaagaaaaggaggttttcaagttaaaatgaaacaatgcaagtaaagcccaaccaataaaagagatcggcaacccaaatatggtaagtaggcaacatgccaacatagagtacttaattacataaagaagagatgcaatattacaacttacaaagagtacataagcttaaaaagcttctttacaaaagatttatgagaaaaaaattgtttcgtttaccgaaatcaattgggtcttttttgaatagaacatttatatagttgaagatattggaatttttttcaaaaagagaagatattggcattaaaataataatataactggtgttttgtttataaactttttagtaggattacggttgggtttagttttctttaaccaaggcaaacctaattcatcactgttatgcatctgattctgaattcaaatgataagatacagcaactgaggtgagattaataaaaaatgtaaggtaatttacgtgttgaaatgtagaccaatgtattcgtcattttatatatatatttattatctcgtttatacaaatagaaaaagaaataaacgtttattgtcagaggctctaatttctatatacacagaagtgatgcttttaggtaaccaaagattatatatatatatatatatattatttttggtgaccaaaaataatgttaatgtttcttggatttgacatacagtattaacctcgtaacggtcaaattagagctcattaatcaagattggtctttccatattcacttggctattcccataaagattttacatgcatgcacacaggcgacagcggacaggccaatccgatttttaaaaaattcagtttctagcttacgtcatcaacgaagaaaaaaaaaatgaaattaatatccaagtatagaaagcatcggaacacattttcctacgtagtgagtcatgagatttaacagcacaatccaaagaggcagagagaacacgttgttttagtcacagaagtttgtttatagacatttatgtaaggcttagaatttatgcattatttgtgatcttgtgtttgtgaattttgattgcattacatatgtttctacatcaagtaacttcggtacgggtatggatacactcctcttgccacttttttcttcctgacaaagacgatgcgaaaattgaatactcgtaattaaaaaagtacataaagaaaaacgcagaaaatatctcgtggcccttttctatccaaaggagtctcgtgtcagaaattgcatgtgacgagtaattaatattcccattcgtttcaatatatatgaacccatattattttctttcacgcatcattgataatcacgttcacgttcacatatgttttatttatatttcctttgatcacagcgtaagtatttaccaaaaaaaaaaggtaagtatttacccaatttaacgttcggaaattaaaatgcaaactccttccattttttacaattacacactaggaaaaaattacttgtcatcactcaccattacactagagaaagcaatatctttagggactaattaggtttaaatgtaatataacaacaaataaacccgaccaaaggtggaactagggattgaagaaaatacagttaacacgtgctttgagtttgcagattctcttgttcgtgcaagagagagggagagacgagtttgaccgttgaccggaaaagaagcgccggtaagcgggctaagtcggtcccctgcgttactcgaaacctcgctttcacacatctctacagacacgtgtcagtggtcacgcccacctgttagacgcacgtgcctcaacgtcgacgcaaaagaaccacaacgatctcttctctctttgacctctgctttgtttcttttcttgctctcactgtttattcaccttttaacgttaagaactcaagtggataatggactaagagaaacacgaatattaataattgatggcaaatcatagtgaaagattttgagagattatttgatttggtgtgtagattgtcagaatctgaaagaaaatatgaatatttatctttaccaaaaaaaaaaaaatgaatttatttagttcctctttttatttttttaaccaaacatagacaaactcatttgtgatatatcttaacatttaacaaaaaagaaaagaaaagaaaaaagaaggataaaataattgaattccagtttcaggtcataagaatctaatttcagcatagtaaattttgctttactacattggcagttttggatagaaagtaacaaagttatagagttgtcacactcttcgactgtaactcaatatgtttttgtcttatcaatttttttggcagctatcgaaagctcggaagaactcacactttaatttgtcaataaatttcagttgatatcttgctaaattttctgaattgcaaaaaaaaagtggctattttgaccataaaaatgcagtttaatgatgttgtagtataatagtcttggaaaaaccatcaacaattgttttacgagaaaatatcaaatatggatggaattacccgcgaaaaattaagtaacaaacaaacaagaaaaagttataatagtaaaaagtgagcttacaatacacagacgtcgcatcctttggattgatggatgacacattttggatgtaagcgtttatgtattttatctacttccggcgtgtagtcaatttttgaggtcatttacacatttctacctatttcaattcatacaatacagatgtttagagattttaacgaactttgattattatttttctgtcgcagaatatgtatagttaggttagacatagcatattcactactataaaaacggtacaaacagaataatagtaatctctctaagcatatcgtttttttttttttatgtcaaacgcaattagtttttagaacaacattgtactacaactcgacttatacgcaagagtcggccaagtactaacgataatatttttataattgcttcattttccgatcatgaagttgggctacaagcccaataatattggtcttccactactactctatatttttgtttgtctcttaatacttcatatttgctctagaatctaattttgttgagttgagtttgaagtttactttggttctattttttccacttcagtttggtttaatcccccctgttttggttcaattcacatccaaaacttgtttatttatgttttatgagttaaaatagtatcattaacaaaaacggtaagctggttaatgatgacttcttcagtccaaaaattagtcggacttcagcataaaataccactcgttaactcaaagagaaaggaacagaaaacaaacttaccagaaaagagaaaaatacgggagaaaaaacccaataaagacgaacgagaagagaaataaacatcaaagtcaggcaaaaataggagcactaaaatagccaaaccagattactacaccaccatgtgatttcacatcctttccttcatcttcatcttcctcttctccatccattttttttgttgtcatttcttacgattcttagtagtaaaatattcaccgcagtaaagtaaagtagatagagagattcatagaaacattataattcgttacaaagaaaaagaagttacatacatggaaacacataagtatacagttaatattcctttgttgtaggtgcaattattaattgatctgagcaagtaattaacagttacaggtgcagagaaagagactgagatttgctttgatgcattaaaatccccctctttcactcttctctactctccccactttctgacttttccttccctctttaatcttcaatttttttattaaaaaaaatgattggaataggagaatcccaaaaatactgatccgatctacttttaatttttcaatattatcacaaaacttataacttttaaagtgttagccaagagcgtgatccatcgaacggatcatttgaaatatatcgttttttatatgctcattgtttacgttttcataattttcgtattacaaggaaagaaaaatatatctcaaaaagtatttgttgaagtcttgtacaatcatgattttcatttcacaaataagatttcaggttcctaaataattaatgatctccaatgcccaactcaatattttcctctatttcgaaagaaatattgttgattttgctccatcgtatgactctactatagaggaaacgtatagagcaatctctacacttttcctctattttagagtcaactctattttaaaaccatacaatgaaacaaaatcaacaatatttcctccaaaatagaatgaattctattttagaagaaaatattgaattgggcattggagatgctttaacagttttttacttttatgtaaacgaaaacggaataaaccctaaaaagaatattgatataacaaattaaattctcattgctcttggcttagtaatattggaagctactttaaattttataataaaaagaaacaaaaaaaaagactttataaaaaaatatgagcaacaaataagggtttgttaaaccagctaaacgtatcataataccgttggtctcttcgattctcgctagatataagttggattacgtaaattctaacaacatttcgttaaaatctcgtaattagtttggatttttcctctttatatatgattaattgaggtttttaaatatcaaagacaaatgcttcacatttaagaaaaaaaaaagtgttaatggtggggcagtcgaggccgcaacaaggccccgggcaataccgactgccacaactctctgcatcctcttctaattttatatttatcacaaaatccgacaaaagtatacaaaaatcaataaatatttaacctataatatttatctttgcatattataataattattattttaaaatcgaaatggttctacaataaaaatatccattataaatacagaaccctaactctcttttcagttgctgactcaaatctccaaactcctagaaaatctccaaattcccaagtttgtttctttaatctctctattcctcacaaactcatcaatttccaacgaacccacaagatcaaatatttatccttttttcctcgttgagatcgatcacacacacacaaatctgaaatctgagatctttaacatcaatggcgtcatcgtctagcctgactcgatcgggaagcgtccacctagacgagaagtggaaactgtcaaagaaagacggcggcgcgtcgaggatcacgcgctcttcatcgacctcatcttcttccttcaacggcaagaaacaggggagatgtgcttttacgagaaagtgtgcaagattggttaaagaacagagagctcgtttctacatcatgcgtcgatgcgtaatcatgcttatttgctggagagataattactctgattcttaaaaaaaaaaaaaaaaaccaaatctctctctgtttcttgatttctctgtttctatgtttctgaaaccaaagtagatagttataatacatgtacataaagggttctgttttctgttggtttctacttctttagatgaactttagattttgtttatgattctggttagagaagctttgtttaagatcagttccagtgtgaaggaaaataaaaaaaaaacgaagaacagacaaattgtaaaatattttaatcaagtataaaatagtgaattagattcgtctttcgacttcttgtgacgattttgtttttgtttgttgctcttttgttcgtttgtgttttttgcatattttcctcttcttgttgttcattaatgatattactctgaagatgacgacgatgaatgtggcttttctctagagtctatagaggtgggagagagagaaaaagattccattggaactgttacgattaagctatgtgtggatcttgtgtgcttagtctgacaaagttattagtttttctctctttttagtaataaacaattatgatttatatatttttctaaaatttcatttcttaattagttatgattaatatttgaagttgtagtcaagctcttttgtttatgcttaatgatataaaactatacttgtagaattgttagacttagccatgattagacttgttcaagaaattagaatgtgttaaatatgattacgactttcttttatacttaaactattacgaggcttttttaatatagttttcgattagtgccatttcgttgcttatgaaattggttctttaacgggtaatatttaatgttgattgggactaatattggaggtgatttttttccttctcaagaaaggaagaatattgattggttaatcttggaggtgatttttcttctcatgaaaggaagaatcataacaagatacgtggattatatctagtttaattgtttagttttattagcatctttagttaaatttcattgatctttttagccaaaaaagaagaggagagatttcattgatcttcattatcttgttctcgagtaacttaattatataaaacccaagacaaaccattttagtggccatttaggattcaatatctatatactatcacaattcacacacatgcatttgtgggaaattatatggatttttttttttttttttttttttttcatctggaaagtatatggattaaaactagattatcaacaaacttgaaataatcttatctgatatcatatttcaattctatatagttttatttatattatgggtcaaagttgatttatttggtcaatcttccattcacattaaaaaaaaaattgaatttggaaataaaagaagtataattgttatcgtatttagcagtgaaaaaaggctaaaaacttattcttaaagttttctcaatccaaatttgttttgttttattttattttgttaaattagtaacaggagagaaaactacattaatcaaataattaacacttcacatgcgaaactaacagctggatttcttgtagtttcttaccatgggcatctctgcattgcagagttatcatatgcatctgactcctctatcacttattatatactctatttttatacacttttaacctatatggctaatatagtcgcatctttgtatttattttgcaaacaaacaaaagaaaaaagactgcatttgaagaaattctttagtaccgaggctgtttatttcgtgggtaatcaattgagacattaactacatatgatttaggttccagatcagtacatgatgtatctctgtccattcacaaacgagattaccactttaggaagtgctattggactttactggcatgctgaaatatcaatagatcaatatgattgtcaccgaaaaaaatacaatcaaatgatgtatatattgatatgacaactgatgagtatgtagaaacataagactataggttatttgggaaatgtaaccgaaccaattcttttcacaagagtagttaatcttattataaaatacaattattctacaggattattttcgtagcatttttcaaaaatgttattctatatatgcattagcattctaagtgtggtttatacatgtaaataactgtttttcaaaaagaatattccatttgttcaagatcaagacgaactatgttttaggatttggaaaaagaaaaagcgtatattagccatccccacaaatctaaaggatctttgttttaatgattatgaattgtttgattgttcattagcatgcttaaattggattattatagacatatccggagttccggacaattccgtttgactttctttaacaattcttttgtcacttttgtgggcgtcttgttaattttatattatatcgacaattattgatgatttctaatttattattctacttgattaaaactatgaaatttgctaatgcgtgttttcctccaaaagacaaaacatctctttagtaattgtagtcctaaataacgaagtcggaactaggaagtaggaaatgctactctatgccatattgccatatagaacaaattctgcttcaaaattcaagagtcataattaattagttctataagataaaatcagtatatcgaaaaagaaggccgaaggccaatctcaaaggtctagcaaatggtttaactcgatccaaaggcatgatttgaaataaatacaaaaatgtaatttagggtccatgtttggtcaacaatcacatccgtgacacgcaagcctgaataacattaatagtagagacaaaattatcctaatgatgagaaatacatgcatccataattcggatagtttcaagatatatgggatggaaattcaggtaatgggtccggttttcggattttgagtatagttatccgaatttttactaatttgaatgagatcgatctttattctttagggttgatttttttttttttttttttttgttgggcaacactttagggttaaatttagaattatagttttttgtttttttttgtttttttttgaaaaagagatagtttcaaatatttgaaatttttatatcaattttagttttgtttaaattatatttttttttgtgtcaaaattggacccacgctcggtcatgtgaatcggctatatatacgtatataatatcaaagtaccaagcatttagacaaacaacaggaatgatgccacacgatcttgaaagatatatactccctctgttcctttttgtttgatcttttaggaaaaacacaaatattaagaaaacatattaaatgttgctttaaaatatattgttttttgtgatttataattttcaataactctaaaccaatgatattcaataatttgtattgaagtttacaatttattaattataactaataactattgcattgaaaaccaaaaaatcaatctttttgaaataaatttttttaaaaaaaaaatcaaacaaaaaggaacagagggagtatcaaagaaccgagttcaagaagagacattacgaaatcaatgtgataaagggaattataatttattttctttttagagctttatatcattcctctcttttttctttctaaagttgttattttaatttgagaaacggttaaaagcattattgctacgacactttgcaaatcaggttcaatggcaaacatgtaaagagtatgtgacgtttgtatgcatgtacatagatgatagatgagttgacatatcggttaatatatattaatgtgagacaaaaatagaagtaggtaatgaaaggatcaaagaaaagattcaaagaatcgaaatcactttgtatttgtttggggcattgttatgggtctttgatagcatcacatgaacaaatatggatacccaccagcatatggagtgacttggatctccttgatatggctttgtctctttatgttacctccttctccttgtatttgtctacacaattacaaaagactaaagttaaaaaaactaataaagaactagaaaagacttcctcacacaattattaagaaaacatttcgatatgtatagacgtctgttgaaattaaatttcagttggacccattggtttaagattggattattctttatgatttttttttttccacttgtaaatgtgtcgcatatatagaggttggacagtggacatcacaatggcagcgtaagttggaaaaagttccaaaaccctgcccgctgagcgctggcccaataaccatattcttgggtttttcgcatacttgggcttttaacgtgttcggaatgaaggccaaggtaaggattattctcaactgacttctcccactagcagctcacgtcaattcgtatcatcaaatcatgggcctagcccaatcattcgtttcacacaaagcccaacaattgtataattaagtgatcctccgagccaagctttcgattgtcgtttgttagttttcgaattgacatgttgtgggacgcatggccacattgatattttaagtggaattagttgcagactgaggaagggaacctataccaaaatatctaaatcgctttctaattttataatttttaaacgaaaaaagtgaagatttcctataatacacatccttacaaaattccccacaaaaaaaaaaaactctacgtaccataatcgtataagaagactgtaagctatactcacaaaactataaaaacgtatcaatggtctagaagatattctcatgtcacacacgacacagaagacttaaacaagtcctatcaatctcttaatccgagccgttgactagctaaatcacatctgacgttaccagcgaaaccaacccttgatttagctaaatcaaactccatccacacgttttgctgatgatggtgacctataacaaatgcttctatccccaaaagatcagagttcccaaacgtgaagcaatatacttcttcttttccttccgacccggctccgtttacccggtacaacagtttctgacccgacacactcatctccgcgccacggaacattaaactaaccatgggtaaacccgagaaattgggccgtgtcgttgacccaaccttgtaacaaaggtccattgtcccttggaacacgaaatccgggtcgtctacaagcctgagaaccgatttggtttgcgtaataaactcgttttttaaggcagtgtaaaccggacccattaggaacgtaaattgggtacctgaatccaccatcgtctgacctgctccggtatgatccggtacgaatacagatttcggtaaagaaagtatctttgacccgacccggattccttctaattggaccgtgtaagcaacccggtcgaaataaggtaacggcgtcgattgtagaaccagaggcgtatattggattggaccgagccaggagtaggacgcgtcaccgagaagcaaaaaaccggaggaatctgaaccggatatgcaatacgaaaattttgagaaacccagctggttaacaaaagataaagatccccggttcattcccattaaaccggtcgatttagcatcttcctccgaattggagcttaaacctgagtccatacacccgaataaagtaccgggtcgggtcacagacccgattacgaacgtctcatgagccaagttgccttcgattgatgtagcgtcagcgtaggagatagccacgtggcagagatgggtcttcggatcgcatgaagcgggtatgggtaaatcccgggtacgggtcctgcaaattggtgaggagcaaggcacaggggagtacgtagaggatgaaaccgggttaaaaacggatcctaagtttggagatttcttgcagtgaagccatgagagctcgcttccggtatcaagaaccatcgagatattttgaggtggatcgccgacggcgagagtgacggtgagagtaacattgtgtctgaatgaaagcttgtctgaagaagactgaggaagtttctgtgttttgagagagaagagtagtgtttgatttgtagaagatgttttgcagaacgttagagggaaaataagaagtagaactgagattcgaagaaaattttttgaaagagataatgatgatgatgatgacgaatccatcattagtagtgtagactctttgttacatacatacttgacgtctttaaatattgtctatctttttttctctctatatttcttaattacgaattgcccggtttgttccggtttactttgaattttaggtgacaaaaacttgagttaacgtctaagcaataattctagtagcaagtcaagtcattgaccaaattaaccacttaggaaactataacttatactattcaaaacataattttgtctcgacctaacaaatatcatttcatgaagattattaggggtttggtgttgtcgaattc

SEQ ID NO: 352 - DNA, 92624 bp, Arabidopsis thaliana
aagctttgtttaagatcagttccagtgtgaaggaaaataaaaaaaaaacgaagaacagacaaattgtaaaatattttaatcaagtataaaatagtgaattagattcgtctttcgacttcttgtgacgattttgtttttgtttgttgctcttttgttcgtttgtgttttttgcatattttcctcttcttgttgttcattaatgatattactctgaagatgacgacgatgaatgtggcttttctctagagtctatagaggtgggagagagagaaaaagattccattggaactgttacgattaagctatgtgtggatcttgtgtgcttagtctgacaaagttattagtttttctctctttttagtaataaacaattatgatttatatatttttctaaaatttcatttcttaattagttatgattaatatttgaagttgtagtcaagctcttttgtttatgcttaatgatataaaactatacttgtagaattgttagacttagccatgattagacttgttcaagaaattagaatgtgttaaatatgattacgactttcttttatacttaaactattacgaggcttttttaatatagttttcgattagtgccatttcgttgcttatgaaattggttctttaacgggtaatatttaatgttgattgggactaatattggaggtgatttttttccttctcaagaaaggaagaatattgattggttaatcttggaggtgatttttcttctcatgaaaggaagaatcataacaagatacgtggattatatctagtttaattgtttagttttattagcatctttagttaaatttcattgatctttttagccaaaaaagaagaggagagatttcattgatcttcattatcttgttctcgagtaacttaattatataaaacccaagacaaaccattttagtggccatttaggattcaatatctatatactatcacaattcacacacatgcatttgtgggaaattatatggatttttttttttttttttttttttttcatctggaaagtatatggattaaaactagattatcaacaaacttgaaataatcttatctgatatcatatttcaattctatatagttttatttatattatgggtcaaagttgatttatttggtcaatcttccattcacattaaaaaaaaaattgaatttggaaataaaagaagtataattgttatcgtatttagcagtgaaaaaaggctaaaaacttattcttaaagttttctcaatccaaatttgttttgttttattttattttgttaaattagtaacaggagagaaaactacattaatcaaataattaacacttcacatgcgaaactaacagctggatttcttgtagtttcttaccatgggcatctctgcattgcagagttatcatatgcatctgactcctctatcacttattatatactctatttttatacacttttaacctatatggctaatatagtcgcatctttgtatttattttgcaaacaaacaaaagaaaaaagactgcatttgaagaaattctttagtaccgaggctgtttatttcgtgggtaatcaattgagacattaactacatatgatttaggttccagatcagtacatgatgtatctctgtccattcacaaacgagattaccactttaggaagtgctattggactttactggcatgctgaaatatcaatagatcaatatgattgtcaccgaaaaaaatacaatcaaatgatgtatatattgatatgacaactgatgagtatgtagaaacataagactataggttatttgggaaatgtaaccgaaccaattcttttcacaagagtagttaatcttattataaaatacaattattctacaggattattttcgtagcatttttcaaaaatgttattctatatatgcattagcattctaagtgtggtttatacatgtaaataactgtttttcaaaaagaatattccatttgttcaagatcaagacgaactatgttttaggatttggaaaaagaaaaagcgtatattagccatccccacaaatctaaaggatctttgttttaatgattatgaattgtttgattgttcattagcatgcttaaattggattattatagacatatccggagttccggacaattccgtttgactttctttaacaattcttttgtcacttttgtgggcgtcttgttaattttatattatatcgacaattattgatgatttctaatttattattctacttgattaaaactatgaaatttgctaatgcgtgttttcctccaaaagacaaaacatctctttagtaattgtagtcctaaataacgaagtcggaactaggaagtaggaaatgctactctatgccatattgccatatagaacaaattctgcttcaaaattcaagagtcataattaattagttctataagataaaatcagtatatcgaaaaagaaggccgaaggccaatctcaaaggtctagcaaatggtttaactcgatccaaaggcatgatttgaaataaatacaaaaatgtaatttagggtccatgtttggtcaacaatcacatccgtgacacgcaagcctgaataacattaatagtagagacaaaattatcctaatgatgagaaatacatgcatccataattcggatagtttcaagatatatgggatggaaattcaggtaatgggtccggttttcggattttgagtatagttatccgaatttttactaatttgaatgagatcgatctttattctttagggttgatttttttttttttttttttttgttgggcaacactttagggttaaatttagaattatagttttttgtttttttttgtttttttttgaaaaagagatagtttcaaatatttgaaatttttatatcaattttagttttgtttaaattatatttttttttgtgtcaaaattggacccacgctcggtcatgtgaatcggctatatatacgtatataatatcaaagtaccaagcatttagacaaacaacaggaatgatgccacacgatcttgaaagatatatactccctctgttcctttttgtttgatcttttaggaaaaacacaaatattaagaaaacatattaaatgttgctttaaaatatattgttttttgtgatttataattttcaataactctaaaccaatgatattcaataatttgtattgaagtttacaatttattaattataactaataactattgcattgaaaaccaaaaaatcaatctttttgaaataaatttttttaaaaaaaaaatcaaacaaaaaggaacagagggagtatcaaagaaccgagttcaagaagagacattacgaaatcaatgtgataaagggaattataatttattttctttttagagctttatatcattcctctcttttttctttctaaagttgttattttaatttgagaaacggttaaaagcattattgctacgacactttgcaaatcaggttcaatggcaaacatgtaaagagtatgtgacgtttgtatgcatgtacatagatgatagatgagttgacatatcggttaatatatattaatgtgagacaaaaatagaagtaggtaatgaaaggatcaaagaaaagattcaaagaatcgaaatcactttgtatttgtttggggcattgttatgggtctttgatagcatcacatgaacaaatatggatacccaccagcatatggagtgacttggatctccttgatatggctttgtctctttatgttacctccttctccttgtatttgtctacacaattacaaaagactaaagttaaaaaaactaataaagaactagaaaagacttcctcacacaattattaagaaaacatttcgatatgtatagacgtctgttgaaattaaatttcagttggacccattggtttaagattggattattctttatgatttttttttttccacttgtaaatgtgtcgcatatatagaggttggacagtggacatcacaatggcagcgtaagttggaaaaagttccaaaaccctgcccgctgagcgctggcccaataaccatattcttgggtttttcgcatacttgggcttttaacgtgttcggaatgaaggccaaggtaaggattattctcaactgacttctcccactagcagctcacgtcaattcgtatcatcaaatcatgggcctagcccaatcattcgtttcacacaaagcccaacaattgtataattaagtgatcctccgagccaagctttcgattgtcgtttgttagttttcgaattgacatgttgtgggacgcatggccacattgatattttaagtggaattagttgcagactgaggaagggaacctataccaaaatatctaaatcgctttctaattttataatttttaaacgaaaaaagtgaagatttcctataatacacatccttacaaaattccccacaaaaaaaaaaaactctacgtaccataatcgtataagaagactgtaagctatactcacaaaactataaaaacgtatcaatggtctagaagatattctcatgtcacacacgacacagaagacttaaacaagtcctatcaatctcttaatccgagccgttgactagctaaatcacatctgacgttaccagcgaaaccaacccttgatttagctaaatcaaactccatccacacgttttgctgatgatggtgacctataacaaatgcttctatccccaaaagatcagagttcccaaacgtgaagcaatatacttcttcttttccttccgacccggctccgtttacccggtacaacagtttctgacccgacacactcatctccgcgccacggaacattaaactaaccatgggtaaacccgagaaattgggccgtgtcgttgacccaaccttgtaacaaaggtccattgtcccttggaacacgaaatccgggtcgtctacaagcctgagaaccgatttggtttgcgtaataaactcgttttttaaggcagtgtaaaccggacccattaggaacgtaaattgggtacctgaatccaccatcgtctgacctgctccggtatgatccggtacgaatacagatttcggtaaagaaagtatctttgacccgacccggattccttctaattggaccgtgtaagcaacccggtcgaaataaggtaacggcgtcgattgtagaaccagaggcgtatattggattggaccgagccaggagtaggacgcgtcaccgagaagcaaaaaaccggaggaatctgaaccggatatgcaatacgaaaattttgagaaacccagctggttaacaaaagataaagatccccggttcattcccattaaaccggtcgatttagcatcttcctccgaattggagcttaaacctgagtccatacacccgaataaagtaccgggtcgggtcacagacccgattacgaacgtctcatgagccaagttgccttcgattgatgtagcgtcagcgtaggagatagccacgtggcagagatgggtcttcggatcgcatgaagcgggtatgggtaaatcccgggtacgggtcctgcaaattggtgaggagcaaggcacaggggagtacgtagaggatgaaaccgggttaaaaacggatcctaagtttggagatttcttgcagtgaagccatgagagctcgcttccggtatcaagaaccatcgagatattttgaggtggatcgccgacggcgagagtgacggtgagagtaacattgtgtctgaatgaaagcttgtctgaagaagactgaggaagtttctgtgttttgagagagaagagtagtgtttgatttgtagaagatgttttgcagaacgttagagggaaaataagaagtagaactgagattcgaagaaaattttttgaaagagataatgatgatgatgatgacgaatccatcattagtagtgtagactctttgttacatacatacttgacgtctttaaatattgtctatctttttttctctctatatttcttaattacgaattgcccggtttgttccggtttactttgaattttaggtgacaaaaacttgagttaacgtctaagcaataattctagtagcaagtcaagtcattgaccaaattaaccacttaggaaactataacttatactattcaaaacataattttgtctcgacctaacaaatatcatttcatgaagattattaggggtttggtgttgtcgaattcatttgaatttttttagggtttggagggagccaagtctcgagacaaaacccaaaagacaagtgagtgtgagtggaggagtaggtctttttggccgtgtctttgtggtttctgtttagtctctgtagttcacatcaactttgttttctactttctttgtgttcccactttctccgggatcccttacatttttttagttttctttctgttttaggcagattttactttttaattttctaaatcatatctacattagattaatcgtaagagagatatcgtgtaaaagttctatatattaaatccaaaaaccgacgtcagggataaaaataaggatggttgcagattataatttgattttcttttgatagaatgcatcatgtactatgattgctatatacgcaaaagcgtaacttagtttaacaaaaaacaagcaagttcataatttaaaggattgttctttttgtttttgaatgatttggttaatcttttaagaccaatctagttttacaaagttgttacagtaagtatgattattatagagatttggtgatttgacaaaaagcacctccctaaaatataactcacgaccgacatagtaattttacattttcagcaaatcaattttagttttttccttacaatctgactttatgatttgtggtggtatattgttaccgtgaaaaagtagtttttacataagcattttgttgctgtattgttttgtcacgtttccattctatatgaatctagaaacacatttagaacaaaatgcaagttttcagtttttgatactttatgttctacctcatttgcgtcccgatcatgtactgtcttatcttgtctccgatgttactaatcacctaacctacatgcattcgtattaggtcctcaattataaaatcattttcctttatataattttgaatgtataaaaagtacttccaaaaagttgaagatagtcgtaacctcacagtaacacgtcaaaccgagtcatgcttgccgtgtagtatatttaaggtaaacgaatgttgaattatatattgtaattttgcagagtttgtcaaagttggcgaaaggtggtgatgaaatcgacaaaagatttgtcaaatgtgtgctggatgcaacccattcctaagtcgttctcaattctcaccaactcctccctgttgtgttaccaaataactcctttttctttcaaccaattaagcaccaacaaattatttttggtcttaggacaatgagtctcagccaatataattatagagttacagctacaaggtgacattttagtggtcaaaacttcacttaatcacaattgatttgaagctcttgacaaaaaaactccaaacatgaaggcaatgaatcattaataaaaaactacttaattgagtaaaaatttgtaaattaagttatcaatagtccatcatgttgataaaggggtagtataacactcgtgaaccggaataagatatccctaaatcaaaagcatagtttgtattaacaacctttgtcgaaaattgaaaacggcctcgagcatttaatgttgggactgtttttctcagggtgattggatgtgatcatggaccaagccaatctcgagaatgtttcttatcatctttgtggatgccactgactcactaatatcgtcgcgccacttgcaacccggagtagacaaacgggtatatgattataatgctcctacaattttacactacattttggtgttatcacgttcgtggaaaaaccaacaccaaggaaaacataaaaacaaactgaagaagtaaagtcaattctgaataaatgcgttatttgtatttttcgtatgtatatttctttttggtggcaaggccagaccattgtgtatggggaccccaatctttctgtttgtagtattatggtctaataagattgacgtgaaaaatccaatatttgattatgagtgtgaaagtgattggagctaaataatgaattacgagtctatgtgaactagtttgtcccgtttacatcacttggctcatagcctgctagctgattaaaatttgagtattctttggtggtatgttaataatgatatataagatgtttgtgttgcatatatatggttctgaatttctttgtgatacaaccttgaccataacatgaattatggaaatatgtatgggtgaattggtgaaataatcaaaaagtaaagtaacattggtgaatcaacatgtttattccaaaactggtcaatgccataaagtagtgtttgcctttataacttattatttgaaactttatagatcaaacatcacaatttgcgcatattattcatataaaacagttgaagttatatcatggaatattaaaacagcaaaaagaaacctattcattatataattgcatgaaaaaatagaagaatagtgtaagactctactattgtattttcttgatataatatgggccctgtatatgggtgctaaacagaccataacatagcgctgggcttagagtcacatacactaagaatgttatttcagacacaaggcctctctcagcgagagtgaacaagtgagaaatgtgttcagttcatgattttaggaggctgagtaagggtttaagtggttggtgttttctatctactagccttatgttagcattggtgttgaatgttgattttccacgttggatacgatctgaacttccaacatgcgaggttgatgatactcatgggcacaaaacaaattctctcttttctggtttttttatttaaaaaaaaaaaaaaaagtttggcatttcattaggaaaatctgaattttgtctttaagtaatcgattttcaaatccctaactttaatacttaacttcagaaggctaagcatttgggtttaggtcatttttttcctgctattgttgatattcaacggcccgaaaaatagaaaacaaaatcagtttcaaattcaataatgtgatagagtaagtgtacattcacataggagacataaacgggcataaacaaatctattaatggaaaataatggctaaattacaaagactgtctccaataaacgacagcatcatcagatgcgttgtataaaaactctattattgctttacttcacgtttcctgtggttattgacctcaaacttaattggtctctttataagattcttctatatatagcctctaggtaagtatcattgggttgtgtctgcagttccaagattatagctgtacaagtttggcagcataattctctttaggcgtggaaaataaaccatcaacttaaaaattaatgaaaaacttaggtttgaacactaaagatttagtcatctaagtatgtactcacaggttaatatatattaaaacccatagtattggttagtaacaccacatatgtatactctgaaatgaattgcaggaaatctactccacaaaataacttttcaagtttgttgaaaagtcatgtaatgataatatcgtttggaaatcattcgctattttatggttaagctgcttaacattagtatcacaatccatagactcacgtaacgatttctacaaatagaacaactatgaatctccttcagagtacattcttcaattcatctacactctcacttatctagtcacagactcacagtaacatatcctcctaaatttgccactgaagacactatgtcacctaattttgtatcaatttactcgcatagattcaaattttaggaatgaatataatcattacactgaaatagacaaaaacttaataaggaacataggaaaaatttaaacagaagaagagtgtgttctttcgtgtttagttttcacctgagaagagagcttggtaattctagtaatcacgctagccaatttcgtctccttgacgaagacgacgccgtactgaacatagagaacgacctggttctacgagtaacccgaattctggacccggacccggatgatgcagcagcagcagcagcaatggatccagatgatccactaaaacatccgaaaagcctcatgatccgacccgcaaagccaccacctctctctctactacctccaccatctcttccacctcttctcgaaccccaagctactcttctcggaagtctctcatcaccgagtctaccaccatcaacctccgtgtaaaccaccggcatcattctatctccacctctccaaccaccagggattctccctacagcgaatcctccacctggtaacctccaaatcgttaaccccgcagctgagtcttcctcttcctctgcagtagcggtaacagcagtcaaagcagcaccggttccgtcggtgagatcctccgccggtagctcatgacggcaaaccggacaagagttacgaatcgcaagccaaggaagaatacaatcaggatgatagatgtgattacaaggcatctcgcgagcagatgatttcaaaacgaaattctctttgcaaacagcgcaatgagattgagaatccgataagagatgagtcggatcgatttcaatcagaggcaaagcttcaatggccgatttagaagccggtggatgttcacaagaacgaagattccgattggtgttaagctcgatctgagaaatctgatctaacaaacgatcaaatccagaacctaacaaaaactcagtcatactcggtggtaaaggtctaagaccagaatcagtaccatcatcgtaatacatctgaaaagcagatcgatctaaaccttcggaaacaacatcagaagaaggagcagcagcagatccacggagaacaataactggattaggagatcgattgcttcgtgtacgagtaacgatggtaggagtgggactgttatcggcgtgcatagaagcggatggggtggaggaagaagaagaaggaggagggaagcgagtggggctgcgatgttgagtggtggtggtggtggtgaaggaatcggaaggtgtgaaatcgagaggctcttggatgagttcgaggaaaccaccgtcgcaatcagggcaagagattgaatcggaaacccaaacgaatcggctacaactatagcaccagtaagatccagaagccatgagaatagggatctgaaagagaggaaaatgaaatcaaatcttcaggaagaagaagatgataaaaacatctgggaggatttgggatttgatatgattgacttttaatttgaggataaacggaggagaagaaggaggtgttaacaagaagattacagaattggcttatacccaaccgtccatttcgtgtgctgtcaccaccacctcctcctctttttttttttttcctccttgttggtaattttaattaaacggttttttttttttttttgaaaattgaaactgtttgttaccctgaaataataactacccatcacccccactaattcatatttttgattatttagattagtgattttgattgtaaagtggtaaaaaaaaaaaagagtcttgaccaacaacaaaaaagtcggtaagtaaaagagtaacaaattgcttaacatatttgcaaaactataaataacaatgtgtttttgattaaattacgtattattggataaaataacaataaactaaaatattgtttgcttaaaagattggtcaactagttaaaacttaaaagatttagggtcatttggtttatattctcttaatgaaagtatagaagaaaaaaaaaagaaaagcccattatagtcaatagataaagcccatttatattgtaataatgcaaaagcgtaatgaaaaagcccagtatagcccattaactattgtaatttcgcctcgattaaattgtcccagaatagttagtgagaagaatcccagagtttcttccatctctcgctctttcgattttggagatatttacaggtacgcttgcttttcccttcacaacatcttcttcttcctgctcctctgtttcaaattccgaaaatcaggtatttctcttaatctggaaaatgttctatttgaggaaatgaaattatgccacttctgctagtattttttgtgtgatgaaacagccctggatctcgttgaatcagatactgtcacaattttgtttacatatatatcttcttgagctatattatctgagtttgagtaatagacaatagaatttaaaatccttgttagtcacaattctgattagtatcgttcgttttctctctgaatctgaggccaacattgtctgttttgcttgaagaaccctgttctcttgtagactcattaaccgcttttgttatagctgaatattctatttctaagctgcactacatgattcctaatttcttttgtctacatgttatcttattgattgttgttcatcactatgcttaattgtttcttatgtgcttgaaaaatgcagtaacatgacaatattattgattagcttgttttgtttggtctttgtttaaagataaaaaatgggagcttcgaaactttccgggatgcaaaagcaagtcttgagtctctacagaggatttctaagagcagctcgttcaagaccaatagaagacaggaagagaatagagatgattgtgtcaacagagttccgccacaactctaaggaggtcgaccgtaagaattttcagtacatcgagtatttgcttcggttaggtactaaacagcttgatcaactcaaaagccctgccatagttagcctctcctcgatcaaggtcgttacatctaaaacctgataccttattttatagcttgttgctctagtgaccatagataacaaagctgaggaaattgattcgttttcctctttttacattgagttatgtatgtatgatgatggatgttcaaggtccattataaaataaagagaattgtgatcacaattgaatatatatatacactttcacacaattatgtgcatctgctaatagtctagagattgcaatcattcaatatgagaagcaatgtatcagatttcatctttgtaagagtaccagtcaatggtgtagtgctccgttgccaatggtcttgctttacatgtgaatgcgacacattgtttttttccggattcagttttgtcctatagttctgttctacttagtgctatttggcctcagattttgtatactttatatgtctaagcatttacctagtgtgcaacattggaataagaagtgtagtttatgacaaggcaattttaaattaccaatgtgttgtacatcataaaaaaaaaaaaagggaacaaaagaggacaagatccaatccacaattacacaaaggagaaaaataaaccaaaagagacaataggagtaaaacagcaaattaataagcaggataatattgctcaaaagttgtagacacaggttccatcgtcacttctagccgttggatcaaagttttcagccacaggatcagtacacccttcaggaactggcaggtttacttgctgggctccttttcctgcaagtcaagtaagtttaacttcagaaaacctaattccattttcttctctttctcttttacattttcatacccagtggccaactaaaccaaaaaacaaacgagtttcaaacctctgttttaccgtagaaagttccgcggccgatggcgtcagcgtttgcgtctcccaaagcagcctggctgaggtaggtctcggcaagttggactctcttgacattctcttgttccatcacaagcatgtttccgtattccataagcttctcataagtcatctcgggttgctcgaacacgggaggtccttcccttgagttaaccagcctctttccgatcttctcaactccaaggctctcaacgaacttcctcacttcatcatcgtacactctcgccctcaaagcaccgaagaaatctgtccacaccaaaaacacatatcagattctgcacgaggtcctatatagaacattttcagggtagtaagaatctttcttaccgatagattgaccagggaactgatcaacaagtgtgacaatgtcttcgtccttgatcttgtcagttctgaagatacccttgcagacaccgatacggtcttcacgggtcggggcccagtagaacttctccatacgtccatcacggatgagaggagcgtatagggtggagaaatcgttaccagtgcaaatgatggggacacgtgcgttctcttccttgttgtacattcctgggagctggacgttggttgggttatcagcaatgttcatgagtgttgcgttaaccatctggttgttgacagtgtactgagtagtaccacccatacgacccgcaccagcgtcaagatcgttgatgaagagacaacacatctttcccttcttgatcaagtcagctgcctcacggtacctctgacggataagctttgcgggttctcctgcgtttccactctcaagctctccagcactcatcatgattgggctgcaaaaagattcaaacttttttagattcttgtcgaaagagagctaaacagaaaccgggtcaagatcggagatttgggaaatggactcacttgatacccatcttggccatgacaagctcacactggaaggatttaccttgacctttgcctccccatatacccaaaataagtggaacctatgagacaaaaaaaacaggcatttaaagatcaataaagttgtgtaataagtcaagattgcaccaaaaaatactcaaaagaaaaactttaaattataccttgatgttaggcagagtcaagaagttcttggtgatgtgaacaacaagcttgtccatgaaagcaggagcaatgtaaaacccatccatcatgttgtccaagttgtacctatatttcaagaagtaaagacaatttttaaaaccaaagactccaaaatctttatggaactaatgagagatctagagagatgagaacttactgcctaaggccttggctaacgtattcgtatgagctaaggacagcgtggtgagttccggttcccataggagcttggaagacagagtcaaccatacccttgcctctggtgatgtcttgttgatcatcagaagtgtcgtaggcaagacctctccatctgtctccatcggtttgtttgtcttctttcacagccaacaccttgaatgatccgttgctcttcttgttgctctgtgcgaatctcgacacagttacaactttctttcccaagaaggttgaagctggggctgatacagctcctgatcctgacccgttcaagctcaactgcaacacacacacaaaaacagttcaatcaccaatcatgaattcaagtttggtttatatggttcaagaaccggtttagagactattcctaaggataaaaggcgctcaatcaggaactgaaccgaaccaaaccggggaataaactttaatttggttcacatagctcaaggtatagactagtcctgaagactaaagagtagtagtagtctctacagtttcagttcaattactatacatcgatttaaacacatctactaaatctatagttcacaagtagagaataaaagaagcatcaaagtatctttagatttcctagttaaagtcctgattcttctgttctgtcagagaatctcaaagtgattcaaacgatcaaattcttgagctatatttgtaaaaaccaaagctattcaagtggtggataagcacaaagcgttaagattatgttaaaagtaacattaaaccactaatggagattgaagtgtaccggagctctgttgatggcaccgacggtggaaactgcggcggccatatctcaagactgcgacgagtatgcgtcacaacacaagaagctgaagagaggaattagattggtagaagaagaagcttagagagatgttggtgtgagcaagaaactgagagatttataaagcgagtgatcaacaaccaattcgttatctcttcgtcttcaaggcttaactctctgatcgccacacgatgcggattggccaagttgccacgaggaagatgattaggaggattctattttgattggtccacgtggaatatgtttatgaggttgtcgtcaaatggctaatctgtgccaatggatttgttttttttttcaagtgaagattataacattatttattaccacatatgctttggaaaatcattgtttttttttttttttttgaggattgaggtaagccattcatatgtgatcaagatacttctacactcttcttcatacgataacattccaaaattttggataatgacattgcttatcgataataatgttccaaataaccgatgtaaactgattggtggagagaaattggcttagccaatagaatataattctaattttgttatatacaactctagatacaacaggtatcaagtatgtggttatcaaattaaccatattgtactaaaccgctaaaaactaattaatgcaactttttctttacacaaaatgtaaaaacaagtgatgcaatgcatacgtaagatttgataaatatatagtttagaagatgaagtaaagatagtcgaggctaagatagcatcatgcaaaatatcatatgctaaaatatgaaataagattatagtgtttaaattcatagtgaaaatatgaatatatcagaaattcatatgaatttacttgttttaaaataaaaatgataactatatcatagtttattgttccctcaaagttactataaaaacaactcatctaaaactatatattcacaatcacaagcaatcgttttctacactaagctataaaatgaaacacttcacttgtctgatcattataatttctcatcctcttcattattttcagttttctcaaccattctctcatgtggaacgagccatcatatcatcaatggacaaaaccaaattttaattttaggcttcattcgctgccgacgaagcaatatgtacatgttctacatgcaagacaagagaacaaagattactgatatgatattaaactattattgatccatatataagacatgttgaagaaccaaacgattgataataatgtggtggagctactcgcacaatgctaaatgttaactgtatgtgacaaaattagcaaaagtttgcgtgccaggtttgattcttagtacacatacatgacttttaacatactgaggttagaaaatgaagtacagtaaaacctttataaattaataatgttgggactgcaaaattttattaatttaaaaaggttttaatttatcgataaattaatattttttaattatagagaaattttcctaatttggtaactttttaaaaagttttataagatttttttcattatagaaaatatctttctaaaatcaattacaagtacaaaattatatcatgtctagaaaacaataccaaattttttttgatacagtaacacattagaactaaatttcaaataagaataactacaaatttaagtaaaaaaaaatcaaaaacatttcttacatataatgtatatatatagttgatacatttatgcaattattaatttatgatattgatgagactatatatttacataggactttcaaaaaagttattatcttattaatttatcgatgtgttacactttttacattggtcctaacttgggatctggtgaatttattaatttatagaggttactaatttatcgagtattaatttatggaggtttaactgtaaaaagagttgaggttaccattgcaataaaatatgagacaatgtgtagaggaggataaaagattgaacaaaaagaagaaagccaactagtttttgtcaaaaggataattttccatgtgcatgcaagtatgcaaccacatcaaaatcataaataaacattgtctaaaatgtttctaataaaaatagatgtaaagaaaattcatcagtttaataactagggtttaagagatatttacaaatactaaccattaacatcatatttaatatgactttgtaaaatctatgatcaaataacatgcaatttttttaatatgtaaaataaattatctcaaaatatttgattgaatatataccctttaatttagcattgattttaaaaatccaacaattttctatagtatattttgtaataatgttattggttcctaaaaaagatggtcacatcattcattaaataaaatgaaataaagaagtgtttccttcgtcgcattgaataaaataaagtaaaccttccaaagacttttcattgtcttcgcctgcgagcgctaaaattatctccgagcattctcaagttgggtgattcggtacggattactgatttgggagagaaaaaccctagattggaattagattctgggttcttgggctaaaggtttcttcatctccttcgaatcatccttttgtaagtccagtggatgtgaaaacccagtactcactgattctttttattaggaattttgtaaggttttgggtagagttttcacagttttgatgatactaaaatgtgggccactgggtctagagaatgaagaatcttgcttttagtgacaaaggttgttcctttggagtagtaagtgagcaagatatcagaaaaactgaacctttaatctcaagaatttactttgattggagcttgtgaagtccttgtgttattgttgcatgatgttttctttgagataacttggcaatgtgtgtttggtgttattgtagagggagcaagacgatgagtagaaaccctttcctggatcctactcttcaagaaattcttcaagtgattaaacccacacgagcagatagggatacgaggatcacagtcattgatcagttgcgtgacgtcttacaatccgtagaatgtttaagaggtgatgactcttgatgcacttttgtgcttctcccatttttcttactgtctagtactgccttgaaccataccagccatggatgtgattatgatattggatatgaaagtgagatacttcgagctttcagtaaggtaatatctgctggaattgtagctgcagaatagtagaagtggttcatgttactctttcgcactattctcgttctggaaacaaattatttcatgtgatgcttatagccgctcgttgtctggttctgtgattgttaggtgctactgttcaaccatttggatcctttgtgtcaaatctcttcacacgatggggagacttagatatctctgttgacttattcagcggttcttccatcttgttcactggaaagaagcagaaacaaactttactcggacatttactacgagcactgagagcgagtggtgattcatttagcttctatttttttcttctttttttggttttctctttgcttcactgttgtttaccttatatactacttaagtagtttaagtattatttcatgtgccgatttgtctcacatccattatcattcaaaaaacaggtctatggtacaaactgcaatttgttattcatgcgcgagttcctattctgaaagtagtgagcggccaccagagaatttcttgtgacatttctattgataacctggatgggcttttgaagagcaggttcttgttctggatcagtgaaatagatgggagattccgcgacctggttttgctagtaagttaacatgcaaataaaaccatattgtgtgtttccaaaggtttaattgattctaaacgtatctacctcgtgtattctacatttgtaggtgaaggaatgggcgaaagctcataatatcaacgactcaaagaccgggactttcaactcttactctctcagtttgttagtcatcttccattttcaggtaagatagctgttctgtattcatagattttgctgccttcagccttctgcagttactgcatcattagaaaccatagtaagatgttctatgttgtttgttgcagacttgtgtgcctgcaatcttgccgcctctaagagtgatatatccgaagagtgcggttgatgatctgacaggtacgctcaatgaaaaggttttgaagccaaaccacacaaaatatatgtgtttttggggtaaagggacaaaagttttagcggtatggtgtcttgtaggtgtacggaaaactgcagaggaaagcatagcgcaagttactgctgctaatattgcgagatttaaatcagagagagcaaaatcagtcaatcgaagctcgctctcggagctgttggtctctttttttgcaaaggtgattgatttctcatacattctagctttaatttttttcccttaataatatccactaaagtgctcttgatagaaattagtatcttgattttgctgtgtggctgtatctatcagttttcagacataaacgtgaaggcccaagagttcggtgtttgcccgtttactggaagatgggaaactataagcagcaacactacatggctgccaaagacatactcactctttgttagtctctttctctttctttctcttaacctcttgttgagttatattcatctctatggcaccatgtgagtctcccggctaacatgtgggaatggtgtgtgtttcaggttgaagatccttttgagcagccggtgaacgctgcaaggagtgtgagccgtagaaatttggacagaatagctcaagtatttcagattacatcgcgccgtcttgtctcagagtgtaacagaaactccatcatagggattctgacagggcaacacattcaagagtctttgtacagaacaataagcctcccaagtcaacatcatgcaaacggtatgcacaatgtccgtaatctgcatggtcaggctaggccacagaaccagcaaatgcagcaaaattggtcacagagctacaataccccgaatccaccacattggccaccactaacacaatcccgaccacaacagaattggactcagaacaaccccaggaatcttcaggggcaaccacctgtccaaggccaaacttggcctgtaatcacacaaactcaaacgcagcagaagagcccatataagagtgggaaccgaccattgaaaaatacatctgctggttcaagtcagaatcagggccacattggtaagccatctggtcatatgaatggtgtgaactctgcaagacctgcatatacgaatggtgtgaactccgcaaggcctccatcaaaaattccaagccaaggcggacagatctggagaccgagacatgagcagtagaatgaggtgtgcagacatggttcagagatactccttcacatattttggatgattttgtattctgaccttggggctttttttctatggatccattcgttacaatcaacagatttgcaatagcagaatgttgttactaaaaaatgaggacgaggtaaacttttactcagtaaaacaccacaatcaaatttacagttacattaagagaaaaaagaagaaaacaataagagatatactaccaaacaaaatatattgtgttgactagtgcagtaacttgtgtggtattaagctcgaaggagacgcttctcgcatgttagaatcctgtaacttgcgtgaggaccctcggatgtgtcacgcagagaagtatgccaacccatggcctttgtgatttcttgaatttcatccataacatcaattgaatccctaatgtatgctcttccaccgggtcttaatatccggtccatctctaacaatatggttgacatctcacatctgataatattcagacaagacaaatggttaaactcaactataggcaccacacgatcatagattaaaaatttataaatcactttgaacttgagttacagataatgatgcttacctttttctctcgatcgagaagagtccagaggcatgtaagaagtcatatgtccgtgggtatgtatcaaatggttcacacctgaggtagaatgcatcacttattaaaaaaatatccagagccagagactaaatcttagtttaccttaagacacataaacagatgaacttttgtgtttaaaaaacatgaacagagaaaaggacaagatgaatcactaatttccaaggtttcaactataggattccaaattctgatttcatatgacagattctaaggagaaaacagtaccaatcgtgcatcactcctaacagtccacggtcataaatgacaggcaatgtgttaggcccactgacaggaaccacgcttagaacccagcaatcgagtttatgatcatttagtgcagctgcaaatctgccaaagccaaaggaataaatgaagagagataagctaagatacctgtataatacctaacaaagaaatattatttcatacccgccaaagcctgctctcatgtccaaaacatttcttagtttcatctttttccattttaaggcgcgaacatagcccccaattatttcattccaatattttgattctgccttgaatagctctttcctagcaatgtaggaatcaaattttatcgtctgcagcctatcaggtggagtatgcagacgggcaggccataaggggacgtttcctccgtaccctttctcaggtatgcgactgatgcaaggtttcagatttgtgtacctaaaacaacaataaatcaacatgaggcataaaaaatgtgatattttgcacacattgtcacagacaagttaacagacagactagatgcaatcaaaacaaatcaaattgaaaaaaagttctgatgcaactctgacagcattttaagaacatgtagcctttattcttctgttgttatgcttccacatgcaggtagcaagatatggccttgtatcacaaacaaagaaaaacagaaagattagcagctgtaccaaacattatcgggatcatctgattcatcacaaagaggaggtttagtcccagcctcacgactcaaatagcagtcgttgttgaaaggcttctgccagattgcaacgtatccttccttctttaccaatttccagcagaggctaatagtaagattcagcatttctggaaaacaaaatgtgagattaaaagagtacacatattggctgaatcaaagtagtaataaagaaaaaaaaaaactctccttaaacccacagagacaaactgtagtaaataataaagccacgtacaatgattactaactccaaaaagtttattaagaccaaagaattttatcaaccctgaattacaggcctactcaaagcagattaaaaggatgttacctgtccattgttcttccaaagcgggttcatgcttataaacaggctgtgcagcccaagcaaaatatcctccagcgcgcagcattctattgatctcaaggagcaaaattccatctttatcacaaagaatgaaacagcagagtgagaattttctgtacaagtaataaaagctagagcatagttcacacagggagttaaaaattacagtaggtgcaatcttaatctttttctgatgtattaggtgaagaatcaagcacaccatagaaccttaccatcacgagtccagttgattctacatcttgaacaatgaataagatcaaaagcttggcttggatataacaaacgccttgtcgcaaatgctgccgccatagcaggcacaccacgctcaagagcaaattgaatttggttctcatggacatcttttggtgcaacagacattgtcatgacatcacgagacaatagataagcaccaaaactcgccacaccacaaccaacatccatagcaaccctaatatgcttgccaaacgtaatatcagaaaccatctgcagacacaaactccagagctcaacatcagatgaaaagatacataaacagttgacgcgaaaaacaagaactactacttggaaaaatgagccaccttagacatctggtccaagtactgatcagccccatgaataaactgtgtaccacctccaggaaacttgaacttgttcttgtctcgtgaaatccagttctgacctcctttgtcttcaacaagccgagtatgaggaacattgctaaaccatacctatccataagtaaattccaaatactacttaaactaaatcccaagacatgttatccaaccaaaatgcaaaactcatgcaaacaaaggagtacctcgtcacggcttttaggccatggaatcggctgacggtaacctttaggaggtggaactaagcaattcaagcctttacctttctcaggacaatgacgctcgaatctctcacctcgctctgtcgatttaagcttctttatcacatcagtattatccaaacaaggtatatactctctcatactctcaggacacatcccaaatttcttaattctaaccctagccttagaatcaccgtcgcttttcgcctcaacgatctcagtctgattcccccaatcttccactgtatcactctcaacctcacccacctcaaaatcgtcagacatcacaccgttcgcatcaactatcccaaagctcttaaccggaccaggcggaggaggaggtgaaggagaaggaggtggaggaggaggaggattagcttccaccttaaccttctccgtgtccgccaccaccgacggaggttgttgtcgtattgtggcggggatttcaatctgggtatggttagtaggaattatcgctgataaattaaagactctgttactattcggtgaaacggagacctccgggatcgagctaccggaagtggaagaggagaagaagacgagctgttggtagccatcgtcggaccaatgcttgcctaagtagaagaaagcgacggtgacgaaaactaaggcggagatcttgatcagagttggggatttgaacagatcgccattagtgagaggcttcattagcttgcgtgtgaaggatcagcgatctctggatctgcgtagtgttgttgtgtgagagaggatgattagtgtaattttacagttgttgcttttggatttttctggcgttcggtaaaattatcactacagaagaatttgcagaatttagttaaaagatcagaaagttgcagagagttttatataaaaagggtcttttcaatagcatgtcttgttaaaatctaattcagcaaaaaaaaaaaaaaaaaaaaaaatagtacatgatagtttgttaaacgttatcggcaaatgatgaaaagattttactaaaaactggttttttttaatcatgtgattgaatataatcatatttataaaatatttatgttaaatgttcttatgataaagtgcgatgagattctaatagtaataaatatttgttttactattaaaattatatcacacagtgcggttcagtcttcatgcaaatgaatataatggttgaagcgaacaaatccgtatacggattaaaacgtttttcatttacctaaaaaatcattgtaaactaacaatggattgtttttacatacaaatataattgatttgtagcggtttgttgtccatcttgtagatgaaacggactaatcgcaaacggatttgtccacctcgactgcgataaccattcaaacaagattgaaaagaaagagagacaaaggtttaaatgaaattaagaatgtacaataatgttggcttatggtcgttggacactactttcgagcccattacatttaatatcctttaaaataaaaaataaagaaggcgaaaacagtttcccccaaattctcataattttcacaaacaacctctcgtcttctaggttaatccaatttcgtcgattcatgaagttcacaattctcccatcggaaaattcttcgtaatcgacgacgaagagatcatgagtaccgtcggaggtatagagcagttgatacctgattccgtttcaacgtcgttcatcgaaacggtgaacggttcgcaccagttcacgattcaaggttactctctagccaaaggcatgagccctgggaagtttatacagagcgatatcttctccgttggtggatacgattgggcgatttacttctatcctgatgggaagaacccggaggaccagtcctcgtatatctctttgttcatcgctttagcgagtgattctaatgatattagggctttgtttgagcttacgcttatggatcagagtgggaaagggaaacataaggtgcatagtcactttgatcgggcgcttgaaggtggtccttatacacttaagtataaaggaagcatgtggtaattgcttcgtttccatttcattttgctgttgtagtatgatataatcgcatttgttaggttactgtggcttgttgcatttaggttttagtaatgttgtttatcttctgcttgaattgcatgttgatagtttattttgcagaaatgtttgtggtggaatgagctgctagtgcttctctgtcagaagcaattaaggaactttatcaatgtgtttgtgcttttgtttgcttacggctaaaattgtgtaaagcacaagtttttttaattgtatggttcatattgttctttctctttctttaaagtatggcttttgaatcccttgagaggtttaaggtgtgtgcatgttgcttttgaagtttcgtgaatctttttttgaactcttgcatcatctgttgatttcatatattgactcatttccttgaaagtgaggtttccttctggaagttggtgttttctctatcatgacttatcatcacaaatttcaggggttacaaacgctttttcaaacgatcagctttagaaacctctgactacttaaaggatgattgtcttgtcatcaattgtactgttggcgttgttagagcccgactcgagggtccaaaacagtatggcattgtgctacccctgtcgaatatgggtcagggattgaaagacttgttagattctgaagttggttgtgacatagctttccaagtcggagatgaaacatacaaagctcacaaactgattctcgcggcacgctccccagtttttagagctcagttttttggaccaattgggaataacaatgtggatagaatagtgatagacgacatcgaaccttctatcttcaaggtaatttttgttcaatattacatcgtgaatagttggcagtacatgcaactacagttttgctgactcgggatgttttaattttacaggctatgcttagcttcatttacaccgatgtacttcctaatgtgcatgaaattaccgggtcaacttctgccagttcgtttacaaacatgatacaacatctcttggcagctgctgacctctatgaccttgcaaggttaaagatattatgtgaagttttgctatgcgaaaaacttgatgttgataatgtggcaacaacacttgcgttggctgaacagcaccaattcttacagctcaaagcgttctgcttagaatttgttgcatctccagcaaacttgggaggtacgggttgcatatagtttcaggttttttcagtctgcacttttagatgcctatatagactcacactcgtgtatttttcttttgaatacatgttttcgtgctttaattgcaacattgttatcatatgatgagatagtagaatgtataggtcctgcattgaattggtgttactatcaatgtggtaaaacttagtttaaaggtactgccatggaatccttttcatcaacctacaacttgagctatactttgacactagaaacaatggcaatagtaacagagagaacaactttacgaaactatatatttttaaagattaaaaccttgtatgaaggatcatctgccttatttgtatgatccggtttatataatgcatttgggacttggtgcttggtgcttagtgtaatagtaatccattaaagatgtcgggtgtattattaatggaagttttgtgagctaattttttttttttttttttttttttttttgtgtatgttacctatagcttatctggctagtgtactatttaactttcttgttcttatgttcgatttgtatataggagactcgatgcttgattagacggcttgaggtttatcatcctcaactaggtgcgataattagttgttttgattatttttatcgacaatctagttttaaagttaacaatgactagccaatgggtaaaatatattttgcattctggaagatagagattcaataccacatgtcctggtcttaatgttaaattccacgtaaatgctgttatcacatctaaaggtagtgcaatcatttgcagaacttaaaactaaacatttctttctttctctaaaactgaaactggtgaatatggatatgttgttttccaacatggtggacttttcttttgtgtgtaatagagtgttattagttggatgatattatggatgaaaagaatccaggaaaagtaaaaagtaagtgatgttgttttgtgcagctgtaatgaagtccgaagggttcaagcacttgaaacagagctgtcccactttgttatctgagttgctgaacactgttgcagcagcagataagagctcgacgagtggacaatcaaacaagaaaagaagtgcgagcagtgtattagggtgtgacactacaaatgtgaggcaattgaggaggagaacacgaaaagaagtgcgagcagtgtcttaggatcattacataccgtatgcaaaattctagaattatgcattgtgtttcaagcagagtttatgaattccaagtcatcccgtgaacttttttaccagtgagaattatagaggcctgaactctgaaccaaactgtttgtgtcaatcattttacatttctggacaaaagaaagtacaatctccacaaagagctgtgagaattgactcaaaacaaatcctaaaactctgtaccagattgttcaatttctcattaaatcccacaatatgattttcacgtcgctatatattgaaagcatgtttgactatgttacgttagctatcattttataaatgacgtgatgattacgaatttacgatatacgtactgcttaaagaagaagaatgtaagaagaaaaatctattggcgcaaaacgtcggtgagtcaaagctgaaatcaaggtgctgcctaactacgatgttgctttggtatctttccataactttctctttttgtgacttttttttttttttttttttcatttctaaattccttcatttaacttttctaaagtattgtagtattactttaaaatcaaccaaaatttatacagtattgttactatgatgtgtgtatgcatatggggtcaccgcgtttgatggtggcgtgtatttgtcaaaatggactatgcttttaattaaacgttagatctggggttctctattcttcttttttagtcataaatcataatatatacgttatgatataatattgtagcctctatgtttcgatttttgttcctcgatgtatcaatcttgaaaagaatcttagtttcattctaggtaatctcaaggtgtgaaaatcctatgtacataaatatgtaaagaattctcaaccattattcttaaaccaaaaatctctatcaaaaccggtccaacaccagaacatcttgatgatctagacaaatcagtttcttaaaaaaattattgatatgcaccactttactaagaaggagaataacaaaaaaaacaaaatgaaggtaccttgtcggtgtcacgtggggaagaacatgtgaaaacaaacgaacaataattggaagaaaaaaaaatgtgaatcttgtgatggatcaaattaggtatattctttgtagctctttagtgttcgttcactcacagcctcaggccctcagctttggtcttatccaaacgactggcccgcataacagagacattacacaatacgaatgcgtttctatattactgctccatactcaaatcgaatcctggagacagattcttattttttttgttatattcaattgtttagattactaaaagccaaaatcataaaaactttaaacgatttgattattatatcaccaaaatattggcttttaatccatgttaatactgattaacttgaaatatacttatatttttggttattggggaggaaggaatacaaataatctttttcgacactgaatagtttcctttgaatgaaagctgataaaatagtgtataagttcatttttttataacgtaattttttttttggtaatgtgaacaccctaaaaagatctccttctgatgtagaaatattatacccatacacatcgataagttagtttgtggaaagaaaaactaactaacaaaataacaccttcaattcgacaaaagagcataagtttaataaaatacctacagaaatttttgacgatgataccactaccattcgccaaaaccacaataattcaattcttctaaatgtagattctattaatatggtcgattgtcattattccaaataatttatttttttaaatgaaaaattcataactctaaatatacaaaagcaattgctgatttggattcaaattttcaaagagaacttgtagttatgcatatacataaaaaggtaagtcagtttttttttttggctaataaaaacggtaaaatcatgttattgataaaaaatttgaaaacagtaaaagaaatatgaccatatttgaaaatttacctaaaaactataatgatgtaatagtttgatttacttacatttaactaatttttaaggtctgttgatcgaactcgttaccttgaacaattagtaggacaactcaaaccactaaaccattatactttaaggatttatgtaaaatttcaaatatatatagtttagtagatgcacttatcatcacactcaccaattggatgtcaacacctggttctagctttttaattaccaaagtgaaaaaactgactttttctaaaaaaaattcgttctagatggatgctcttcaaattcgttctaaaaaaaactgacataataccatccctttaaaaacacagaattttttttatcatctctgaaacaaatcatttacagtagtaaatgtcaacacaacattaattctgtttgttgttggcatttacaattgcaaaatcattttctcatttattattcgtatttattttgtcaagaacccttgtctctaaaatattcatagaaaaagaaaagagccattaattaatggcttgaagaaagattggtgtataagcgtctacgtgacctttaattaatttacttcccccaaaaaagtcaacattcaacatgtgaataaaaatcaatattggtttctaagtaagtaagtaccatattattaaattatttattttggtaaatacgcactcaatttttctctcaacggtgtatataaacaaaaggagtctcctttggaaaaaacttgcctatcattttgccaacgaacgttctttcttcttaatcacagctcagcctgacgcaaccgctcaggctgatctcttccaatttacagccatttcccagctcagatctctgatccggtgagatctctctcaaggtaatgcccctgcaattttgcttacttctctggttgtgatatgcatgttcttcgaattttcatcgtttgtgatttgaattctcattttgtatttgctgttgttggtttttaattcgattttccggaacagattatgggatttgtattcgaatcttcgatttgatgacataatgtcccagccttttatgtttaatcttgaaatgatggacttttatccgatctgggtttaaagctggaattttgattgtgggtactattaggtttcattgatttattgcttggtccaacatttttagcagctggtattgagctcttgttgtctgaattttggaaagaactatttttgttgtatcgttttgatttatttggatctgaattcattcacctttttctctgattattgttttgtgtcggttgcatccactttgattagatctgaatgaatcatttttttatgtgctcaagttattgtatggattgttctgtttctagcatgttttggttagacattgttaagatctgacgtttgcattttcaggaaaaggagttagagcatcatcaagatgaaggcactcattcttgttggaggcttcggcactcgcttgagaccattgactctcagtttcccaaagccccttgttgattttgctaataaacccatgatccttcatcaggtaatctatcttaaatttgccgctttagtctgccagttcttacctatgcctatgtttgaaccgaggcatgttttcttgtagatagaggctcttaaggcagttggagttgatgaagtggttttggccatcaattatcagccagaggtaagatactaatctctcttaacttttttttttgcagctattttctgtttacatatgtttgtatttaccatttgctctgtttcgacaggtgatgctgaacttcttgaaggactttgagaccaagctggaaatcaaaatcacttgctcacaagagaccgagccactaggtaccgctggtcctctggctctagcgagagacaaattgcttgatggatctggagagcccttctttgttcttaacagtgatgtgattagtgagtaccctcttaaagaaatgcttgagtttcacaaatctcacggtggggaagcctccataatggtaacaaaggtgagattatcgaaacataatactctccagttacgagataagtacgttattcatctaatgtggacttgcatgtattggttatataggtggatgaaccgtcgaaatatggagtggttgttatggaagaaagcactggaagagtggagaagtttgtggaaaagccaaaactgtatgtaggtaacaagatcaacgctgggatttatcttctgaacccatctgttcttgataagattgagctaagaccgacttcaatcgaaaaagagactttccctaagattgcagcagcgcaagggctctatgctatggtgctaccagggttttggatggacattgggcaaccccgtgactacataacgggtttgagactctacttagactcccttaggaagaaatctcctgccaaattaaccagtgggccacacatagttgggaatgttcttgttgacgaaaccgctacaattggggaaggatgtttgattggaccagacgttgccattggtccaggctgcattgttgagtcaggagtcagactctcccgatgcacggtcatgcgtggagtccgcatcaagaagcatgcgtgtatctcgagcagtatcatcgggtggcactcaacggttggtcaatgggccaggatcgagaacatgacgatcctcggtgaggatgttcatgtgagcgatgagatctatagcaatggaggagttgttttgccacacaaggagatcaaatcaaacatcttgaagccagagatagtgatgtgaaaatgagatattatatgtgcaacttttttttttttttttgtgtcctttcttcaactttgaaatcgctttcgtaattcttaatggcttttgaataagcatcaatcaaaacgctgtatatcttgttagggtcgtttgctgttttgtctctttttttgttttgtaatttataaaaaaatttattctcattttatgtgagatacttttgaatattcattaattataaagctttttttttgtgaagtaacattcaaaattcaatagtagtcattgtaaaaaaacttgaaaatagcatgtataatgcagataaaattttttaacatgaccattgataatccaaaaaggttttaaaaattagaagcaacaaatatccattggggtttctccaaatccaaggcatagaggaatattcgttagcgtggaaagactaaaatacccttaacttccctccacataatgtatacagtgacccgatctgaattcggagctaaaaacggtttcaatcgaattaaagtcaatggcgtcacgtttatgtcttctccttctcgttgcgtgtatcgccggagcatttgccggagacgtcatcgaactcaatcgatctcagagggagttcgattatttcgctctatctcttcaatggcctggaacctattgccgtggaactcgccattgttgctccaaaaacgcttgctgcagagggtaaatatttatcttcttttatctcgatctccaatctcatattggaattgttatcgtctatcatgtatcgggtagttaaggatctgaattcattagatgtgggaacaaaacagagagattgtttgagaatttctatttatatagattggagaaatctcgattaagctcagataaggatttggatttgaacttacgttgtttatattttacttctccagctccgatgctccaactcaattcacaattcgtaagtaaactctttcaatctttagtttcagtttcaggaatcaatgtttctgtgtgtatatatgtctttgagttttaaactatgcaacctaaaatctctttaaatctaatcatgtagatgggttatggcctgactataacgatggttcgtggccttcatgttgttatcgatctgactttaaagagaaggaggtaaaacattcataattggtcctcgttagacttttcttaagtttaagtagattgatagatggtaatacaagtcatgtttttatatcataagagaagattctgagaggaggaaaatttgcagatttcaacgttgatggatggtcttgagaagtactggcctagtctcagttgtggttctccatcatcatgcaatggtgggaaagggtcattttggggccacgaggtgattatcttttcacatctgttattaacttttcatagataggtgtttccatctcctatgacattgtctttcagtcttcaccaaaactaactctgtttcatttgttggttgtcatgtatatctttgcaatacacgctggcagtggggtaattatattcaatctttacttctttaatttgatttttctttcgatttccttccacataatttgtatagaacttgattcattggtgttgttatagagttccatgcttaatctcacaaccttttgcataacagtgagttagttagcagaatacattcgggtttggttatatgctaattcgataacataggttctctctctaacgattttgctgataattttttattttcagagaaacatgggacttgttcttctcctgtttttcatgatgagtataattacttccttaccacacttaatctctacttgaagcataatgtcacggtaagtcttcatcgagttatgcttttatgttatgatataatgcatagtggactggttaaataagaaagttgggcatacggaagatttacatgtgttaactatttgcttgcattcttctgcaatgtagtttttctatgcgatgtaaatgatcatgtatcttagatttcctctgctctgtcagtttatcagtttgtgaagacactttcttacattttttctctcttggataagttcttaatgcctctgcatctgtaaatgtggtaggatgtcctttatcaagctggctatgttgcttccaacagtgaaaagtatcctctaggaggtatcgtaacagccattcagaatgcatttcatatcacccctgaagtggtttgcaaaagagatgcaatcgatgaaatacgtatatgcttctataaagattttaaggtttgttttcgagattcattcttagattgttgatttccttttaaagtctgaaattgctctcgcatgataagaaaactcaaataacatgtctccaagcattatgaaattatcagacaaagtcttaatgctgtgtgtagaaattgcttggtttggcaagatttgctaatcattaacattattactgtttttcctggtttaaagctaaaacatcttgctagactttgagaatggcaccagtttctgacagttttgttaattcatgactacagcccagggactgtgttggttcacaagatttgacatctagaaagtcatgccccaagtacgtaagtttgccggaatacacgccattaggtaagtaaaaatcatatcttgaaggaggcataattgcaagagtattagataagtaatggatatatgataaaaatgataagaagtaatgtgatgacatctatatttgtgggttatgcagatggtgaagctatggttctgaagatgccaacagaaagagaagctctttgaatcggaaaagatgggagctttgttatcttctgagagacaatacatacatgtctctgatgttgtaactttactaccaaaacctataaagattggcttatttcgttctattggatatgtatcatcattactggtaaatcaagtttctttctaataatgtagaagatcagaaaatccataagaagatatcaacatttgagttctatggtaaattgaattatatcaacttagttgcaatgattcattcttgactgatgcattgatggcttatcaaaccagtttacaaaattcgattagatatttatgcttaattgcttacgtataattaacgaatatatctgaccaacaagaaatatatacagatatatacaacgaatagatgctatagaaagataaactcatatcaaatcaactacaactgatcgtaaatcttaacaataatcccccaaattgttttataaaaaagaaaaagaaaataaaactcaagtcactgtccaaagaaaaagtgatgacaaagataacttttatgttactacaatcgtatgaattagttccaaagacaattcaagagttcctttatccacgatacaacgatcactgttcaaatcaacgagacgagctgcaccagagaactttccatcctttggcaatcgaatcttagcccgacctatggcaacttctccatctgatgttgcaggatctctagaagaatgttttctaaacaattctaggtaaagatattttgcaggagaatctaagggaatcgccaattctgtattatacttccaatagttgcctttggaaacccatacctgtgttgtgtatggttctacagggtctgtccatgcaataactttatagtagtttggatgttgcaaaagattttggtcatcggttgtgcatgcacgtaatatcttcacgattagctttgtttctatgtgatgatcaatctttctcttcccttcgcgaatcagtctccttttttgtctccctaagtttgtcattgagactctggctgttaggtcttgtgaattttaaatatatatatatatatatatatatatatatatatttctaggggaaactaaaaaaaaagagtatccttttatttcggaaaatattttataaattgcgtttgagatgaacaggctaaacctaacgaagtttcatcataatccaaacaatttaaataagtaatactaaaaagattctgagaagcttaagagtaaacacaatatacatcgtatcaggaaaaatatatatagttagaggcatatatatcgaacttatttcttttagaaaaaaattaagtcactagctatggcttttgcttggtgcgtacgcaggtcagcatctaagttggcttccgcatgtggtcaagcccggtctatctccgccgttgtgaaccgtccgtctcttgctctcaacccgtctccgctgagtcctttcgtctctcgtggctttctttacacgatggctgttgataagctgagctctgagcaaacccttcaccttgtgattgactccgagctcaattctgctttgcaaaccgatgatcccaatttggtaaaactttcacatctttgctcaaaatttcattcctaacaaaacataaattagtatcgtttagctttactttgcgaataagtttctgataatattcttacgagacttttttttttttttgttctgacattctattggggtttgtttgggggcagaatgaagagatggctccaggaagcttccctttgaaaattagagacaagcctggagatcagagtgtaacattgacagcatattacaatgacgaacgtattcatgttgatgtaggaatgccttatcttggtgatgatgtcattgatgtgtttggtcctaataatgatgaactaagttttccactagttgtgactgttatcaagaagaacggagtcagcatagagtttacctgccaggcttatgctgattatattgacttaacagatttaactgtgcatgattatcagtatcaaatgggagaaactgactggcctcgtttcaagtaagctctttgaattcaataattaatattttttagagatgggcatgagcatagacgtttattggtgtgtgtttccatcgcattttgtagaaacttggacgataatctgaagaaggcgttccacaggtatctggcgaccagacttgacgcaaacataacgaaactcttgcataagtacatggtgagcaaaataaagagagagtacttgctatggttgaagaatgttaacaagtttgtggatggatgaaaggtaataagtttggatattgttaaaaaaagtctcttcttgtgttagttgatagcattcaaatgtgtttttagcaatttgcataatcttttgagaacatttgaatgtgtttaaatgactttcaagttctgatgtgagtttgatattcacttatgcttcccaattaataccaatccaaacttaaatccaaagatatagataaaaaaagaaaagaaaatgataaggagtagaggatcatctaatactatatatcagaaaggtgtaggtataaaatgttcttcatgaatcgtatttttggtgtgtgtaaatttctctttgtccacataagaaaaagaaagagggattgaagaagaagagaatgctagtttcttccactctgtttatcaaacagtgcataataatctatataagtgttaggaaaaaaaatgggtgtgtttgcaaaatagtcactttttcaaacttaattaggaaaatagtcactttactattcataatttgcaaaatagtcacttttcactgtttgattcgtacacttggattgtacatcacttttagtgtacaaatataaaatgtacgctgtgtatttttatatatatttgtacactaaaagtgatgtacaatccaagtgtacaaatcaaacagtgaaaaagtgactattttgcaaattatgaatagtaaagtgactacttttccaattaagtttaaaaaagtgactaaatagcaacttaagccaaaaaaaatctatgttcaagcacaatgttttgagaatttagggtaatgactttcaagttgagatacgagtttggaattcacttttaacaatatgttcttcatgttcttacttataatttaccttactcaataataataaacatatttatttatttttgtcatttattcacttcaataaaaatttatttatattggcacctgatctgattaattaagtaaatcaattaagaaaaaaaaaactaaaaaaattaataaaaatattttgaattttacagattttttgtaatgcaatttgttagatgataaatttccccctaatatttttggcttgatttagaatgttatttggttcgttgatttgaattaaccatcgaaccgaaccgggctgatacggagcctcaacttcaatcgctgttaaaaccttaaaacccttgaaactccattttcttccttcactcacagaagaagagagaatcaatcaaatcaaatcaccatggctttagcttggtgcgttgtacgcaggtcagcatctaagtttgcttccgtttatggtggccgagtccgatctatctccgccgttgcgaaccgcgcctctctagctcgcaacccatcttcaattcgtccattcgtctctcgcgccttaaattactcgacggctattgatcgaattagctccgagcaaacgcttatccgagttattgactccgaaatcaactctgctttgcaatccgataatatcgattcggtaaagttttcgccttttttgctcaagagcatagtttctaaaggtcttcaatttatgcaatttatacttagaagatatttgtctctttttttttatcactgggattgtttggttgatgccattctattggggtttggttgggagcaggatgaagagatgactccaggaagctttccttttagaattgaagacaaacctggaaatcagaatgttacattgactagagactacaatggggaacatattaaagttgttgtaagcatgcctagtcttgtttcagatgaaaatgatgatgatgatgatgatgatgaaggtcctagtaatgaatcgagtattccactagttgtgactgttactaagaagagtggactcactctagagtttagctgtatggcttttcctgatgagattgctatagatgctttatctgtgaaacatcctggggactctttggaggatcaactggctaatgaagggcctgattttgagtaagcctttgtgaataataattgcaagtgtaaggttgtatagagataggcatgatgaacagagaggttataatgttggtttgtgtttcatcgctttttgcagagacttggacgagaatctgaagaagacgttctacaagtttttggagatcagaggagtgaaagctagcacgacgaatttcctgcacgagtacatgacgaggaaagtgaaccgagagtactttttatggttgaagaatgttaaggagttcatggaacagtgaaacgttaggttgatagctaagtacctaagaatgagattgtgaggttcttttcttgtgttcattgttagctttcaaatgtagcacaatctttgagaatttatggttaagagtttccagttctgattcaacttgtgatttccaatgcaaatcgaaatatatttatagataagcgaaatgaaaagtagtagtatcttgataaagatcagaaatgtgtaggtagcttacaatgacaagaagagaagctaattaaatgttcttcatcgtacttatgagcaagactaagtggtaaagtggatcttatttttggtgcaatcctaaccctaaatcaaaaccactacataagcgagggtttcaataataagtagtagtaataataataatgataggatatgagtactaagcagagaggaaacaaaaaagcccatcctcctctgtgtctctcctcaagtctcaaccaaatacacaaacacacactcggaagtcttgtttaagcttggatgggaatgtcctgatgggtgtaaacaattccattgtctccgtcgacaacttgtccttttcctctcattatcctgcaaccatttcaccatgaaaattaaaagaagcataggaaaaaaggcttattgtgggtctttattgacataacaatggtgctttgagtaactaaaattgtaccatctcgttgtaagtaatccttcgaccccgactggaccacgagcatggatcctgcccgtgcttacccccacctatataccacaaccaatacttttttatcactcactcttcctctttttatttgtttttaatctatagacttatgtgtatgtctctgacttacctctgcaccaagtccaaatcggaaaccatctgagaatcttgtgctggcgttgtggaacacagcagcgctgttcaaggtcgcaacatcttacagtcagtttccaagaaaaatcaaagacagataataagcaagttaaagattcagtactttacctatccacttggcgaaggaatagctctgcaacttcgtgatcctctgtcacaatgcagtctgtgtgtgcactgctcgtaacaacatacaagacaagataacgagtgaacatttccactacatatgcaaagaatttctaaagtcaatgcctgttatgtcgagtttctacctcccatgtcggtgaatgtgatctatagcaccataaacgtcttctacaacttcaacagtgcaagccttggcacagtactcatggttgaatgaccgtgcttctggtatgttcagtatcttacttgcccttggtccaccatacaaagtgactcctgtagtttaatatatctcatgagttatgccactctagaaatgttttcatgagatgaccattcaatatttataatcaaacaggctacatgtatatctatgagacatccagatggaaggtaacaagaggtcaaataaatggttaagatagaccaacaaatgattgggccatttatgacgtaccattgctctgcagagcaaaaataagctcattaagcacagcattctgctctagatccttatgcacaagaagggtttcctgaaagagacgagagaagatgaaatgagtcagttgaactttagaatctcccactgtattaattaaatctcgatggaaggtaaaaagttctcttaccatcgcattacaggctgctggatagtccaactttgcatcagaaactatgcgctttgccatatccgtatcacaagccttgtcgacatatacatgacagattccatctgcaagtacacaattaagccatcgtcacactctagcacaatccaagtaaagaatcttctggaaaaaacaaacttgcaaccataccagcatgacctagcacagggatttttgtagtattttttatctgagtaacaagcttgttgcttcctcttgggatcacaagatcgataacgtcatcaagctgtaacacaaatgcaaatggtgggttccagtttaacaaaagatacaaaagaactgttgcagctcctagcttgtaaatctgttcttaccttaagcaaatcaggaatctcttctcttgaagtcacaagtccaatgagtttacccccaacagtctctggaattgcatcagtgatcacctagaaatttaccatgaacttaaaagagctgtagtgataaattttgaggcaaataatgatatgaaatctgaggcaatggtaccttgtgtaagatagcatttgatcgccgggcctcctttccacccttcagcagaagaccatttccactacggatggcaagtgaagctatctgtttggtttgtggataaagcacagctttaggaaattcacatattaagaagggaaatgaattttgactattaacatacctgtacaagtgcatcaggtcgggattcaaaaacaatcagaagtacgcctaatggtgatgaggtcttctctaagacaagaccatctgccacctgtaaaaggaattgccacaaagaacaaatagcataaacaactattgtatgtcaactaggaggatagtcatatcccttatttaactcaagagtatgtaaattaactatatggtaacaattgtcctctgatcacctctgttttctttaaaacacggccgattggatcttccatatcagctagcttacgaactgaagctgcaaggctcgagatctatcaagcacaaaataagaaacataataaggagaggttacattggcacaatatgtttgcccaagccatagcaacaaaaagcaactatctatggccatgaatactttcttacctttccaggtgtcataactaagcgagccaccattgactcttccaacccagcctcttgtgcagaagctacatctaactcattctcagctttgattgtagtaacatttgcttcaagggcatcggcaatatcaagcagaatttttttcctgtcttccgaagataaggcctatagcaaaatgtaaaaaaaagttaagtaactctatgccgagcaagaatggtttttgacgttacgaacatgaaagaaagccatgcataagtcacaattacctgaagctttctggaactttccctcgcagcaactgccatgtcacgagcattagaatctgtgatcggagcccataaacgagcatcttgatgaaacaaggttccaacacgtagtcctctgaggactttatctatgttctcagctgaatacccacttcagaagcaagaaagatatcaatataccatctaaccaaatttgaacaagcatatcaccctatcattatgcatggtgagcttagaaggttcctcacctggttatgatgacaggaatcccagcataagctgcattgactgcagctttgacttttgcagtcataccccctctccctaatcttgatttgtcgccgaatgtaatctcatcttgatgtttttctttaacaaaagtgtggatcaactttgagttaggatcacttggagggcctgtgtaaagaccttcaacatcgctcagaagaatcagaagatcagctttcagttccaacgccagtagagcagctaagctatcgttatcccagaaaataccagaagaatcctgcatatatcaagatccagtgaagctgaacattagactacgagattcaaagaatccctcacatctcagagtgtgtagaaaagttcatgtcaaaagggacaaacctgatatggggctcttcgggtgctaatagcatcattctcattgaaaattggaataaccctcaaatcaagcatagacttgacagtttcattaagttgcttcctgaaatccttgtctctaaaactactgtcattcaccagaagttgagctgccgtcacatcaagctaaccaaagaaaaacaacagcatcaatatttggatgtcttacacaataatctagaattcgataacaaaggaaaaatcacctggtcaaacatagtctcatagtaagccataagactgctttgtccaacaccagcacaagccttcccatcaagttcagtctgaggcttctgaagatccgcaaagctgcaaaagccattaacaaaaaaaaagaaaaaaaacaaatccatcagcaaaaaaaaacaaaacttttaaatcataacacacataaacacatgtcactgttattgagcaataaaaacataagccaaaatggtccatccatcatcacccttttttttttgtttccaaatgttgttataagggaaagggattaataatgaagtgtagccattaagctttaacctgctattgactaattgtcgataacgaagcctttgcctgccaagaccaaccgcaccagatgacaccaatatcacctcaaatccatccgagtttaattccgcaagctgacattatatatatatatttttttacaaattaaagttgccactacgcatgaataatttcacatgtctttcgtgaaaaaaaatgaaacctttacacttttttataaacacaatacaaaaaggagattattaaaatttgacaattacctgttcacacagtgctcctaaacgaccaagagccaatcttccaccttttccagtaacaactgctgtcccaacctttttttttttacataatataaacaaaaatccaaaattttaatcaccaaacagaaaaaaaatccctcgaatattctgattattcattcgtctctaatgacatgcaaattaagattcatacgagaagttttagtttctgggattagaaaatatattcagattcacgaattcaataaacaaagagtttagatgcacttaaattacataatattcatttccacattatcacaaattaagaatctaatcatcaacaacaaaatctgaaaatgcgaacgtatctcaacgaaccttaacgacgatacgtttgacgtctctggcaaaagcacgtgaacgatctagctcctccattatcgtcgtcgtcgtctaccaaaaccacacacagagagaggaacgagttaactgagtcggactcagtgaagcaccgtcgtatttaaggtaagaaaataaatatcaggtgagggaaaggtggagatcaccaaggaagatatgaaggggtttataaacaccagcgacaccagagactcaggctctgttatcaaaccaggaaacgccacgtgtggaactaagggtaggtttggtattttagatactaacaaatgaagtggcgcgtgttcgttgggtggtgtatggtaatgagattagggtgtgatgtagaggattgtggcgctataggtgatgggtattttgggaaataaataaaatcggcggctgaggaaacgccgtggaagtgaacggagatgagaagagaggacaaagtgaaaagtggacagcaaggcaatttttagatgacgtcgtctctcacgatttctattttatgcggcgccacaacaattttttcattttaatcattgttattattttattatatgattgtgtgacatatttgagtgcaatgattattagtgtataatgttatctgatgaaataattaggggtttgaatggttatggcggttggggcggacaaaaccgtcaacggatcagaccgttttttatttatcattcatcaattatagtccgcagtggtctggacttaaaaaaatagaagaaaatcgttgcggaccatctgcggaccgtttttacatacaaataaacttggtccgcagcggtttattgtccaccccaaaaatgagatggactaaaccgcagacaaattagaccgctttgtccgctgccttcattcatagcctagatgtgtatcatacaaagcgtttctttctctctctctctcaaacctaattagaaaacaaattttagatttgtgttaagaaacaaatcttacttgttatcaaatttcacaaattcagatagattataaaacttccaaatccacatatttcaacatgaaatgattttccctcaggttacagatagtttattaatgatgcttagatatttccttctttcttcgaacccttgtgaattttttcagacttacagtatttagatatttttcaattacgggagaggtgatttattttggtaagaatatatataaatgtgtgattagccaatccaatttctaaaggctaatatgataatgtttgtgccaacctcgagattctccagataaaaaaaagataaataatggccaatccagtttcgaacatcatccatctcattggctctgtaaatgagccagatatcattaatgtcagattcagaattttaaataaaaactttgatactaaattgtagggtttataaatcataactgggcaaaatcaataatacattacaattgtaactcaaaagtaaaaaaatacatcaaatgtgttgcaaatcaaatctcttacattgtctagccatgccacgctcaacgctgctaatatcattgaaaacttccaaaaactatgaggggcttccacaatcgttggatcttccggaaaacttcttgaaaacttccacaagctactggtagcttcttgaaattggataccgcttcatgatgctacatttcgctttttgaagctgttgagagcttcttcaaatgataacgaatcaaactattaattccaagatgttgggtatataagatcatatatagaaatagtacattttaatgcatgagaatattaaaaaccgtatcatatggtttagattttagacaacgctcttgattcttggtcattagaacctctcccaaaaacaaaaacaaaaacaaaaacaaagctaattgcaaaaaacttgaaggcaatgaatggtgcatgcgttttgttcaaagccaagccattattccaagttccaacacctatcttaccgacttcagtttctttttcagttttcatcaatctctaatttttactctttttatctccttcatggagaaaatgaaacaaataaagtaatcaatgtaattctcaggtttaagccaaaacaaacacacaaaattagttaatggaagaagggcacgcggcttgatgcgattagggtctcagatgtctgattgtctctggggaatcaatggtcctctgtgcatgtgctctatttttttaagcctttaggcccacccactccaatcttgttgaaataatatgcacttatttgtttttgtctgtgtgatattattcttgttattttaactaaagatcacattcgtaaccaacgacatatcatagtcagggatagttatttagactcaagtatgcatagacacgcagcagctgcacatgcgtatatatacataattatatttgaaaagaaagatgcgattttgattggtacgtaaaaaaaagggtacataaaacgataatggagaagtaagtgagaaatacattttatgttggagaatcttgattcgtaaatgctactagtatttgttagaatatgtgggttatagatataatgagtgtgaaaaagagagagagaaaaaactactttttcgattttttgcgtagtttttttgtttacgtggagaaataggttttaaaatggtcgaaaatggaatttatatttcttagcattttgggtaaatgataagaagtgatgtgtatgtctaaacgactttttctttctcgcatgaaattgatccacgtgtgtttattatttgtttattatagcatgaactagattaaaatggagtccgatgaaatgatggcgtcgatacgaaagaagcacaaagattagtatagtggatcggacctttattttttcccgactcataccaaacattgataatatatgtaatacatacataatatatatatagagccaatgcgtcatagttgaacatgacattatagatagtgaacgcatacgcctcgaatttttatggattatgttttaaagagtttttaatatagaccacaattgtattgtaacaaaataaaaaaaaaaaaattggaacttatctccagtcctgcttatctcaaaatgcttgaaggtcaatatgtcgtgtatatgtgtgatgctaataaataaagttcacactttttataatatccaaaaaaaatccttcagcgttttgtttatagatggttaataacgatcctgcttaaattataatacataatttttgttgagtttatcacagtcatgattaaatggacatgtgaacatctcctctaagttggtcatgactcatgagtgaattccaagttttagtaatgaatattcattagcatcattttttcgaaaacatctaaaaggataatttagaaggaatgttatcatgacatatctatcaattcttgacaagaataaatggctacaatctttttttgggtacaatccaatatatcaatttgacctctaccgatttaagtcacgagacaaagaaaaaaacttgcaaaactaggacacgtatgtagttgggcacatgtaagaaattaggacatgtagcttagatggataggttctaaacttcgacactcaatggagtaagagacgatcctgctactgcacgaaaccttacatttagctttgtgacaaaatacgatcgaatactttttttcttttccagaatgagtttaattacatgaaatatcttgttaaaaatgagctaatgctaggacgtaggagtagtcaaaaagatataacgattatatgtgatacatgatactaacttagaaaaaaaaacatttatcaaaagaaaagaaaagaaaaaatcaaactcaaggaaaatagggtggcatgtgtcctaaatttccacagcgtaaatgaattttcatataaatattcttcaaataacaagcaactgctgatcagttttgtcttacttcatctctcatagcgaaacaagagccaaacaaatttttattgttcatgaagaaaggcttacaactttacaagtttgacataatataatactcccagaaaatgggtccaaacacttgtcaattattcataatttcatgtactcgtccaagttctgttacatcactcccagattttagccaatgaataagatagcgcttcaaaccaacggtttttccgcacaagtagtcgcatttatatatggatataccaaataaaacatatattccacgaaactaaaagataataaagtaaccgtcgaaactcacaagacacaagccaatgaaaatcaattttgtggacacgagattcctaacaaaaaataataattgtttataaatcaaaatacaaaacctattcaatcaaaacattttattatacaagcaaattaatattgtacgtaagaaacatttgatttccaactattcaattttgagcaaagaggttaatctaagaatagatttccgaatatatatcaaagtattgaaatcatttacgattaaccaaacatggcgccatgaaacccgattgacagaaaatattgatcttaaatgatgacgtttttatgtttgtgtttgtgtaactgtgtttgccctattagcaaaaaaagtttagactttgtgtatgaactaaagtattattaacacccaaaacgttttgcttttagaattgctaaactctgacagttaccgttatacatttaatcaattcaaatgataactaaatgaaacaacacaattatgaataaataaaagaaaaaaatatgaattaaaaactatataaaggcactaataatacatttttaaaaagttgtatagagttaaaaacaaatgtgtttatgagcatcgactggccaaaatacgaacacgttttggttttgcagcgctgatatagataagatttttcactcgaccaacaaaaatgaagaagaaaagaataagataaggtggagctgagtatattatataaatgtattaacgacaaaaaaataaataaatatataaatgtattataaacatgctgcacttggaaagttgtaattggtgcagcttcattaatcaatagattttttgcatccaatgtaaagccgtcacgagtcacgagcgtccaaaaaagtttagtgcaatcacgttcaaaggactatttcccaaaaataagtaatttatcggaaaaatagtctaaaatttgattgcgcaaaagtcaatagaatatgaatgaatacttgaatcgttataatggaagtgtagaagttctaggggttatactttcttaagggttgcaataagtatcgttgtcgtccgtatgttaagcaaactaaagctgtgcgagccaaaagaaaagtttgtgtctgagagatcatgcaagaaaaaaaaagctatacccctttcttttgattattttcctacggtcacaatattttttgtggacaaatttggatattttataaatatcttaaaaatattatcgtccacgaaagaaaaatgttcaataaaacaatttgacggaaaaacattgaacactaaaagtattatagaatccaatttattttcttacgtttattatatgaatgttaaatatatatataagtgaattcataaggtatctaagtctacggaaatacttaagttttaacggcgtatttagagtaaatgaatttggccgacatttattttttgggtttaaccacataaatcactggtactagtttttattcaattactctcgtatttgaggtatatatgtggtgataagacgcagatagaggaaaaaaaaagctgaaggaatcactatcatgtgtagactggaatatataattagtaaaaataaatcatttgtttgtaagactgatagagacagtgattgccactggggaagatcggtttgttcatagaattgatattgttttttttacatattttatatgttacattttttgattagtatttttagttgtgggaggggtgagctggagaacttaaagtaattattgaagaatttagtttgagatgcaaaaaccaacaagtaactaaaaggaaaaacaaaaaaaaattataaagtttaaataggttaaagaagttttattagtgttattgatttaatataagggaaatggacggttaattaagacgaataagtagagtcataatccaataacatgataaaggttcatttcttgaagagttactgctgttttaccattttaaaacgtggattacaaataatctaagttagtgttaggtactaatgttaaattttctagtatacatgagtttgttttcttttgtcaggatcttaacaaattaattataaaaaaaaacaataaagttaaaagaggtggatatacgaatataccatgattttcaattatatacggtatttatccgtttaggtcaaaaaggcttaaaccatagcttcgaatctttgagttatataaatattcacatcataatctaattttcaatgcaactcaaaaacttgaacgtcaatataaggatctcataacagagagaaactgtaaaattcatggttacaacttgcaacaaaaatttctttcttgataagatttcgttagagcatattgtatgtgtgcttagaacacaacaatatttgagtttagatagaaaaaaaaaaaaccaaaatgtgatttttatctattccaataggccagtgaagtaggcccataactactgcgcagcccattattctacctaacatgtttcattaactaaaagtctgaggattcttgttgtaagtgctggtgatgtttcttaagaacaaatcaattataacttattagcgagtaagattgacctgtaaatcgagtctgttcataaatgataaatctcgcagatactttatccatttttttattcaaaggagaaataaagataattcacaggttatctaatgtgacattttggcttttttctttcatacttcacatgctctgtactcaaaaaaggtttatacttttatagtccattctgtgatatcttctgccacattcaaaagactacaaaatgtaccaaaagatacagaatcataactcaacactctcctccactcttcacaaaagagagtaaattgcaataaatcttgaaaacttcctttttttcttttatatatttttactccataagcaaaataagtggtagcaaacaaaaccaaaaaatgaaaaaacacaatcgttacaagcaacgatgaaaatccgccagtaaaaacgaaaccgaatgatttagcggatatgttccttcttctactttgtgggtttcattttctggtaacgacattcttagttctaccgcagcacatcaaaatctaaaggtttttacatatatatgttttgtctggtgttgaccgtctcatggagattaaggaaagaaccagaccttgatgaagattgaaagaaccatttgcagaccaaatgctgcagccattacaaccgtgatatcattgttcgtctcgaggtaagaccgtagattcagggcaacaaaacacgatgatgcactaccagctaagagtataatcacccatctcagaaactctactggaataagcaatggaagctgcaaaatagaacatcctgagtgttattatgcttaaacagtatgaagtataaagttgtgatatcaagttaggttgatttatgtcattgtacatggtcattgaaagtgaagttaccaaaccattgtgtatcaagtatatgcatttgtctttagtgttactgatcatcaattgattaattttaacagcaaaagagaccgaagttactgaagatacttacagaggttggaacgaaaatgaagagagagtatccccaaaggcaccagaatcttagaagatcagctttggaccccatataacggagtgcaaaataaaatcccagaggcacaattattgcatatccatatattatagatgctgccaaattcatatagttcacatcaaagatccaaggagcattactgtcggttcgtttcttcacgagatatgtagcacaatttccgagagaagcaagcacaaacacaagcgtagtgcagatccagacaagtccatacctaacagaagcacacacgagtcattaatcaagaataatttgtgaaaggcctagcttttagccaatctttagaggataacatattatgatgctttctgttcatttgtccaagagaaaatgaggatattttaatcaatcgcctgaagtaacataggagtaaatgaatagcaagatcatgctttcggaaaggtgcagaagataacacttagaacggtaacaaattaacggcatgactgagcaatggaccgattaaagaaattcgaaagaactctctcatggtaagtacaatcaccaagaagagtgaaggagaaaaaggcattaaaagacttacaaatcagggtttgcatcaatcttgttgaaaaaatctccactagtaggatataaagagctcattaatctgttcaaaacaacgtccgtgtccacgtcgaagtattgggtatatgagtagacattaaaaaagcccttccagttgtttgatggctgttgtgctggtccttctactggagcagataagatatatcaccatataagacagaacaaggtgaaaacaaaggtatataggatcttgacatccataagaaaaacgaggttgactcacacaagtattctttcaaccattgtactgattcatggtgactacagataaaaatatctcctaaaaaaggaatctaaaaggagcatatatacctgttgggctctcaagagtttgataaccctttgtattgtttcctagattcggtggaaatatttgcatgcttgcagaagggcctgcaataatgcagaagacatacaacactcaatgtctttcactaccggaaaagttctttgcaaaagataattcaagcagaaactagcaaaagaacacaccttcattgacgcttgctattggtacatttgtgcttctcttgtcgtcgctgatcacagcctaagaatacagatgtttgtatcagacataataacacggggatagtcaatccattcactcaaaacatttatcttagcggattcaatccaaaatgaagctatcatgcaagcatttaaactcaaatacagttttgtttttcatacgaattgtctcctaaaatggtgaaaaaacttaaataaaacgccttaacaaatatagaaacccagaaatgcaaataaggaaatcgtccattgttctatgagtgtgaagactttaggcatcatcgtggacgcgaaaaaatatgacaaaaaaatctgaaaagtttcaaaattctacttcctaatgtaacacttgagacagaacaacaaacaaaatgatggcatgaacaaaaaacgttaattttcccttcacacaaacaaggatcatagaaaaactcaatcaaagagcttattgatggtgaaatgaaagaagcaatagatgtaatatagacttaccggaactgaaccaagcaaatggcttgattgtagattagcgaacgactcatccatcgatcaaagagaaaaagatatcaaagaaaaacttagaagataggttcttctaatctcattcaaaaatcgataagatcggaaaaaaggtcgtccctttttctgaatttttaaggtttctgggtttgcttctcctcctccgtcgtcgtggaagcaattgggaaaggaagagaaactaaagaaagaacgatccacgcgctttcttagcaagtcggtaaaacacgcgctgttcactttcggacacgtgatttgccgacttgggcccagacaatcacaagattcacacaagacttcaaaaacaaaggcccatatttaaattttgacccgaatcgtgatttgccgacttgggcccagacaatcacaagattcacacaagacttcaaaaagaaaggcccatatttaaaatttgacccgaattaaacaatccgacttgacccgtttgaggagaaattcactcaacagtgtttcctctcttcgtcttccctcccgagaaagctcaacggagccctagactggttttatcactctcgccaacaccaaccacgctttttctctctttacctccatttttgtattcgtcaccggagtagatggatacgagagaaatcaacggttttgcctccgccgcgagatcgatatctcttcctacgcagcctaattacagtagcaagcctgttcaggttcttccgctttatacctttttatttctccactgaattagtttagctcaggtcttaggatttctaggttcagcttaaaaaaatgggttttgcagagcttagagttaatttcgaatttattgtttgtaacttacaggaggcgttgaaacatttggcatctataaacctcagagaattatgtaatgaggcaaaagttgagcgatgtcgtgcaacaagagacttagctagctgtggaagatttgtgaactatgtgttgaatccatgtggtcatgcctccttgtgcacagagtgttgtcagaggtgtgatgtttgtcctatctgtagaagtacgctaccaaaatttggagatagacttaggcttcgtctctattatgagtgtgttgaagctggtttgatttcccgaacacatgaagaggcgtcacaggattcggatgaggatgaacatcaattggcagctgatgttcatcgcctttattctctgtttgatgttgctatgaacaataatttgatctcggtggtttgccattgtatccttcagttgcatttatgcttggtgtctgatatatgcatttagtcttttagtttcctgtttgatactttcatgaatttcttttagattcgtatgcttgtgctattaggaactgtgtttatatggggagttttgtactgataggttcatgtatttttaggtagttcttgtttcatgcttgtctctgttgggcgaaatgtgcatagtgtttttgtcattcattctctaagaggtattttatgttggatgcatagttgacatctccttgacagaaaattaatagatatcaccaatgtctgtatggatgagacagctgtatctagtgatccggtcattgctttcttgctggatgaagttgttgtcaaggattgggtcaagcgtacattccggagcaccttagctgaacttcaagaaatctgtatccttttagctgttaatatttttatgtttcttaagactgtatatttgtgcaccgtaaggtctgtctatctttaatattggccctcagataatcttgaaacaaaagagatgcaagcgtggttagataaactcctaaggtgttccaaacaggtggctggcatatgtagtgtgctcgaagttatggaatcagcttttaagggttctgtgtcacctcagcttcaagatgtgcagacgctgagagagaacattggtaaaacaaagcaggtcagccatgatttcatttcattgatatccaaacagttttgcaaaagtatgcttaaataactctctttatcccccttagaaatatccgttgtacattgaagtttcctacgtgcattaatgtttagtttgcctctgtcatagaatgagttacttgttttgtatacggcttgcagtaaagtttgtactgtaaaagctttgcatttagatgtatgaaaggcacgataatggtcttccatcatcagcttggatctgattttctatccctagctttgtgactttattcttcttttcttttttaatgtcattgcatattagtgaatgtagatggggtatatgtaacctatctttatatgacatactgaatagtaaatgagtataaccttatggcttctgaccagagagtgttttaaatagatcagctctttagctattggtgcaagatcactgagcttacgtgtgcttaccctattctttttattttatttcagcatttggacataatggtctggtgcatcagacatggatttctggatgatgtgaggtctcgatattcgaatttcacatcgtggaatgcactggtaggggaaagaaaatcaaatgcagttaagcgtgcatggcctgatgctgtagaccagtcttcagattgcagtgtacagagtgcttccctctttattgaggatgctttagaaaatcttgagagagagccagaatacagtcaggaaataggtgccgacctagaagttggacgtttacagaaggataagagatcatttcttaggtccaaaatagagggaacttcaggatcttatccatttgagaatcttagaactgctgctgacatgctctttttacatggcggttcagatttggttgttgcgaagcaagcaattgtatccttttgtcatcgcctagtttcacattacattgcactttacttttaatgaatacttgaatcaggaaacattcccatgtttttcctttacgctggtttccttaaccagaagatagtttctttactacctgtttgatcggcattggactacccctgaaaaatattggaagcacactatagatgattttgctgctacgtttggcataacgaggcattcattgctggagtcttttgtattttatcttctcgatgatcactcagaggaggcactccaggtatcttttggcattcccaaggaaaacttatagaaacgtgtattttattgtgccatacatttattaattggtgtagcttacaaactttccaaattatatttcaggaagcttgtaggattctacctgaaatatgcggtccagaaacctaccccaaagttgcgcaagtcctgttagaaagggataaccctgaaacagctcttatggtcttgcgttggtctggtcgtgatggtgtatcagaattggtttcaattggtgaagctgtcacagctcttcgtgtgagagtggaatgtggtcttttgagtgaagcattcacataccaaaggacactctgcttgaaagtaaaggaaaataatttgaaaaatggagctgtgaaacatgcgtctgatgatctagacatctggagttggacggaatggatggagatacttgtcaatgaattctgctgtctttctattcggagaaacttggttgatcgaatcattgagttaccgtggaacccagatgaggagaaatatctgcacagatgcttattagattcggcaactgatgacccctcatcagctgtgggtagtctcttggttgtcttttatcttcaggtaagtaattatattttcaaactttaaataacttcacttgaacaatgggctgagaattgtttttcagaacgagaatagctttagcaacaggcaaatagatatttagacagcagcttaaacctcccgagctttaagctacatattgaaaattttaataagggatctcaatgatggctctgtatagaattagctcattctatagagactggtatatgttctcgtatttgatgtgtggcttcaacaatcttttataattcgagcttggtgtagtctgggatgttggttaacaagcatgaaattatttgaacaaccagggaaactgcatcactatagaccatgcttattttctggaaagttattatcttttgtatatggtctttctttgactagaaattactggttgttcacattgctgcagcgctaccgttacatccaggcataccaagtcgatcttaggcttcagaaaatcgaagaggctttcgtatccgacaatcaaattggggaagaagttatgttcagaatgcgatcacagagtcattggagaaaagagttagttgtaagtatttcagccaactttccatgtacaagtggatccttccatagttccttgttaaaggctacatcctcacatttgcgttttagtgcttaataacctgttgatgcttgcaggattgtctagtattctgaaacttgaatgtacaatattacttgatactggctttttttaactggacatttaaacctcccgtgtctctgctcctttgaaacaggatagagccatagatatacttccagtaattcagcagcagcaagttagatctggacaattttctgagatggaagatgcctctgaaggagcaaaaaaatctgatcttcctgatgcacctgacatgattacttcttcagttccctttgccactactaattccgtttttctccaaagtgctaacaatgccagagctagagagccagtggctaataatggcagtccttttcaacctggtcatatgataggaaacgcgtcccatgatctttcacatggaaggttatttacaaacgcaaatagaggacaaaagagtgaagttagaagcgtaaccaagaatctgaaattcggtgaaatgtcaactccgttcaaagatctaaatagagctcgtgggaacagccagctccaagggaaaaggactgaagaatcctctccagaagtaaatgttgatagatacatagagaataatatgagctctccttatctccgccgaatcacagctaacaatcccgtgacagtgaaatctagcagcaaccatctcaatggatcttcacagaaaccggaatccaccttttttggcacaaggatgcaaccagacaaagataactttgttgatttggatgatccaatggacatgtcttcgaggtattcctctcttctttatctcttagccatttgttcctttctgaatcgtgccattaaagtagaggacactggtattgtttggtataaaactattgttaccgtttggtttgaaaataaagtccagtttggtttcagtctaaggaactttgtttggttcttatgtccacggcttttagtcttatattggatgagctacatatcaattgtgtgtattatgaattgcagcttaaaggacaacaacaacaatgtcttggccacggagagcagaaataacagtggtggattgagatggcggtcagatgaaacaagcgatgacgaagatgaactgactagttttggttccatgccggtgaagggaaggaggagacgtagattcgcagcaagatgaaatgaaacaaacactcgaaaagaccatcatcaattatgtttaaagcatagagaaagagagagagaggtagagcaagttgtgtaaagaggggagagagactgttacagtgagcgttgttctcctgttattttttgtgctgaattttgtgtatttcttctctagtctaccttttttggacagttattttaaagatatcattgtgatgagcggagtgatattattattatgagtatgtttaatttcttatattggtgcagctgattgttgaatcgtagaagttataacaacacattgagattaaatcattttctttttacattcacaatttcctctcaaaattttaatttttaacttttttattatttaccaaaactaataaatggaaataagtagcataagcttgttccaagtttctgatatataaatagggttttcggaagagagaatagggtctcttcctatcgttccgtcactttttgttccgatttgtcgacaaggtaaaccttaaaactaaatctttcaatatagcataaccaatgatccgaaaacctaaatctttcattctctgtttctgccttggatctgtattgaaattcataatctcatattaggttttcgtgttacttaattccgcaggtgtttgttggatccatatcatggcgactcgtgagtttcccttaagctttagctttttatacgatgctttcttttcaagttgcttacaggattgttctttttttttctgttcttgtttttggcaggtcttcaatatgataacaataattgcgaaattggtgtcttttccaaactcacaaatgcttattgtctcgtttccgcaacatctgcctccgcaaacttcttcacgtatatatacatacatacactcttgagtcttcacattgtctaattaagttttcacgtacaagtttggtttttctatgacttgtaattttaattaatttatttgtagtggttatgagtcgaagttaaaaggtgttatcccaattgttactacttccataggaggatcagggactattggtagtctatgtgtcggaaacaaaaacggacttcttctgtctcacaccattacagaccaaggtgatttggtttccactattccaagttcatatagttattgtaataatctttttattaattagggactattttataatgtgaacagagcttcaacatttgagagatagtttgcctgatgaagttgtagtccaacgaattgaagaacctatatgtgcacttggaaacgctatagcttgcaatgactatgtcgcgcttgtgcatccaaagctcgagaaagacaccgaagagataataagtgatgttcttggtgttgaagtttatcgccaaaccattgcgaataacgaacttgtgggaagttattgttctttatccaataatggtggaatggttagtagacaactatataaaaaacacccattcttttggttcgtctttgttttgtggcatttgtctcactagaaaatcacctgactagctaatatgatgtacaggttcactcaaataccaacgtggaagaaatggtcgagctagcgaatcttgttcaggtgcctttggttgcaggaaccgtgaaccgtggcagccaagttatatccgcgggtttgactgtgaacgattggaccgctttctgtgggtcagatactactgcagtagagctctctgttgttaacaatatcttcaaactagtccaatctcagcctgatttcgtcggtagtgaaatgaggaagtctttgatcgatacctatgtctaacgctttcttgttttctttttttactgtttatgccaaaatgtgttcaaggagctgctctttatgacttggttttaagtagtaatttcttcttgttccagtttaagattttggaaacatattgattatcattcatcagcaatttctttggtctttctttggaaataaagcctttttttttgttattagtattcagtcattgttcttataaaatctccaagcaacaaatatccccattcaaaatccaaggggagataaagtctgtcttgagattctatttaaagttaacacaaacgctgtgtgatccatcaaatccaaatcaagaacatatagcaagatgacacataacattaaatctgatcacaaaggaaaagttccagttaagcggatatgatcgagtgttcgacgaagaccgtacttacaagccgctgcatttgctgccctgaaacctcctccataagctggagacgcatcatgagctatctgatgtttaaagaactctccaagtttcttctccacgtttgattttcctcctttcttgttcgagaaggatgatgatgatgatgtggccaccgatgatgttgaaggcaagtttcttgttgaaggatctgagagaacttcagattcaagccacatgtaagagaggacttggcagattccttcctctacctcagggttaaggttcctaaaccctaatagaaacaagaaatcaaaagaatttaagatgctgatagttatagttaacaaaacagatgtagcatataacacaaaatcatattaatgttaactaacaaaaaaaaaaaacgaacaaccgtaaacctagttttcccctcctcctacttttcgtgtaagacaagaaagtgattgaaaattactttatactaaggtgaccacttaggttttgatattaaataatgactcttaacagattgattaatacatgtgtgacctccaaataaatcttacagtatgtaccattaagccttagccatccatgcatgagctcatgggcgagaattgctccggtcagtaatcttcatccacaaaagtgattaggttagtagtcatttactgtcgaaaagggaatttgagaattgagtgagtagtgtagtaccgcgggagcccgtaaagaactagaatcgctgtgacttcacatttgcgtgtaagcctttgaggctgagttctcataccaacaagacggtgagcaccaagtctcggtcttctaagaacctgtgaagaaccaaaaaataaaaaacagagcaaaataaaattactgtttagaatcaaaatttcaagtaactttccaggaagagacatacacttgtaactgtttgttcttcagacaagcataaacctcttgtctcaggcatgtgatggtatccctgtgaaacatacagatatatctaggattaactcttattgtattctgagagaaactataacaaaaatggttatgtataagctaaaagatattacgtttttctctcctacgatagcatcattgagagcttctctttgaacaagaagcataggaatctgttgatcaagtttcatgtacattccttcgtaatagtctcttatagcgtggtaaagcggttgacattctccagtatcggttatcgcggtttccatacattctaaacacaaacttctcccatcctctaacgtgtaatatctcacatcccatgactacatgatcacaacatagaaagaaaaaaacacaattaatttgctaaaaaagaatagatatggacttatcatcaatagttaaattatttgtatttgattacctccaaacgttcgcagctacaacaacgagcagttttatcatattcgtgagacgggcaatacttttggttccaaaacggatggcatcgatactcgatcaagccagcatcattagttggtatctgaggagagaatatggaattggaactaatataaaaatatatgatgtttaaaaaaaatttcaaggtgattgtaacgttgcttacaaaatggtgacaaacttcgcatttgggatgagtaagctctttgaaacaaagcttatgatagggtttggttcctgacagagagaacttgaatcaagagagaagacaaaacacacaaccttagtcacttcagaaggacattaacacaaattaagagtatattgattattatatatatatatatgtgtgcatatatgtatacctcatgctcagtgatagcataaccacaagaatggcaacggaagcattcaggatgaaagaatgtgcccatgcatcctagatagttccccgatccaatatcgctattgcaaccgccacatattctgctaaaaatcacgtaaaccacgttaccaatgtgcacttggaaatggctgcaaaataaattatattctctacgatagttgatcatgaaatcaagtttcaagaaatgaaaatattaagtttgtttccataatttgcaatgtcacgattaaaagttcgaaccaaggtttatttggaaattcgtgacgtaggtatttttgaaataatgctacaataaacagcttatttttattttacttttgataggaatattttttttttgtttcactatgagaatgtgttttgttgtacctttgtcttcgtctatattgataggaaggctcataaggtggaatgaaagatgatggattcaagccaccgtgaaaaggccttggaaaatctcggttgttatccatagaccaaccataccctgcacgatttatttcataattaaaattcattctctaatgcaatagaaataacgtttttaaccaacttcaattttttttgctaacaaatactttaattcatgaaagtagatagaaataccatgtgggcgcttcgtgttgtcagctagagaaagtgaaattgaacggtcgagttcttctttgtcccgtgcacctcttgaccgatcatcctgtgattcgtttattcgttgacatgaccattaaaaaaatattgaaatggcatcaagaaaatagttgatgaaacaaattagcatatttcagataaaaataattttccaccaccatgcataagggtatcaaaacaggttgacaaaaaaaaaaaggtatcaaaataggccacctcagtttatctatttcattcatggattaaaattatattcctaaccacaatgagctaggtagttcattttaacttttaaaagttgaaatattttgattatacagaattaagaaataaatcttaataaacaatcaaattaaagcatataataatatagtaattatgtaactttggaatctaatcgaataatacatgaaaatgaatcgaaaatatctcaacttcggccactaataaatactccttattgaaccaaccttataaaccattttctacctatttttgttatccctaatagtgctcaaggccacattgtcacatcatctcaatttgagcatcaaaacccaacgagactcatgacaacaataaaatacaaaatggaccgactcattcaaagatgtgacaattttacagaatgtacatgacccatgttatttgtttcaaacaactcgagcaaaaaaaaaaaaagtaaaacagtagtgtatgttcacatgtcttctgtatattgcttttaatatgaaaaatcacatgtctatagtatttgtgtgtagattaaaatagaaatattttttcaaagaaaagatgtttcaaattaaacgagtataattaagaaaataattaccaaagaagaaggaggtagaggaaagaccatattctcgtcttcttgaaactgaggaggatgatgattagtgtgagcaccactaccaccaccattcgagccactcttgaaaagtttactcacccatttcatcaacttccatttcttatctctatacgttgacgaagatgacgacccaacttcccctgtaatcatcaaaacgttaggtttacgcttttaatatttagtctcaagaatagaatttggtaagaaaagaaaacacaccgaagatgcaaggattggagatatggctgacacgagcaacaccgtaggaagaagaaggagaagaagaagaggaagaggaagaagaatccatgaggatggaaaaatggcccccacgtgattaaatatacttgaaaacgtgtgagtaaagcgaaaacgacggccggagagagaagcaaagaagagaagaggaggaggaagaagaaggaagaggggagaagaagaagaagttataagtcattacaatttgttattagagaatgaaaacataaatgaaaagagaagaaagaaagagagaatctttgcagaagagatcgggcaaaaaaaaattaaaagagaaaaagaaaaggaagagatgcttagcttctgaaaggaaaggaacagagagaaagagatgtttttttaagagaatatttttgtctttttggtttttgctgaggcggaagaatccttcaagcaacggtgtggggaggaggaagatagttgaaaccttttaagcttctctctttttacactttattttttttttttttgttggggagaaaaaccaaaaagttagatttgtaaacgaaagcaaaaaaaaattcttctttttgggttttgatggagacgctcgttccatcggctctaactatttgcctttaaactttggttttgttaaattttccttgtttttgtttttatggtctcataccctcaccgagtttttaatgaatctatagctacattgaagatatgtcattttattttttaactaaaactttagtttcaaaatttgtatgattcttgtaattgtttttgggtttcaaatatccgactcatgaatccatgagaagtagtataacaatgtttgcactatacataatatgggcgtattaacaaaggtcatactctaatacacgataaagatgcgcttttgcaacgttaccacagacaactttataatgggaattaagcttttatgacattacaaacgacggaccaataataatattgttatttataatttgaggcatcaatctataggaaggtcgtgaccggtgatgacgcagcaaaggtgaaagagaggcttcaaagtggaatcagacacccaatttttacagaacaaaagcctaacctattgtcatgtttaagttctttctttcgattaaattaccttttttttgggatcaaattaatattttgggttaaagacagcatcagatcaaatctagcttttttcagcaacagtttccaccttgagatctgaccatttctttatcaacttgctaaagtcgatctctgtatggacgatccataacttattttctattaaggctgcttgtttttgggaattctcatttaaagaaaatgcttatcttttcttttttcttgtcaagttatatattttatcttaagtatctatacccccaaagatgtttacttatttttcatcatgaaaatgttaaaacattttaagcatttgcgttagtttcctattacatcattatattcctcagttaatcttacaattttttttgtgaatgtaattaatcttacaatttaaaatgtctgaacaaatgtatttgttctagacttctagttcaacaagtatttatttcttgttaagaatgactttttaaacgatcaatctttttttatttttggtaacataaaaacgatcaatcttattgaaactttcctacacatggatcaagttgtattagtctgatacaattattgtaacaaaataaagtatatatatatagcgaagaatttagctgagtttgagtagccgatgcaaaaatgctgcatatgtctttattcctttaatcacctaaaatacaagaatttactttctcttatctcatgcatgagacatcttatccaagttgttataaatctctaactttgtatctgtaaagatttttgtagtaaaaagccttgagagatgagaaacgtggaattgagttggaaagaatgactcaaaacctttacaatattcacccaaaaaaaaagagaactttatgatcgtaaagaaaagaaaggaaaagaaaagagacgactattttccattgcattgatgggctctttcaagcctcaacatacggatcattccgacttaatccggtccataaaatttgcatttgcatgtttaaacgatattgactttatgactttatcaaccaatgtaggccaccactagagtaccgtacctagagatgttaatgatgggttaaaatccactggtacccaaaacacacataaaattttaagctcatagatctattttttctggaaataaaacacaggtttaaaatgggctgggtatccaaataaataaaacacatatgggtttacctcattgggttatgggtacccacgattttttttaaaatcatttttcaagtgaatcaacatttttttgtcaaaaaagatttcacatttttttctcctaaaccgcgatttaacagtttaccaccaaaaaaaaaatcaacattttcccgccaaaaaagacattcaaaattttcccgccaaaaacgacaatcaacattttcccgccaaaacgcaattcaacattttcgtgccaaaaacgacattcaacattttccgccaaaacgcaattcatcattttcccgccaaaaacgcgattcaacatttttccgccaaaaatgatttcacattttcccgccaaaaacgcaatttaacattttcccgccaaaaacgacattcaacattttccgccaaaaagatttcacatttttcggtcaaaaacacaatttaacattttcccgccaaaaatgatattcaacatttttccgccaaaaacgcaatttaacatttttccgccaaaaacgacattcaacatttccggccaagaaaaggatttgacatttttcccgccaaaaacgcaatttaacatttttccgtcaaaaaacgcaatttaacattttcccgccaaaaacgcaatttaacatttttcccatcaaatatatatgtaatacaaaaaataaatataatttaaaatatatttataagcaaaatatagatacaacatacatataatagtatattaacaattaaacataaattataagaaaataataaaaatcaagttgggtacccacaggtagtctcggaacaatcaggttttttcgggctttacccactaaatcaaaaatccatctgggttttttaaagttgggtttttggtggacggatttattttggattcaggtcgggctgggcttttttacccacaacaacatctctaaccgtaccaattcattttctatgtagaattacataactatagtttttccttacaaaaaggatgaaaaaattctggtaaatgatacattttgcatccttcgtgttcttataaatatactaaacacatcattattcacacaactataagaagaaaaaaataggtacgaaacattgttaataatcccaaatgattgattgaagttaccacatttattctttgaattacttgttaggttgattagtacacaaaagtaacacgaacctactaaacaacttgttagatctcataaacggcccattaccgattaagctaaagcccgttttggaatttcactaaacgacgtcgtcctgtatccctcatcttttcttctttaacttgtcagttattttctcagtttcttttatttcaattttcaaaggtgttaatttcgtccccatctccgtttctgatactttaattaatactcattgaaaaaatcaattcgaactaaaaaaaatctcgaaagtctttgcgcgtaattttcttctttattttgttctcactgattattttgcattagctcttttcttttttggggtcgaaaaaattaggtttttttttgggattctgttgatggcgacgacgacgacgacgcaggggcagcaaacggcgattgactcggcggttctcgatgatataatcaggcgactcacggaggtccggttagctagaccaggaaagcaagtccagctctctgaagctgagatcaaacagctctgtactacagctagagatattttccttcagcaacccaatttacttgagcttgaggctcccatcaaaatctgtggtatcttcccaatttgattcgttgattttaataatttcgtcggaattgattttagggttcttattgtgtttcttagattttccaaaagtgtgaacttggttaggttttggggataaagttgttagaccattgtgagacctttttgtttgatgttgtgaagtgactagaatctgagtgagaaatgttttggctttttgtggataatgattgagtggagaggcttatcttgttgcttatgatactgtgtgtgttcatgaaaaatcctatcccgttctgtgatttccttatggtttgtggtgtacatgtcttaaaccaggtgacatacatgggcaatatagtgatttgttgaggctatttgagtatggtggcttccctcctagtgccaattatctatttcttggggactatgtggacagaggcaaacagagtcttgaaacaatatgtctcttactagcttacaagatcaaataccctggcaacttttttctactaaggggaaaccacgaatgtgcttctatcaataggatatatggattttatgatgagtgtaaaaggaggttcaatgtgagagtatggaaggtttttactgattgttttaactgccttcctgttgcggcgcttatagatgacaaaatattgtgtatgcacggtggactttcgccggatcttgaccatttggatgagattagaaacttgccgagaccaactatgattccggataccgggcttctctgtgatttgctctggtctgatcctgggaaagatgttaaaggatggggaatgaatgatagaggtgtttcatacacctttggtccagataaagtttccgagtttcttacgaaacatgatttagatcttgtgtgtcgtgcccatcaggtagatatttttcaatcatgtctctttgatactactgcttttgtgatgttaacaagggagttggattttttatggcaggtcgtggaggatgggtatgagttctttgctgatagacaacttgtgacggtgttttcagctcctaactactgtggtgaatttgataatgctggtgcgatgatgagcgtggacgagaaccttatgtgctcgtttcagattttgaagcccgctgagaagaagaccaagttcatgatgtccacaaagatttgatactttcattgaggttagtcaatagtctgtccttggcggaaaccaaaacgaaactagtgaatgaaaggattctcttgcactgatttgttcatgttattcattacaaagtcaagttcacatttctgttgaacatgatttcttttggattcttccaggctaaactttttacttaaatgggtcttgatttcggcttttccttctttcacagatggatttggtctttcttgagaaattgattgaaaccattgaagatttggctgtgaagtgtgtacttatggtagtgagaactcttggaaaggagcaagaccttcttagtcttctaatctctttcttcccccaaattcactttcagcattttttttctatcttcttttatgggttttacatgattttcatctgcctgttgggatcacatagttggtgtgtacatgcatatggtcgtttcttggattttaggacaccaaatgaaaatgatgttataaaaaaggtttagtatgatgagtttcgtctcttaagcggcatgtgaaagtgaatgagacataagtaacgcatatgaacatcttcaattaaccatcataaatatcgaatgagcatctaaattggacaacaagtttcacacatgttcatcatgtttaagtaaaagaagaatttgagaagctattgaaagtaaagtccactggttttggtatgatcgtgagtgaagtgatatatgatccgtttggtggactcgggaaatagaatagaatataataattggagggactgaaattttatgttgttctttgttgtggatgagaagtaaacacggaagcgataagttcgtaaaagtaactttttttttgggttgcaaacgggaaccaaaaccacatgtatccaattctttagacacatatcatgtcattatcctatctttgaatatgttcatattcttagtccatttcctcaccagaagatgttggacaaaacgtatcctttgatcatagtatcctcaaacatttcctacatagtattgtgaccatgtcatattcttctagacttcctagttcctacatagattatgaccatttcatactattctcaaaactcaaacaaacaaaaaaatcaattttgaaatataattatttctaattttcatatttttgtaaattgaatacacaagcgttcgtcgtatacgaccattgttttcagcgtgtaagtttagcaaaaaaaaaatcttaaaacttgtggttcatttggaaaagtaagaaaatatacacgaacgtaataaacacaaacaaacaattgaaacatgaatgtacaggtttagtgttattatctgaccacattgtgcgcgagtgtggaccatgtggacgttataagtttcatcaaaccaagcatacatatatatgtgcgtcaacgtagaccctcaagttttcttgattttcactcgaatcaataccgtatactcatgttttatcgtaacatagaaaaaaaaaaaatcatggactttctcaagaatcaccaaaaaaagcatgcagcttcataatcgaagaataagattctttaaattgattgatgagcgtctgcactatgaaatgtttcgatttcaatcttctcctccaattttcttcttcattagtcctttttcgctcccaatatccttcatgaaatttctctataaatagagacataaagcattaacatgcaatgcaacaaaacttaagaatattagagtcaaataaattttaaaagaaagttgacagtaaaaaaaagccttaaagaaaaagaattagaattagaccttataaaaaaaaaaaaaaaagaattagaaagattgttctggtgagtgagtgagggatggctatagcttttcatacctttcttcttcaactgctactcttcttctttgcttcttttgcggaagcaaacgactcgcgaaaggtgagaaaaaatggacctttcttctttaactaatagcgtaacgtttttttggagatacatataacgacgaatgtttgaattttaacatataacttcttgctttctatggtacagacataccttgtgcagatgaaagttggtggacatcgatatgggtcaagttccggtcaccaggaactactaggcgaagttcttgacgacgataggtttgattttaattatgccttattctttaagtcatataggttttgatgagatatattggttcaaatttcccaagaagccaatcctctatgttaacacatgcagcaccttagcggatgcatttatctacagctataaggagagcttcaccggtttctcggcaagtctcacaccaagagaacggcaaaagctgatgagtaagaccacaactgtttcgtcacgtttgcatttccttttttttatacaattgatcagtacaatactataacacgcaatgacgtaaaagccaaaaaatgtagaattatagcctactgctatatagattgatatcaatgcatagtagggacgtggtaataacacacgggttatgttaatgttgatatagggagaagagaagtattggaagtttcacgtagcagaaacctaaagcttcaaacgacaagatcatgggacttcatgaatctaacattaaaagctgagcgaaatcccgagaatgagagtgatttggttgtggctgtcatcgattccggcatttggccctactctgagctcttcggtagcgatagccctccccctcctggttgggaaaacaaatgcgaaaacataacttgcaacaagtactataataaacctttacttatgataaaacaaaaatatgtatgattttctcttttcaagatgacatggttaggaatcttgaaagttggaattaagtatgagaattaatcttgctatcataaactacaattgcagcaagatcgttggggctagatcatactacccgaaaaaagaaaagtacaagtgggttgaagagaaatcggtgattgacgtgacgggacacggcacacacgtagcctccattgttgctggcaggaaagtagagaaggcggggtactttgggttagcggaaggcacgatgagaggcggtgttcccaacgcgaagatcgccgtttataaaacatgttggagagtaataagaaaaaatggtagagaggattcagtttgtcgagaagataatatcttgaaggcaatagatgatgcgatcgcggacaaggtcgacatcatctcgtattctcaggggtttcaatttacgccactgcaaaaagataaagtctcttgggcgttcttgagagcacttaagaatggaattttgacttcagccgcggcagggaactatgcgaacaatgggaagttttattacactgttgccaatggcgcaccttgggtcatgaccgttgcagcgagcttgaaagatagaatattcgagactaagttggagctggaaggagaagataagccaattattgtaagtgaaacagataagttgcttgaatcgcaagtaatctcccactagacttatttccgtttgtttaacactctttgttatggaaccaggtgtacgacacgatcaacacctttgagactcaagattctttctacccgcttttgaatgaaaaagcaccccctgaatcaacaagaaaacgtgaactcatcgctgagtaagtcatccgcacaagaggttttgttgtgcatatatatatgtacagaatcccgatttcacaataaaaaattgtaaactttcttttgaaattttgacttctaataataataaaatttagaacatcagtttatatatgcttgattgatatatatatagatcagtgagaaattaaattactatcgtcgaaatctaactatttgatgaatgaaaatgtttgcttctcaattgtaggagaaacggttactcaatattgtctaattatgatgagaaggacaaaggaaaagatgttttcttcgaattcgctcaaatcaacctcttggacgaagcgattaaagagagagagaaaggcgcaatcgtattgggaggaaaatcttacgacttcaatgagtcgataaagttacagtttcctatcgcttctatatttttggacgaacaaaagaaaggtaaactatgggactactataaaaaagatcaaaggtaacgacattcattaagtggtcatataagaaatttaagactaattaattgttttctccacaaagttaaataaagaaatgaattttgttttgtgttgattcctactacagcaaagaacgtttagccaaaattcacaagaccgaggagattccacgagaagagggatgggttccaactgttgctcacttatcatcgaggggtcctaattgtgacagtttcctagcaaacattctcaaggtacttttcttttacacgtcaacttgatctctagaaaaatgcatcattatagttttggtttagaattctcatatgaacaactgttttcagcccgatatagctgctccggggttagacatcatagcgggttggcctgagaatgtgaaactatcgtcagaccgccccgccaacgattaccgccatctcagattcaacataatgtcaggaacttccatggcttgccctcacgccactggacttgccttgtacctcaagtcgttcaaacgttggtctccatccgctattaaatctgccctcatgaccacttgtaagtcccaaaatgcaccaataacagatcaattcatctgtatattgtagtatatatatttgaatattctttttctctttgcagcctcagaaatgacagatgacgacaacgagtttgcatatgggtcaggtcacttaaacgctacaaaagtccgagacccgggtttggtctacgaaacacattaccaagactacatagattacttgtgcaaactaggttacaacaccgagaagctaagatcacacgttggaagcgacaagatagattgctccaagacagagatagaccacgacgcggacctcaactatccaaccatgacggctcgagtacccctgcccctggacaccccattcaaaaaagtcttccatagaacggtcacaaacgttaacgacggagaattcacttacctccgagaaatcaactaccgaggtgacaaggactttgacgagatcattgtggatcctccacagctaaaatttagcgagttgggagagaccaagacttttacggtgactgtcaccggaatatcgaagcggaattggaacaagaacagggcgtttatgacaaggaacacgtggctcacgtggacggagaaagatggttcccgccaagtcaggagtcccattgtcatatactcaataaaaggaccaaaagcttgcatgtgaattccccaagaagtcaagaactgaagctgccacttttgattagtaaaaataatgacttttgaatcttcttaattagttgtcattcccgttgataacaagtgtgctgtgtattgatttaaataaaaaaaattacataaattatttggccatttttttttatcgttttaatttattttttcttattcaaagatttttaatttcaaatctcattaatggtcatatacagtttatactacgtaattcgttcataataaaaggggatgttaaaaagtgaaagaaaacgcttaaaagggagtccaataaatgcttttataaacgctcaaaagaaaagaggttacagaacttatagcttcgcatttttggcctaacgttttcattgttcaccactatttatgattgtattcacaagattgtattcacaaatcacaatatagaatattctatccaaatctcaaatctttaatctctcagcaatataattcttagagattttattgaaatgacttcccaaatattgttgattttcatagcattttcagttttcgtcgtatgttcgagtagaactttggggccagctccggacaatcagcaaatgaaggtacttcttttatatttattattcatgagtagaactaatattcctcgaaggcaaagcattaatatttgaccacatgtgatacacagtgttatctcgtcaatgttgattttgcattgtatcatggtgactgtaagcaataccaacaacttctcaaaaaggtggttcacggaaggtaattagtggtttctacggagtagatgcaaacagcaaaaacttaatgatttgaagatgtaatagcaaaaacaaaaattcaatttttttggttgtctttttggttttcatcaggtcagcaaaagatgctcttgtatattgctacaaggaagtcatgagcgggtttgcagcaaaactgaccgctgcagaggctgaaaaattaaagggtacgtacatttgttcaacaaagaaacgaaaatatgcattcacttaaatgaaaaaaaaaaaacattaaacccaatttttgattgtcaattgggtgaacactcgttgtgctagtgctgctagctgagagttgagaccacaaatctctgattacaagaaaatgaaaatacctttttaatttctgcattgaaaaatatatatatatatatcccatgaacaaccaaaataatatttgtaagttaaatgttttctgtttatatataaatgtgtgcaggtgagaaagggatttctgctatagatgtagaccacatattctccatggacgtcgaaccccatagccatggcaaaggatattaacaactagttgcttaatattgtaagggttttttctttttgttcggtaaatcactcttgtaaggttcacttgaaaacttggaaagaactaataacaaaagaaaggatgatttgaaatgaaatatattaactaaaactcaatcggtccagatttaaatcgcggtagtgatacaacaaaaacacgaaccaataagtcattcgtcatagtcttcaaactaaaattaaactagattgaaaccatttaaaaaatcatttgtattcggattggtttggtatctattttttgtgtgattattttcaaattttcattctaacttgatgtatacaaaagacatttaatttggttggtaaataaacacaaacatatctgttcttcaatttcattccctttaacccaagaagattaaaaaaaggttacatgattcatttacttaaagctatgaattataaccatatctcaactagaaaataaacttcgttttagaatgttttcaaatatttgaatgcgaagttgcgaactatataatcgactggggtacgtataggaatcattttctagataagaaaaacaaggagcaagtgcttcttgttgagctttagggaaacacaaggaacactaaagctttttgttttatactgtttaggtatagacgtatagttatctgttaattttgtgttgtcttaaattctgtataaccagatatacacatttcttccgcatatgatatttcttctttactacattaattcgactaaataaaaatgtaacataaatcaattaaaacatgtaaataaaagacagtctctaacttgtaaattgtagagaatatcaagctactacaaatcatccatcaaccagccaaaataacatatacaaaagcataaacatataatatgcccaagctcgaatcctacttattattgcaattactatgtgcaatgtatctaaacttcctaaccatgtgaaaaaatgcaatgcaatgtcaactaagcataataaaagatcccaacggtataatgatccaaggttggggagcagagagaatttgtagctaagagcttctttaaccctcaagctatggctctcattgactcaaaagggatctaatcctcttttcaaaaggctgcctctccatcatctattcatctttagtagtctctatctctatctctaagtctttttgacattcttgatctcaatggtgtccattacttgaaagaaagttattaatggatgacatataatgattatggtgaacatgtcatgagttcctcaagtcccattaaggacacgtatatcatcccattcagtctttcttttttttgcagtcgaattattccttgcttgagagtagcctataccattgatttttactttgcattgtatagtacagataattctaagtgtttgttagatacagatacaacggatcatgcatgggatgtatctttgcagaaactgttttcaaaggcatagtcaaacaaataattgatagaaagaatattaggacaaatacccatcacacgtattgacattatgttctagctgttaagttctgctcaacagattcacacaaatgtttattctttgtatggcctaaatattttattttatatttttgtcctagggaaaaattactgctatgacttgggctttttgagacgaatatatgcacaagatcattacataattgtgttttataaagttaaacaaaatcattacataatctcaaatgcaaatacaaaaacaataaacaaaaaaaaaatctatagggattgaagtatgtatcatagtcgaccaaaaccataatttgattatcacacaagaaatatgtaatagatggtataatgcatgagagtgtaaccaatttttttttttttttgcgtgtaagttaagttagaactattttggtctcatgttgtcatgcggaagattcataacaggaaaatttttgtaaaatttggaacattctagtgctaagggggcaagttaattgtgttatctactgacttgattggcaattaatcggcgcggctgagtagttggataatggaccaaattagtttcagtcatgaaatgcttccaaaaatgggaattattttataaaacggaattactcaaaccaaattagaataatgtaaattttaatatggtttcaattatagtcaaaggctcaaagctgataagtggttaacagtgtctataaataagcttacaggagagtgaataagtcacatacctcccaacacaaacaactaaaaatcgttctcaaagtaacttctctcgtttctttccgctctctacttaaccatttgaacatatatcccttagccacaaagaactaacccttttaacatataaatacattagtatacacaaacaacaagtagacatcaaaaagttgaaaagagctgtgatggacaagaaaaagtcggtatctggttcctcttcatcgtcctcttcgtcgttggatcatatttttggtccaagagtctctcactcgtattcttcatcaacaacaggattgttcaaatccatcttcccaccaccttcagcggtatatatgaaccaatatatatcatgatcatcatcattctaaaagatatacatcagtttcacgaaatttttctttgttctcaactcaaggtgacgcaagggaacttgacaagtcgaaatggagctgccaagtatcaacctacaaattttgagactccaagtgagtttactgcttactctagtgaagagttttggacgtgtttgtccttaaaatgtttggtttatatatctactatatactagaaattaacaatgagatactagttcacttcgtggcttagttattaaaagtgagaaatgtgaatgatggggtacagatgaaagaggtgaaaggagcaaaaataaggagagaaagagttaccaaagtgaagaaacacaaccaccatgcaacttgagctcatccatatactatggaggccaagataactattcctcttcaactaccaatccagatgctgtaagtccctatatatttgtgttgcatttcgacagaaacactaaaatgcataatacactaaaatggcgttttcgagaggaaaatggatatgtgagctatatataaacgcaaatgggcaaagtaatattctagattatgtgttgtcattttatctagattcatttggaattttggatatataagtctctatgtaattaactctaataaactagctaattttgagttgtccagtataagaaagatggagaggaaggtgattcggaaagtgcttcaagaggaaactggtgggaaggtaagaaagactacaaacattttctaaattctactttacatgttttatcatttatagatcttttctgtgaggaactcacttatagataatcaaaatatgcaggatcgtttaattactaattaacaatccccagccgatgagcacaataactgctaaactgctaaggtacaccgtagattcataaaactgaaagtcatgaatacttcaggattattacatagttgtataatttgcatatttttagttaaggttatattttatttatattaaccagaatagttaataacttagaaaaaatggaaactgaataccttgcctcacaagtttttcaattagtcatatatctttgatacagtttctgtgatcattttgcaggaaccttaactaagtgaatatggaagttggcgtattgaatatacctacatatgtaaaaaaaaaaaaaaagtgtgatagaatatttacacatgtcctaaaaaacgacttaagaataacaaaaaaagagactgtatagtatatcttactgtataagatatgaaatgtacgtctatataaaagggcttgacgtgttggttctttatgtttcgacaaaggcaacaaagttagactagacaagtctctttataatgaaatctacgtctgtggtctgtccaaaagtctttttatttaaaatttgatatgtaatccaatatcatgtcggatgtaattaagttatatgatagtaatcactaataaaacatttcgtttgttagtatatgtaagcaaacagtgtttttttttttacatttttttcctgcattatcacaaaaaaaaaattctcgacaattgacaacattgatgaatgattgattagaactgtttgatttataatatctaaagacgaaggaacataattttagtttggggaaagagattagcgagagcgcaaagtggtgcaaaagataatagcggcaaaacgtttttagtttttattaaactaagagacggcccaatagtccatattctgggcctgaaaattaaaaaaaaaaaacagaaggtgaataaaaaaacgccgttgccggggatcgaacccgggtcacccgcgtgacaggcgggaatacttaccactatactacaacgactttgttgctctgcttccactgaagattattatatcgttttaatttaacaaaactgtggatctgaaggacgtatcgagtacttaacttttcagccaaactaaagggaggcagagtaaatgatttatggcatttttgaatcgttttgtgacaaaattagtgagacataatttagtcgactatgactaaacttttcataactgatttgaagcataaaaatgccaaacatgaaaagagtagctaattattaaggaactaaatgaaaacaaagagactcttccgaagattcatgtttccaaggctttgaccattgacggttcaactatagtggtatgtatttgctaagaacaaaatgtctatgtcgcatgtgccgcactcgtgcgtaacggtgtactccacacatgatatgtgataaaacagttggcgtcgcacgtgctatagcatttcaaaaccgagtgaacgagaaagaatcattccttttgcatgtggcgggagatattttttgggccatcctcctctttgctttgagagtttctaaactcaaagaatctatgttttatctttggttttttattatttttcctcattgattgtttaaggtgactacatgattataactttcatatagatgaattcagtcgttttgtgaatcaaatttaggactgatcaacatgttatattacttgttaggtggtaaacctcgagtcgtctataaatatttctatagttttgtgatttatctctcatctctataatatagtgatcatttagctcttttttagtttgttgtattatttgaaaaagattaaagttgcttttagttcgtcggtcgtcgtcattagatctagtggaaactggatcgtagattcatatacaattgagaatttaagatcatgccaaaggcgattgctgatatcatatttatgtagcttttgtactttttaatagaagtggacacaatactgatatcattagtgaataatcttttcatatctttcagtctaagtatacacaaatatatcgtatatgcataaaacgaatgtctctcattttcgtaggaaagaaaacacaattaaaaagaaatatttttaaaaagcaatgtgaaaagaagttggtaacttgaggttcacgagatccaaatgtggatgaacgttggaacagctaaatccacgtaataaaagaggacgaagcttatgattaaatttggtcagttaagattctcatcctatgcaactacctaatacaatacaattaatttgtctccctcccaaattcattcaaaatttttttttgcttggttataatctatttattttgaatctggtggctataatttttcaaaaatctatgtcaagtaacgtatcttacgaaaaaaaacactgtgattaaattcatcggaattactagtctcatactaaattctacaaatagatatcattttctcttgtaaattacacaacaataacaaaataacaacaaaaatcattattttcttctcgttgcttttattcttacgaactggatactatctttcttatatgtaaaaacaacacgtaatatctaataagtaaagtagggaaagtagacttacttatgttacatagggtcccccttattaggctacatatgtataagcaggaagtagacttggcatttgaaatagacggttgatatctccctgtcactatttatccatccttatgacctttcggcgggaaattcgaaatgacatttgcagattttcttgttttttccttttctttttttgtttgtccactccacttatatctttttttcttttggggtttttaatcgcatcctacaacatatcactcggatagggtaaattgccccaaccaaccattcattattaattaataaacctgacgaggaaaatgaatatattttggtttcaaatgttttgtggaatgaaggcagagagaaagacagcttctgtaaaagcatttgctggcagacacaaccctaaacccaccttcacttgcctcacctcaccactctctcttcctcgcgcgtgtctatcacttccataaactctcattgcccataattgcttgttttctttctatatgccaagcctgataaatctcgtagtaaattacgggaaaaaattggattccacctcacacaataaagcattttacaaaaccagctttatcattgggttttttaacagattatagtattgtgggtgctcttaatatctggtacacaatagtataaggtctatcgacaatacagagtagactccgggagacaagagaagccaactaggggcacattttttgggcgtaactagacattatatattaatttaaaacttttgagtttcttcgttgaaaaacaattatagaatatagttttgtcttcaatataaaatgagaaagaagagaagaagatctgttcccgctcttttgacttaacggtgctgtcgttttcagcaggttaacctcgaccccaccctccatttttcacttccttctttttaaattattttctctatcactaaaaatatcaaaaaggcgggaaaatcacctattatccaattcagtttataaaccggtttcggttccgtcgttaacggctgattcttctgaccaatgaaaactcgtgaagtctgacggagaagaagacggaactgttaaaatccgttacgtcagacggagaggagggagagggacggatgactgaataaatctgccgaatcctgctgaattgccacgtcagctttattcaaaattctctgagtggtcacgagatttctatggactcttttttttttgttaattaaaagtttaaaaccctacaaaataggggtcttcaatggggttaccagaaaaaaccgaacagtcgccgattccttggtttaatctttgaaccgacagtgtgaccttttaattttctaacctttgctatattattatgaaaatcagatgtaattatttagtgccattcattaacgtgattcttacttataattcctctcatgaatactaaatggagtgtatataattatatttagcagtaaaaatgtattgtattgattgttggaaagggaggaaaaaatgatgagaaggatttgcatgaggaaaagagagagaaggcgtaattatcaagtgttcgatacttttgattagcccacacatttataatattttagtgtagtagtgagatttttatttagggttttaattagaacatagtataagacattggagctgtaaatgacaacttgtttgggatttagtgggttccacctgtatttctcatgcccttacacatttccacattaatatctatcttatcttataaaaaaaagttccaaagaaaagagtgagatatacatatattagcaatatgagtttaatgtgccattcaaaataaataaataacattttgaagaatattaagagtctcaattaaaaaatatttaacttgttctttagtgagttacatccatatcttaagagacatgtgaagagttgaatccaaatgataacacaccaaaattgatggtttttaaaaaatgtgaatactattactgtttttttctttggatttccaaggcaaaatagttaagaaaagaccaaaggaaaatagttttgattttcgtccatcacgcattaattacggataattattatattaagaaggaaaaaaaaaaacaaaaaaaagcagaagtgatattaaagtgcttttgagctgtctcgtagaaaccatgaaaccttaataaaagcaaccttgtcttcaacattctccatcttcctcctcacttaatccccaagttcacacttcaaatccactctttctatttctctccttcttcttctatgtctcgcctcctccctcctcatctctccgtcaaccttcctaccatggagaaaactacttcttccgagttaaccccaactcgactcggttttcctaacgagttcccttacgagttcgactctccttccttctcccctggtttcacttctcccggtgactccactgagacggaagacgaaagcagtgatgacgaggaagacttcctcgctgggttaactcgccgactcgctccttcgactcagcgtcttccttcccctctcttcaagtctgaggtaagaaacgccgcaaagatctttgctttctcgttaaactataaacgcccatggttactgattctgtagtttcttgctctgcaggagaaacgtcaagttgcagctacttcaccacagtcaacactgagtggactcggaagcttttcaaactcaggaagtagaagccctatccttccatctccaccggctcctacgtcatcatttcgtagagacaacgcgtgggatgtgatttctgcggctgctggagaagtcgctagacttaagctcggaagctacgagcctcatcaccttccccttcaaacccctgagtctcttctccgccgtcaaaacgctgccatacatgctgaactccaacaccagcgtctcatcgaacagatgtggctctgctctgctcagtcaagattcaagctctcagagaatcgtatcccaaggagagtagttaatgaagaaggcttatttgagaatccgagatacgtgagacgcaacaatcctacgtggttgcctccgcaacaagccgcagctcctttgaaacgtccttctgctggaaccggtgtttttcttccccggcgatacccatcggccgccccttccgattccctgaaaacaccaggtacaattactccaagtttgtgtttatttttaatagatcctatgtgtcagaaagattttaacttgttttattttgcatctctgtaacagtcaacactccagctatgttgcagcctaaagtgaaacctcaaaatctcaactttgatgagttcaccaatattgttgggccaaggcgtagccaattcgattacggtgagtgtctatattactcataccttaattgttaaataataacagctttttgattaaacaaattgtgtgtttgttatgatgtgaacagagtgcatgttggcgagaagtacagtacttgctcgtcagggaaatttcagagcagttagtggtggtggtcttccacaggattggatgtactgatgttgttggagttttagctgttgtttttgtcttacaagttcgaaattcggaaggagcgtcttagtttagaaggtggttcggtttaggttatagttgaactagtgaagtttgcgttctggttagtaataaggatttgaattataagaataaatttagggggatattcaagtttgtattaataaatatatatatatatatatatatttatgtatttttagttactaagaccaagctctctgtaatttttttgttgaccttgggagggtttttaaggagtggagtggggaaattgaaaatttgttgggtgggatttgttatttgtgatacataaatagtgttttctgctatttttggtaaaatctaatgggtctgtagtaaaaacatcggaattattttgtttgtttattaataattaattattgatatctttagttctctttaagtactacttcgatttacgtacctttgagttgtgattgcgcaaagttacggcttgtgacgtgtactcgttgaaattttgaaaaaagaacagtggttacagtttcaatgaactactatagtgttgtacttcgattattgggatcaaatcaaacgtgtagatacgttatagtttttgaaaaaacaaagatgcataatgacttgtaaacatggaaaaagcaaaaggaaagaggaaaagaagatctggaaagaaaagaaagagaaaaaaagaagccaaaagggttgcgtaggcgtgaagcagtgggcaatgcacagactttgaaatacggaacaactttttttctttctttcaattctgatatattattatcgtgtactgtatttggttggatatgtagattgtgtatgtccctataatttactacatgaattctgcttttttatctgatctaaaactttatacggttctacaaatcttatagtacaagtttcattatttgcattagtacaaattttattgatactttcttccaagagttatatgaatgtgtatacttgcttcctattatcttaaatcagaacttgattcgattgatattaaattgaagtaagtatatagttttagtaatttatttgactttcaaaatttcgaaaattttcagtgtttggtggttgcctattgaggttgtgtaggtcccatttagtttgttttattttggtccattgacatctcaagttgttatgttcaatttctggatataaattgtagggtttacccaaattctcgtattcgtttattcacatgttgcatatgtaaatggttcgaatttttagagagtttagagcattcaagaatagcaccggccaaaagttaaatactagtagtaggtttcaaaataatgatagaatttgatagcgttgattgttgcacacaatccggatagagccaacaacaatcacacttcttgttcaacattgaaccataatgcgttatttgctacatcccatattaggacttctaatttcaaacctcttaaagatggagttgggaagaaaaaacaaaacaagtgaaagccacaaaaatctaaagacaaaagagtataaaccatgtgttttggtttgggagatgtgaatccatgcagctttctgatttgactcggtcaaacttcgaatttaatgtaatacaagtattttttatatttatattggtaaatacatgaatcagatactggtactttccaaagaatagtgttacatacttgcattaaccgtattgcaaattcaattggatactaattcttttctttttttgtcaatccatattatattttcttgatcacaaaatatatcatagttaacttttcaggcaaaatcattctcaaactatttgtaagcacgcaggtaatgtataattcactaaaattggggatgtatgattaggagtgcacatttgaaactaaccaaatgatgttaatcaaaatcagtccaaattattagagaaactgattatattaaactaaactgtactacacacactgaattaaaatgaaatttgttttgataatagagtaatagtgttgtgtgagttataccaaacttaaaaaaaatcacacatgtgtataactctgaaactaaacaaagcaaaccagtgttaaggtttttgattcggattagttcgactctaatttgggttaacaattgttcgaaccatagtatagtagtgaaaatagccactcctatgagtgagtctatgacggtggaagcttattattatgttttggtaggtcatcattgttgtattgttgataattttcgaaaatataataattatttcaaccattatgtctctcaaaggacgacaaggcgtccataaataaatatggtagcagtgtgagtaaagcaaaagccatattcaatcttcgttatctgattcattggagaatttggattcctttctaagcaattggataatgtttcttctttttatttttctatattacaaacaaacggaaaaacttggatcacgtaaataatattgtcactcacggtgacaattttggtaagaaacaaaaaattgagatattttataatacaattttcaccagtattttatctatatagtatggaattgatgtaaaattatacagtttttgttaatacaactaaccaaatctaaataattaaattgtatacatgttatccctgaggcattttgtgggctttctaaggcctaaacttgccccatgttctggttacgatccattttaatagttctgaacttctgagaatatcctattgacctcaaaatgagaatcccattctcatacatccttcctacgaagatgcccaaaatgaacatatcctattgaagtcgaattgtcgaaaaacataaaaatcattcactttatctaaaaatgcattttttcgaatttttttatttgccttgaagaatttccccaggaaatgccagcttagtacttgtaaagtttcaatctttatgatctggtaagaatataattaacaaagagatattgaatgaatgttttgtctctaacgttagctcaaagcccttaaatcttgtctcaccatctgacttgatacaccattgtttaccattccactaaatttcgagtgagcatactcacgacgaaactgatcatcagccttcaaactctgttcagcttccttcccactcctaatccaagcagtattgttcaggtcatttgatatagagatcaattctttatctaactctgcagaagaatgttcctcataatccacaaactctgatcccagcaccgacgatgatgacagtgttgtgctgtcttgatggttgcagcaaccgtgaccgcattttgaagggataataggatcataacaaagagactgaagaaatttaccagccaatgagtcaggtcttgatgcttgaaccaaaggtccctcacatggagccatgtatcctggtttacagacactgaaagcacccattcgagccactggacgataaacaccagttttactattttgctcccgaggaggctcctttgcttcatcatccattttatcatcacttaatacaccggtttcttcttcttgaggtagatgttctttgggggatgcgtttgatatccttctgaccattgatggatacagttgatatactatctctgtattagacatcaatagaggaatcttccattgttctgctggtttacgtctaagattagagttccaatgattcttaatggcattatctgttctcccaggtaagagtttagcaatcacagaccatttgttcccaagaaccgcctgtgcagacattatcatatgctcctcctcatctgcatttcaaatcattttcataaaaacattatacaaacatgtgaaaacacataactcacacactaatcatcaaaaaccacatctctaaagaattacaacataaacatcttgaatccaagagaatgctaaaacctattaaaccatctccatatacataagaatctgattctgaagaaaagttcatatccagtaaaatcaccagcaaaacagaccaatctacaaatctctcacaaatttttcaaaaataagctaaaacaccgcttctcattagcactactgagaaaatcatatgaatcaagtaccacaacaaagatcctgaatcaacaatagctaacactagacatagataaagagaaatccagagaaatcgaccaaagcaggaatctggaatcaaggagaatcaaaaagaagatcgagaatcgtgttttaccagagaaaggttttcgtttgaggataggatcgagctgattacaccaacgtaatcggcaagatttaccagagcgacctgggattccacgggagattagattccagttcctcggcccacacattttcacaagcctcgtgagagcctcatcttgctccggcaaccaaggtcctttcactttactctttccgccgccgttcgcgtcgcttttcgctagctcggcgagctctgcctcaactgctttgtgtattgcattttcaaaactcttgcaaggattccgggacgatattagctccggcggacgagagatttctccgttcatcggaaataaaattgaaatttcaaaaaaatgaaaccaaccggggtcctctatctgtacctctctctgctaagcctaactgcaaagttaagtgggctaagaaattactattttacccttttcgctgactcacctttttttcaaaacaaaaccgttcgttatgacttatgattcagagttgaccgtttcagcttccaatttaaaaaatttattaacagcgaaagattactgataatttgatatcaatgaagtttggtggaatcaagtcaaaattaatatcaaatttgatattaatgaagtttggtgatattgatgttaaaattttatattaagtcagttcgagcaacatttacacataaactaacatcaaagtcattaacatgagaatggaagactatagtaaaacaaatatcaaccaaaggtttagaatttcgtaagttttttttatttttatttttagaatttcgtaatttagcaaagaaaaaaccagcataatcaataatctatatcgaaaaacagcaataatttttgtttgggccatcaacgatcagaacaagtaaattaagcccattttcactgtcggtaagacttaacccatgctccctccccaagctt

SEQ ID NO: 353 - DNA, 108847 bp, Arabidopsis thaliana
aagcttcaaacgacaagatcatgggacttcatgaatctaacattaaaagctgagcgaaatcccgagaatgagagtgatttggttgtggctgtcatcgattccggcatttggccctactctgagctcttcggtagcgatagccctccccctcctggttgggaaaacaaatgcgaaaacataacttgcaacaagtactataataaacctttacttatgataaaacaaaaatatgtatgattttctcttttcaagatgacatggttaggaatcttgaaagttggaattaagtatgagaattaatcttgctatcataaactacaattgcagcaagatcgttggggctagatcatactacccgaaaaaagaaaagtacaagtgggttgaagagaaatcggtgattgacgtgacgggacacggcacacacgtagcctccattgttgctggcaggaaagtagagaaggcggggtactttgggttagcggaaggcacgatgagaggcggtgttcccaacgcgaagatcgccgtttataaaacatgttggagagtaataagaaaaaatggtagagaggattcagtttgtcgagaagataatatcttgaaggcaatagatgatgcgatcgcggacaaggtcgacatcatctcgtattctcaggggtttcaatttacgccactgcaaaaagataaagtctcttgggcgttcttgagagcacttaagaatggaattttgacttcagccgcggcagggaactatgcgaacaatgggaagttttattacactgttgccaatggcgcaccttgggtcatgaccgttgcagcgagcttgaaagatagaatattcgagactaagttggagctggaaggagaagataagccaattattgtaagtgaaacagataagttgcttgaatcgcaagtaatctcccactagacttatttccgtttgtttaacactctttgttatggaaccaggtgtacgacacgatcaacacctttgagactcaagattctttctacccgcttttgaatgaaaaagcaccccctgaatcaacaagaaaacgtgaactcatcgctgagtaagtcatccgcacaagaggttttgttgtgcatatatatatgtacagaatcccgatttcacaataaaaaattgtaaactttcttttgaaattttgacttctaataataataaaatttagaacatcagtttatatatgcttgattgatatatatatagatcagtgagaaattaaattactatcgtcgaaatctaactatttgatgaatgaaaatgtttgcttctcaattgtaggagaaacggttactcaatattgtctaattatgatgagaaggacaaaggaaaagatgttttcttcgaattcgctcaaatcaacctcttggacgaagcgattaaagagagagagaaaggcgcaatcgtattgggaggaaaatcttacgacttcaatgagtcgataaagttacagtttcctatcgcttctatatttttggacgaacaaaagaaaggtaaactatgggactactataaaaaagatcaaaggtaacgacattcattaagtggtcatataagaaatttaagactaattaattgttttctccacaaagttaaataaagaaatgaattttgttttgtgttgattcctactacagcaaagaacgtttagccaaaattcacaagaccgaggagattccacgagaagagggatgggttccaactgttgctcacttatcatcgaggggtcctaattgtgacagtttcctagcaaacattctcaaggtacttttcttttacacgtcaacttgatctctagaaaaatgcatcattatagttttggtttagaattctcatatgaacaactgttttcagcccgatatagctgctccggggttagacatcatagcgggttggcctgagaatgtgaaactatcgtcagaccgccccgccaacgattaccgccatctcagattcaacataatgtcaggaacttccatggcttgccctcacgccactggacttgccttgtacctcaagtcgttcaaacgttggtctccatccgctattaaatctgccctcatgaccacttgtaagtcccaaaatgcaccaataacagatcaattcatctgtatattgtagtatatatatttgaatattctttttctctttgcagcctcagaaatgacagatgacgacaacgagtttgcatatgggtcaggtcacttaaacgctacaaaagtccgagacccgggtttggtctacgaaacacattaccaagactacatagattacttgtgcaaactaggttacaacaccgagaagctaagatcacacgttggaagcgacaagatagattgctccaagacagagatagaccacgacgcggacctcaactatccaaccatgacggctcgagtacccctgcccctggacaccccattcaaaaaagtcttccatagaacggtcacaaacgttaacgacggagaattcacttacctccgagaaatcaactaccgaggtgacaaggactttgacgagatcattgtggatcctccacagctaaaatttagcgagttgggagagaccaagacttttacggtgactgtcaccggaatatcgaagcggaattggaacaagaacagggcgtttatgacaaggaacacgtggctcacgtggacggagaaagatggttcccgccaagtcaggagtcccattgtcatatactcaataaaaggaccaaaagcttgcatgtgaattccccaagaagtcaagaactgaagctgccacttttgattagtaaaaataatgacttttgaatcttcttaattagttgtcattcccgttgataacaagtgtgctgtgtattgatttaaataaaaaaaattacataaattatttggccatttttttttatcgttttaatttattttttcttattcaaagatttttaatttcaaatctcattaatggtcatatacagtttatactacgtaattcgttcataataaaaggggatgttaaaaagtgaaagaaaacgcttaaaagggagtccaataaatgcttttataaacgctcaaaagaaaagaggttacagaacttatagcttcgcatttttggcctaacgttttcattgttcaccactatttatgattgtattcacaagattgtattcacaaatcacaatatagaatattctatccaaatctcaaatctttaatctctcagcaatataattcttagagattttattgaaatgacttcccaaatattgttgattttcatagcattttcagttttcgtcgtatgttcgagtagaactttggggccagctccggacaatcagcaaatgaaggtacttcttttatatttattattcatgagtagaactaatattcctcgaaggcaaagcattaatatttgaccacatgtgatacacagtgttatctcgtcaatgttgattttgcattgtatcatggtgactgtaagcaataccaacaacttctcaaaaaggtggttcacggaaggtaattagtggtttctacggagtagatgcaaacagcaaaaacttaatgatttgaagatgtaatagcaaaaacaaaaattcaatttttttggttgtctttttggttttcatcaggtcagcaaaagatgctcttgtatattgctacaaggaagtcatgagcgggtttgcagcaaaactgaccgctgcagaggctgaaaaattaaagggtacgtacatttgttcaacaaagaaacgaaaatatgcattcacttaaatgaaaaaaaaaaaacattaaacccaatttttgattgtcaattgggtgaacactcgttgtgctagtgctgctagctgagagttgagaccacaaatctctgattacaagaaaatgaaaatacctttttaatttctgcattgaaaaatatatatatatatatcccatgaacaaccaaaataatatttgtaagttaaatgttttctgtttatatataaatgtgtgcaggtgagaaagggatttctgctatagatgtagaccacatattctccatggacgtcgaaccccatagccatggcaaaggatattaacaactagttgcttaatattgtaagggttttttctttttgttcggtaaatcactcttgtaaggttcacttgaaaacttggaaagaactaataacaaaagaaaggatgatttgaaatgaaatatattaactaaaactcaatcggtccagatttaaatcgcggtagtgatacaacaaaaacacgaaccaataagtcattcgtcatagtcttcaaactaaaattaaactagattgaaaccatttaaaaaatcatttgtattcggattggtttggtatctattttttgtgtgattattttcaaattttcattctaacttgatgtatacaaaagacatttaatttggttggtaaataaacacaaacatatctgttcttcaatttcattccctttaacccaagaagattaaaaaaaggttacatgattcatttacttaaagctatgaattataaccatatctcaactagaaaataaacttcgttttagaatgttttcaaatatttgaatgcgaagttgcgaactatataatcgactggggtacgtataggaatcattttctagataagaaaaacaaggagcaagtgcttcttgttgagctttagggaaacacaaggaacactaaagctttttgttttatactgtttaggtatagacgtatagttatctgttaattttgtgttgtcttaaattctgtataaccagatatacacatttcttccgcatatgatatttcttctttactacattaattcgactaaataaaaatgtaacataaatcaattaaaacatgtaaataaaagacagtctctaacttgtaaattgtagagaatatcaagctactacaaatcatccatcaaccagccaaaataacatatacaaaagcataaacatataatatgcccaagctcgaatcctacttattattgcaattactatgtgcaatgtatctaaacttcctaaccatgtgaaaaaatgcaatgcaatgtcaactaagcataataaaagatcccaacggtataatgatccaaggttggggagcagagagaatttgtagctaagagcttctttaaccctcaagctatggctctcattgactcaaaagggatctaatcctcttttcaaaaggctgcctctccatcatctattcatctttagtagtctctatctctatctctaagtctttttgacattcttgatctcaatggtgtccattacttgaaagaaagttattaatggatgacatataatgattatggtgaacatgtcatgagttcctcaagtcccattaaggacacgtatatcatcccattcagtctttcttttttttgcagtcgaattattccttgcttgagagtagcctataccattgatttttactttgcattgtatagtacagataattctaagtgtttgttagatacagatacaacggatcatgcatgggatgtatctttgcagaaactgttttcaaaggcatagtcaaacaaataattgatagaaagaatattaggacaaatacccatcacacgtattgacattatgttctagctgttaagttctgctcaacagattcacacaaatgtttattctttgtatggcctaaatattttattttatatttttgtcctagggaaaaattactgctatgacttgggctttttgagacgaatatatgcacaagatcattacataattgtgttttataaagttaaacaaaatcattacataatctcaaatgcaaatacaaaaacaataaacaaaaaaaaaatctatagggattgaagtatgtatcatagtcgaccaaaaccataatttgattatcacacaagaaatatgtaatagatggtataatgcatgagagtgtaaccaatttttttttttttttgcgtgtaagttaagttagaactattttggtctcatgttgtcatgcggaagattcataacaggaaaatttttgtaaaatttggaacattctagtgctaagggggcaagttaattgtgttatctactgacttgattggcaattaatcggcgcggctgagtagttggataatggaccaaattagtttcagtcatgaaatgcttccaaaaatgggaattattttataaaacggaattactcaaaccaaattagaataatgtaaattttaatatggtttcaattatagtcaaaggctcaaagctgataagtggttaacagtgtctataaataagcttacaggagagtgaataagtcacatacctcccaacacaaacaactaaaaatcgttctcaaagtaacttctctcgtttctttccgctctctacttaaccatttgaacatatatcccttagccacaaagaactaacccttttaacatataaatacattagtatacacaaacaacaagtagacatcaaaaagttgaaaagagctgtgatggacaagaaaaagtcggtatctggttcctcttcatcgtcctcttcgtcgttggatcatatttttggtccaagagtctctcactcgtattcttcatcaacaacaggattgttcaaatccatcttcccaccaccttcagcggtatatatgaaccaatatatatcatgatcatcatcattctaaaagatatacatcagtttcacgaaatttttctttgttctcaactcaaggtgacgcaagggaacttgacaagtcgaaatggagctgccaagtatcaacctacaaattttgagactccaagtgagtttactgcttactctagtgaagagttttggacgtgtttgtccttaaaatgtttggtttatatatctactatatactagaaattaacaatgagatactagttcacttcgtggcttagttattaaaagtgagaaatgtgaatgatggggtacagatgaaagaggtgaaaggagcaaaaataaggagagaaagagttaccaaagtgaagaaacacaaccaccatgcaacttgagctcatccatatactatggaggccaagataactattcctcttcaactaccaatccagatgctgtaagtccctatatatttgtgttgcatttcgacagaaacactaaaatgcataatacactaaaatggcgttttcgagaggaaaatggatatgtgagctatatataaacgcaaatgggcaaagtaatattctagattatgtgttgtcattttatctagattcatttggaattttggatatataagtctctatgtaattaactctaataaactagctaattttgagttgtccagtataagaaagatggagaggaaggtgattcggaaagtgcttcaagaggaaactggtgggaaggtaagaaagactacaaacattttctaaattctactttacatgttttatcatttatagatcttttctgtgaggaactcacttatagataatcaaaatatgcaggatcgtttaattactaattaacaatccccagccgatgagcacaataactgctaaactgctaaggtacaccgtagattcataaaactgaaagtcatgaatacttcaggattattacatagttgtataatttgcatatttttagttaaggttatattttatttatattaaccagaatagttaataacttagaaaaaatggaaactgaataccttgcctcacaagtttttcaattagtcatatatctttgatacagtttctgtgatcattttgcaggaaccttaactaagtgaatatggaagttggcgtattgaatatacctacatatgtaaaaaaaaaaaaaaagtgtgatagaatatttacacatgtcctaaaaaacgacttaagaataacaaaaaaagagactgtatagtatatcttactgtataagatatgaaatgtacgtctatataaaagggcttgacgtgttggttctttatgtttcgacaaaggcaacaaagttagactagacaagtctctttataatgaaatctacgtctgtggtctgtccaaaagtctttttatttaaaatttgatatgtaatccaatatcatgtcggatgtaattaagttatatgatagtaatcactaataaaacatttcgtttgttagtatatgtaagcaaacagtgtttttttttttacatttttttcctgcattatcacaaaaaaaaaattctcgacaattgacaacattgatgaatgattgattagaactgtttgatttataatatctaaagacgaaggaacataattttagtttggggaaagagattagcgagagcgcaaagtggtgcaaaagataatagcggcaaaacgtttttagtttttattaaactaagagacggcccaatagtccatattctgggcctgaaaattaaaaaaaaaaaacagaaggtgaataaaaaaacgccgttgccggggatcgaacccgggtcacccgcgtgacaggcgggaatacttaccactatactacaacgactttgttgctctgcttccactgaagattattatatcgttttaatttaacaaaactgtggatctgaaggacgtatcgagtacttaacttttcagccaaactaaagggaggcagagtaaatgatttatggcatttttgaatcgttttgtgacaaaattagtgagacataatttagtcgactatgactaaacttttcataactgatttgaagcataaaaatgccaaacatgaaaagagtagctaattattaaggaactaaatgaaaacaaagagactcttccgaagattcatgtttccaaggctttgaccattgacggttcaactatagtggtatgtatttgctaagaacaaaatgtctatgtcgcatgtgccgcactcgtgcgtaacggtgtactccacacatgatatgtgataaaacagttggcgtcgcacgtgctatagcatttcaaaaccgagtgaacgagaaagaatcattccttttgcatgtggcgggagatattttttgggccatcctcctctttgctttgagagtttctaaactcaaagaatctatgttttatctttggttttttattatttttcctcattgattgtttaaggtgactacatgattataactttcatatagatgaattcagtcgttttgtgaatcaaatttaggactgatcaacatgttatattacttgttaggtggtaaacctcgagtcgtctataaatatttctatagttttgtgatttatctctcatctctataatatagtgatcatttagctcttttttagtttgttgtattatttgaaaaagattaaagttgcttttagttcgtcggtcgtcgtcattagatctagtggaaactggatcgtagattcatatacaattgagaatttaagatcatgccaaaggcgattgctgatatcatatttatgtagcttttgtactttttaatagaagtggacacaatactgatatcattagtgaataatcttttcatatctttcagtctaagtatacacaaatatatcgtatatgcataaaacgaatgtctctcattttcgtaggaaagaaaacacaattaaaaagaaatatttttaaaaagcaatgtgaaaagaagttggtaacttgaggttcacgagatccaaatgtggatgaacgttggaacagctaaatccacgtaataaaagaggacgaagcttatgattaaatttggtcagttaagattctcatcctatgcaactacctaatacaatacaattaatttgtctccctcccaaattcattcaaaatttttttttgcttggttataatctatttattttgaatctggtggctataatttttcaaaaatctatgtcaagtaacgtatcttacgaaaaaaaacactgtgattaaattcatcggaattactagtctcatactaaattctacaaatagatatcattttctcttgtaaattacacaacaataacaaaataacaacaaaaatcattattttcttctcgttgcttttattcttacgaactggatactatctttcttatatgtaaaaacaacacgtaatatctaataagtaaagtagggaaagtagacttacttatgttacatagggtcccccttattaggctacatatgtataagcaggaagtagacttggcatttgaaatagacggttgatatctccctgtcactatttatccatccttatgacctttcggcgggaaattcgaaatgacatttgcagattttcttgttttttccttttctttttttgtttgtccactccacttatatctttttttcttttggggtttttaatcgcatcctacaacatatcactcggatagggtaaattgccccaaccaaccattcattattaattaataaacctgacgaggaaaatgaatatattttggtttcaaatgttttgtggaatgaaggcagagagaaagacagcttctgtaaaagcatttgctggcagacacaaccctaaacccaccttcacttgcctcacctcaccactctctcttcctcgcgcgtgtctatcacttccataaactctcattgcccataattgcttgttttctttctatatgccaagcctgataaatctcgtagtaaattacgggaaaaaattggattccacctcacacaataaagcattttacaaaaccagctttatcattgggttttttaacagattatagtattgtgggtgctcttaatatctggtacacaatagtataaggtctatcgacaatacagagtagactccgggagacaagagaagccaactaggggcacattttttgggcgtaactagacattatatattaatttaaaacttttgagtttcttcgttgaaaaacaattatagaatatagttttgtcttcaatataaaatgagaaagaagagaagaagatctgttcccgctcttttgacttaacggtgctgtcgttttcagcaggttaacctcgaccccaccctccatttttcacttccttctttttaaattattttctctatcactaaaaatatcaaaaaggcgggaaaatcacctattatccaattcagtttataaaccggtttcggttccgtcgttaacggctgattcttctgaccaatgaaaactcgtgaagtctgacggagaagaagacggaactgttaaaatccgttacgtcagacggagaggagggagagggacggatgactgaataaatctgccgaatcctgctgaattgccacgtcagctttattcaaaattctctgagtggtcacgagatttctatggactcttttttttttgttaattaaaagtttaaaaccctacaaaataggggtcttcaatggggttaccagaaaaaaccgaacagtcgccgattccttggtttaatctttgaaccgacagtgtgaccttttaattttctaacctttgctatattattatgaaaatcagatgtaattatttagtgccattcattaacgtgattcttacttataattcctctcatgaatactaaatggagtgtatataattatatttagcagtaaaaatgtattgtattgattgttggaaagggaggaaaaaatgatgagaaggatttgcatgaggaaaagagagagaaggcgtaattatcaagtgttcgatacttttgattagcccacacatttataatattttagtgtagtagtgagatttttatttagggttttaattagaacatagtataagacattggagctgtaaatgacaacttgtttgggatttagtgggttccacctgtatttctcatgcccttacacatttccacattaatatctatcttatcttataaaaaaaagttccaaagaaaagagtgagatatacatatattagcaatatgagtttaatgtgccattcaaaataaataaataacattttgaagaatattaagagtctcaattaaaaaatatttaacttgttctttagtgagttacatccatatcttaagagacatgtgaagagttgaatccaaatgataacacaccaaaattgatggtttttaaaaaatgtgaatactattactgtttttttctttggatttccaaggcaaaatagttaagaaaagaccaaaggaaaatagttttgattttcgtccatcacgcattaattacggataattattatattaagaaggaaaaaaaaaaacaaaaaaaagcagaagtgatattaaagtgcttttgagctgtctcgtagaaaccatgaaaccttaataaaagcaaccttgtcttcaacattctccatcttcctcctcacttaatccccaagttcacacttcaaatccactctttctatttctctccttcttcttctatgtctcgcctcctccctcctcatctctccgtcaaccttcctaccatggagaaaactacttcttccgagttaaccccaactcgactcggttttcctaacgagttcccttacgagttcgactctccttccttctcccctggtttcacttctcccggtgactccactgagacggaagacgaaagcagtgatgacgaggaagacttcctcgctgggttaactcgccgactcgctccttcgactcagcgtcttccttcccctctcttcaagtctgaggtaagaaacgccgcaaagatctttgctttctcgttaaactataaacgcccatggttactgattctgtagtttcttgctctgcaggagaaacgtcaagttgcagctacttcaccacagtcaacactgagtggactcggaagcttttcaaactcaggaagtagaagccctatccttccatctccaccggctcctacgtcatcatttcgtagagacaacgcgtgggatgtgatttctgcggctgctggagaagtcgctagacttaagctcggaagctacgagcctcatcaccttccccttcaaacccctgagtctcttctccgccgtcaaaacgctgccatacatgctgaactccaacaccagcgtctcatcgaacagatgtggctctgctctgctcagtcaagattcaagctctcagagaatcgtatcccaaggagagtagttaatgaagaaggcttatttgagaatccgagatacgtgagacgcaacaatcctacgtggttgcctccgcaacaagccgcagctcctttgaaacgtccttctgctggaaccggtgtttttcttccccggcgatacccatcggccgccccttccgattccctgaaaacaccaggtacaattactccaagtttgtgtttatttttaatagatcctatgtgtcagaaagattttaacttgttttattttgcatctctgtaacagtcaacactccagctatgttgcagcctaaagtgaaacctcaaaatctcaactttgatgagttcaccaatattgttgggccaaggcgtagccaattcgattacggtgagtgtctatattactcataccttaattgttaaataataacagctttttgattaaacaaattgtgtgtttgttatgatgtgaacagagtgcatgttggcgagaagtacagtacttgctcgtcagggaaatttcagagcagttagtggtggtggtcttccacaggattggatgtactgatgttgttggagttttagctgttgtttttgtcttacaagttcgaaattcggaaggagcgtcttagtttagaaggtggttcggtttaggttatagttgaactagtgaagtttgcgttctggttagtaataaggatttgaattataagaataaatttagggggatattcaagtttgtattaataaatatatatatatatatatatatttatgtatttttagttactaagaccaagctctctgtaatttttttgttgaccttgggagggtttttaaggagtggagtggggaaattgaaaatttgttgggtgggatttgttatttgtgatacataaatagtgttttctgctatttttggtaaaatctaatgggtctgtagtaaaaacatcggaattattttgtttgtttattaataattaattattgatatctttagttctctttaagtactacttcgatttacgtacctttgagttgtgattgcgcaaagttacggcttgtgacgtgtactcgttgaaattttgaaaaaagaacagtggttacagtttcaatgaactactatagtgttgtacttcgattattgggatcaaatcaaacgtgtagatacgttatagtttttgaaaaaacaaagatgcataatgacttgtaaacatggaaaaagcaaaaggaaagaggaaaagaagatctggaaagaaaagaaagagaaaaaaagaagccaaaagggttgcgtaggcgtgaagcagtgggcaatgcacagactttgaaatacggaacaactttttttctttctttcaattctgatatattattatcgtgtactgtatttggttggatatgtagattgtgtatgtccctataatttactacatgaattctgcttttttatctgatctaaaactttatacggttctacaaatcttatagtacaagtttcattatttgcattagtacaaattttattgatactttcttccaagagttatatgaatgtgtatacttgcttcctattatcttaaatcagaacttgattcgattgatattaaattgaagtaagtatatagttttagtaatttatttgactttcaaaatttcgaaaattttcagtgtttggtggttgcctattgaggttgtgtaggtcccatttagtttgttttattttggtccattgacatctcaagttgttatgttcaatttctggatataaattgtagggtttacccaaattctcgtattcgtttattcacatgttgcatatgtaaatggttcgaatttttagagagtttagagcattcaagaatagcaccggccaaaagttaaatactagtagtaggtttcaaaataatgatagaatttgatagcgttgattgttgcacacaatccggatagagccaacaacaatcacacttcttgttcaacattgaaccataatgcgttatttgctacatcccatattaggacttctaatttcaaacctcttaaagatggagttgggaagaaaaaacaaaacaagtgaaagccacaaaaatctaaagacaaaagagtataaaccatgtgttttggtttgggagatgtgaatccatgcagctttctgatttgactcggtcaaacttcgaatttaatgtaatacaagtattttttatatttatattggtaaatacatgaatcagatactggtactttccaaagaatagtgttacatacttgcattaaccgtattgcaaattcaattggatactaattcttttctttttttgtcaatccatattatattttcttgatcacaaaatatatcatagttaacttttcaggcaaaatcattctcaaactatttgtaagcacgcaggtaatgtataattcactaaaattggggatgtatgattaggagtgcacatttgaaactaaccaaatgatgttaatcaaaatcagtccaaattattagagaaactgattatattaaactaaactgtactacacacactgaattaaaatgaaatttgttttgataatagagtaatagtgttgtgtgagttataccaaacttaaaaaaaatcacacatgtgtataactctgaaactaaacaaagcaaaccagtgttaaggtttttgattcggattagttcgactctaatttgggttaacaattgttcgaaccatagtatagtagtgaaaatagccactcctatgagtgagtctatgacggtggaagcttattattatgttttggtaggtcatcattgttgtattgttgataattttcgaaaatataataattatttcaaccattatgtctctcaaaggacgacaaggcgtccataaataaatatggtagcagtgtgagtaaagcaaaagccatattcaatcttcgttatctgattcattggagaatttggattcctttctaagcaattggataatgtttcttctttttatttttctatattacaaacaaacggaaaaacttggatcacgtaaataatattgtcactcacggtgacaattttggtaagaaacaaaaaattgagatattttataatacaattttcaccagtattttatctatatagtatggaattgatgtaaaattatacagtttttgttaatacaactaaccaaatctaaataattaaattgtatacatgttatccctgaggcattttgtgggctttctaaggcctaaacttgccccatgttctggttacgatccattttaatagttctgaacttctgagaatatcctattgacctcaaaatgagaatcccattctcatacatccttcctacgaagatgcccaaaatgaacatatcctattgaagtcgaattgtcgaaaaacataaaaatcattcactttatctaaaaatgcattttttcgaatttttttatttgccttgaagaatttccccaggaaatgccagcttagtacttgtaaagtttcaatctttatgatctggtaagaatataattaacaaagagatattgaatgaatgttttgtctctaacgttagctcaaagcccttaaatcttgtctcaccatctgacttgatacaccattgtttaccattccactaaatttcgagtgagcatactcacgacgaaactgatcatcagccttcaaactctgttcagcttccttcccactcctaatccaagcagtattgttcaggtcatttgatatagagatcaattctttatctaactctgcagaagaatgttcctcataatccacaaactctgatcccagcaccgacgatgatgacagtgttgtgctgtcttgatggttgcagcaaccgtgaccgcattttgaagggataataggatcataacaaagagactgaagaaatttaccagccaatgagtcaggtcttgatgcttgaaccaaaggtccctcacatggagccatgtatcctggtttacagacactgaaagcacccattcgagccactggacgataaacaccagttttactattttgctcccgaggaggctcctttgcttcatcatccattttatcatcacttaatacaccggtttcttcttcttgaggtagatgttctttgggggatgcgtttgatatccttctgaccattgatggatacagttgatatactatctctgtattagacatcaatagaggaatcttccattgttctgctggtttacgtctaagattagagttccaatgattcttaatggcattatctgttctcccaggtaagagtttagcaatcacagaccatttgttcccaagaaccgcctgtgcagacattatcatatgctcctcctcatctgcatttcaaatcattttcataaaaacattatacaaacatgtgaaaacacataactcacacactaatcatcaaaaaccacatctctaaagaattacaacataaacatcttgaatccaagagaatgctaaaacctattaaaccatctccatatacataagaatctgattctgaagaaaagttcatatccagtaaaatcaccagcaaaacagaccaatctacaaatctctcacaaatttttcaaaaataagctaaaacaccgcttctcattagcactactgagaaaatcatatgaatcaagtaccacaacaaagatcctgaatcaacaatagctaacactagacatagataaagagaaatccagagaaatcgaccaaagcaggaatctggaatcaaggagaatcaaaaagaagatcgagaatcgtgttttaccagagaaaggttttcgtttgaggataggatcgagctgattacaccaacgtaatcggcaagatttaccagagcgacctgggattccacgggagattagattccagttcctcggcccacacattttcacaagcctcgtgagagcctcatcttgctccggcaaccaaggtcctttcactttactctttccgccgccgttcgcgtcgcttttcgctagctcggcgagctctgcctcaactgctttgtgtattgcattttcaaaactcttgcaaggattccgggacgatattagctccggcggacgagagatttctccgttcatcggaaataaaattgaaatttcaaaaaaatgaaaccaaccggggtcctctatctgtacctctctctgctaagcctaactgcaaagttaagtgggctaagaaattactattttacccttttcgctgactcacctttttttcaaaacaaaaccgttcgttatgacttatgattcagagttgaccgtttcagcttccaatttaaaaaatttattaacagcgaaagattactgataatttgatatcaatgaagtttggtggaatcaagtcaaaattaatatcaaatttgatattaatgaagtttggtgatattgatgttaaaattttatattaagtcagttcgagcaacatttacacataaactaacatcaaagtcattaacatgagaatggaagactatagtaaaacaaatatcaaccaaaggtttagaatttcgtaagttttttttatttttatttttagaatttcgtaatttagcaaagaaaaaaccagcataatcaataatctatatcgaaaaacagcaataatttttgtttgggccatcaacgatcagaacaagtaaattaagcccattttcactgtcggtaagacttaacccatgctccctccccaagcttctccaaaatcgactagtaaagttaccgacaccgggttaaacgagcatcttcactaaccagctaatatatatgctaaagtgtagtgatcgtatataatatagatatgaatatgatgttgcatatgtaacgatattataccgttctagagaagggaagagaggtagtgagcgacaagagtacaccacagtggaactggagtttttgtcctacgaagagccgacattttcatatatgttatctgcactcacttatttccaaatgactcacttttatttttgattcttatatatatatctatatcaatttcatatatacatatatatatatcgacagaccacgcatgcccattttaccccaccatttgcatgcaatatgcatgtctgcgtctacaagcacctattgatcatctactcaacatatatacacatatatgctaatatacatgtgtgaaggtttgaataagtgagaacgcacacattcttcacgaacgagcacttctgactaaatttcttaagaaacctttgaattaaaagacctactttatgtgatttcatggagcatgaagacttaatcttccatagtattctactttcatttcctaaacattgatgattcataacgactaagtgattgtagagtccactacatttcctcacacgcacatacaacataaacgcaaaaacgaacggtgcaaacattaattggcatatcaccttaccttactattttcttgactggacatccttaattttgatgagaaagacttcgaaaattataatatgatatgaataaatttagttgtaaattttttgttagaaatatcttacaaattcctaatttaggatattaacgatgatgcataatcttgacttaaaaaaaaagaagaagctaagattctatttttttttgcttgcatgtgaaaattttgaagggagaaaatgacaatcatgtgatgcctataataagccagagcattattgacatgtacaatgcaaatttgtgcgtgttataacaattccctatgcattatatataaatgatgactatattatactgatatcatgtctagacgacagagatacgttggatccatgtatatgttaagaaaatttaggggtcaatcatatgaccatatcgctgacctaaatatgtggagaaaagatttaggtttcaaagtatcattcaaaaaaaaaatcaaatatcatttgacgttctttgtgtatcaaatgattgcaagtattggtttcacactatcataaaacaaattttaaaataacaaattatcatttgacgttctttgtgaatcaatgtggcgttgaactaaaatcatatttgaagagtctatatacgaagggtttgatgccaaaatagaaggggaacattgatggaccacacttctccttgtattattaaaataagccaacaaaatttagtaaagacgaaaataaataatagtgtcacccaacttgtggggaatatatatctaaattttgctgtgatagagcgtgttttgtttgagtagttgatttctcaagtaaatcacttgctttatagtaaaagagaaaaacatttagtcattttgacctactacgtacccatcatgaacactgtgttgcaatttttaagagtccattaagaaaattacaattttgtgctcatctatgcatgtgtcaaccgcaaaatcatcatataattttactagctacagtctcatcaccatataaccactaatccgtttatacttattaagagcccatacaaaaatttgtacagaaacgtagacgtctggtttactagctccataagtcaatataaaaatggaaaaccaaaagttggaaaataatataaaaataaataaataaatttgaagggtcagaaagtggaaactaaaagataaatgagtattatttaaaatcaagaggaacacgatccattgacaaaaaccacattgctctcaacttttagagtgagagagagatagagagttgaacaaattcttcatagcaactagaggaaggatccaaagggatcgcattgatcctaattaaggtgaattctccccatattttctttataattggcaaataaatcacaaaaatttgcttggttttggatcatgctatctctttggattcatccttcggtagcttcctcttcgatcgtatggcaaatttctcaactatcatggatacttcaccgggaactttgctggctttaagattccgcaaccttgtatctcaagcctacaacagtatacgaactctcttcttacaattttcattttttaaaaggtaagtttcaaagaattttgacctaatcatgcaaaaccaaaaaagaagaagaagtcacctacctgtttttttttggctttcttcttcattggattttgagatcgaatttccaattaaaaattagcttatgaaatttatatattttatgaaagacgtcattttaaagttagtttaaaatttctctgaaatacatccatggctatttccgaaaacttttgttctttcaatatatgtatatatatatatatatatatatatatatgtcatatcaattatttccccaaatatatggtagtataacttaaaattacgttcattcgagactatgtacttcatgcttacttggtagtttgaaatcccaaatcccaagtcgttggatctcgtaaaatagaaagaactttgactaaacaaggacacatctattggttaatgtaggacttagaacaatttaacctcttaccctaatcaaattcaaatactcagtttgttatatacaatggttaaatactttcttggctctaatcgggtgtttggaggtctgtagcacctttacacattttttctttctaattactaaaaatcgatattttgtaacgatctatttacactccaaattagtaaaatccaactatttgaaaatagcagctcaagataaatttgaggacaacatcattagttccattccatggttgactaaatttatttgcaaacatggatacgcatatcgtacatacgaaatgcatatctctacctactattcgttcgtacaatcatttttctccccatttttatgaagttataaaattaattaaaaaatttataaaagaaggaaaagcacaaaacacctaactgaattaaaatagaaaaacaaacagaatcatgggctcagcttaaaaagcccagtatggactatgggataggaatataaagactgtggagatgggtggctcctaaatgtgaacaacccgtggatatgtagacagatactcgtcttgagagtgctcctcatttactgccagatgcaattaagagtgctcaagtggcctctacatcaatcatatgtcttgagcttgaacatatggttgcgagggagggtcaaacactatttcaacccaatgaaactggcagagaagcggtaaaagaatgttttgaatggactttcaaggactcaatcatacctcacttgcacaacccaaatttttcgaacccaatattttcagatcccataatgacctattacccattcatcctcatgcacatcttgattcaaaactttcttgtgtgcaatttttttattacgttttattacaatgtttgagatgaaaatgattggcatctacatatcatatcaatcaataattgtactcataaaacttttgttagtcaaatttttaccaaattatattcctaccaaaataaagatggtccaaaagatgttttctcctttctctttcttttcggtgttaaaagtaattcaaagtttgcttatagaatattctagactttgttgttgtgaagtgaccttgaaactaattgcgtccacagcagtaagactcctttatggtccattattaaggcacttcacagcatctagggtataaacgagatatacttattcctaagtaatttctcaactatcatatagaaaggaacgtttgttttatgcatgttaatattactaccaagtaccaacatctaaagcggtaactcaactgcacgagtgtatgatcaatacaatatcagtaatattagccaaatcacaatttttgccttaaatgatacaggcttttgtaaccatgtaaaacttttttttggaacttaactcaatctaaaattgtcatgaatatgttcttttttcttcaaaaacaatattcatctagaaccccacttggaacaaaaactactgttaaagaaaaggaaacttcactatagtcgacaactcgatatccacatctaaatacttatttataattattttattgattggtaatctatttgtattatattctctgcaaagaattttgttttgtgtcatggtcagtgagtggcatatgatttcagtaaacacaagtcacttattatgcaatcatgtacagattgattcaaaacatatccgttaattaatttgaacagttggagatgtataaagtctgagttggtacttccaaatggtttaagatttataggaagttgtgtcctttctggcttctgccattaacctcagccaatagactgtaacttgcatggctccgcctccaatcaacttgctctctagaatatgttgtactattaaattaaacaatatatcgataaattcgatgaaaatcccaactgtaattttttctcatagtatcaattttaaactttactgtattttctaaaggcaaaagaactttctattatagataaaaaaaaaatattaaaattgtgtaaaagagaatgtattgaagttttaaatgatcgagagtcaaagacattatcatttgactagagactaaagatgcacattctgtaagatgttaacttaggtataaactttttttttaagtgtgatgtagaagttttccacgcatatcgatcagcttaaccttttatttaaactataaaacaaatcactatcaatagttttacttaacgtgtttccttctccatatcaaacttatataaataatctaagaaaaaccataaaagccaagtacaaacgtatataaatcgggtatttctcaacctagatatattttggtaaagtattaagaaaacaaaactgtatccaaaattggtagcttgagaataacatataactaaattaatatcgtaaagattgagaagatcatcacttacaaacattcaacaaggtagcttcgacaacaacacaaatctaatgtgtttagatggttccatatttttaaataaaaaatcagtttgcaaaacaaacaattagtactaaaatagtttgtttttttctcacttaaaatccatatttccctagttcacgtacattttcatttattattcgtcagcaaaattattatatcttcttgaaatgatgaattcaaataaaataagcaaaacttggcaaagactcaaaatagcacaactagacaaaaataccagctaacagaaagtaataagaaaaaactcaaataaatggaaagacattaataaggcagatatatgtttttttatattataaattgtttttttttatagtataaaaataaaaatatcggcattcttataggatcgatctctcatgcaaaacaacaaattcagacaagaaacctcaacggctcagacccaccaataccaattttttaaagagatttctgtcacaagtaagaaagaagcactaattacaaaaaaaaagaaaaagaatcaatcttttgttcttcgattcgatttctaatcaattagattgtttttgttttgtttaacatcagttgcgaatcgagctggattcttgggctcgctttttctttcaatcaaaagtttcgatattagtgaaggataaaattcgctaaaaaaagagaattttttttgttaaaaaaattataaaagctggctttctcaaaatttctccatgtggtcgacgaagaagacgaagaagacgaagaagaaagagaaagtctcttagcaaacatgaccgccaccgaagctaagaatcgcaaaatcaatgtcggagatggagatgacgttgttgatatcgaaatccctgacactgctcatcaaattagcagcggtttgtttttctctgttccaattgttgttttgtttttcaatctggtttcgataagaatgtgtttgcttagatgtgtcgaaaaaagttttgttttttttaaatgtacggagattgtttccccaatttcaatttctttaatgctttttttgattaaaatatgaaaatggtatcaccaggaagaagaagtagaatctgactacttcaaaatgttgactttgatgattttaacgatgacccttttgaaaaaatgttttctttaatgatcctggaaccataagattgggaaattttcttgctttgccaaaactctgctttctataaactgagatcatgttttgggaagcttatactatgttttgtggaatgtgcagattcatggtttcaggtggcgttcgttttgaccaccggtataaacagcgcgtatgtgttgggatattcaggaacaattatggttcctttaggttggattggtggtgtggttggtcttcttattgctactgcaatctctctttatgcaaacactctaatagctaagcttcatgagtttggtggcagaagacacattcgctatagagaccttgctggattcatttacggtaaataaaagaccaaaccagctctcttaatctcttctctgttgttaccttcattggaatgatctctctttttatcaggtaggaaggcttatcatcttacatggggattgcaatatgttaatcttttcatgattaattgtggattcattatcctagctggttccgccttaaaggtagtaaaacattttcttctcttgattcttgatttcgttagacgagttagttaattttggttgtgtgttctgtttctgcaggctgtttatgtgcttttcagggatgatcataccatgaaactacctcattttatagccattgctggtttgatttgtgcgattttcgctattgggattcctcatttatcggctcttggggtctggcttggagtttcgaccttcctcagtctcatctatattgttgtggcaatcgtgctatcggttagagatggtataactaatcaaatgatcatcaagattcaacattactaatgagtttaactactgcaaaaatctaattcttgctttgttttgtttgtttctaggagtaaaaacaccttcaagagattacgagatacaaggatcatcattgagcaaactttttaccatcacaggagcagccgcaaatctggttttcgcattcaacaccgggatgcttccagaaattcaggtgacttttccctagacttcaaagttcaattgtttgtttgtgtttgcttttatgtattagtgtaccttttgttcaagtaaaacctgcatcttaaacaaagtttgtttgttaatcatattgacactataatttccacaatgttaggcaacagtgaggcaaccagttgttaaaaacatgatgaaggctctatactttcaattcacagcgggtgttttaccgatgtacgcagttacattcatcggatattgggcttatggatcctcaacctcgacctatctactaaacagtgttaatggcccactctgggtcaaagcccttgctaacgtctctgctatccttcaatctgttatctctttgcacgtaagtttcttagcgccaagtctacgcttttttaacaaagactgtcgtctctaactatatgtctgactcaattctttgttgtagatatttgcgagtccaacatatgagtacatggacacaaagtatgggatcaaaggaaacccatttgcgataaagaacctgctgtttaggatcatggcgagaggcgggtacatagcggtaagcacgcttatctcagcgctgttgccgttcctcggtgacttcatgagcctaactggtgcagtgagcacattccctctcacattcattctagccaaccacatgtactataaggcaaagaacaataagctgaatgctatgcaaaagctatggcattggcttaacgttgtcttctttagtttgatgtctgttgctgcagccattgcagctgtcagactcatcgccgttgattccaaaaatttccatgtttttgcagatttgtaattcattatattatatagtcaattgtgtatcctttattcttaggcaggtttatttctcctgtaagcttgtattctctctctatttgtcttaccattagagcctaaataaataaatcaagttctaaaatctaaaaagcatataaaagaccactttcatcataatcattctgaaaatttaccaacaaagaatactaagttgcatgattaaagtctctattagaaatgtaaatcatagtattagagaagaacataaaaacacctaacttaaaaaaaccttaatttagtgagatagagaagagaagaaacagaattgttgttggtttaacaaaaacctaatctttcaatgattagctgtttaatttgaaattataacaataatttagacaggccaaagtggaaccccactgtctccaccaaagctctagataaaaaaaaaaaaacgaaagcgttagatattttttatcaatcgtgctccgtaatcattacctttcttcttcatcttcatcttcacgcagcgacttctttgattctctctttttattctcagctccaatttcaacctgcatttctctcttctcaattttgggtttctttttttgatatctcatttgatcagatcgacgaagaggtaaccattttgccgtttgttagttcttaacgattttattctgttaaaaatcagatttttttttgcaatgcttgtagaaaaagattcgatttttgtgtactgattgaatcaaaatatgtggttatggatccatggattgatttgtttgaactgatgcaaatggctaatgtgaaaagtcaagaatgtgttaatgtagttttttttgttaaacctctttgtgttgttgggttttgaaatgttgttgttacagaggaagaaggtttgagctgagagatctttggaggtagaaagaagatctcaaaaacgatgtcgtttacaggaactcagcagaaatgcagggcgtgcgagaagacagtgtaccctgtggagcttctctcagctgatggaatctcttatcacaaggcttgcttcaaatgctctcactgcaaaagcagacttcaagtcagttttcctcttttgcctttcctaaatgtagttattagtgttttgagagtttcatttagatatttagctagagagatacttgatctgaattggtcttcgttaaagtgataaagttaaaacgtgttgatggtttctgaacagctgagcaattattcatcaatggaaggagtggtgtattgtaggcctcattttgagcagcttttcaaggagtctggtagtttcagcaagaactttcagtcacgtatgtaaaactcttttcttcaccttctggtccagcttttacatgtggtcactttaattttaatcttcaaactttttttttcctttcacagctgcaaagccattgactgataagccaaccccggagctggtaaacgcttcttaacaacgatgtttttatttagttacacgacttgagatacatgactctatttctcttcttggttgttctcagaataggacacctagtcgacttgctggtatgttctctggaacgcaagacaaatgcgctacttgcactaaaaccgtgtatcctatcgaaaaggttagtatacatttaagcttgtatatgtcattaccattgctttccaatacacttttgtgttctctctgtgattgttgtcaagaaaatcacagttaaacttatttggatcatttgcaatatgagttacatggatccgaatcacataaagttgagatctctttaatacagtcaattcttatatctcattgttctgttttctaaaaattgtaggtaactgtggaaagccagtgttaccataaatcttgcttcaagtgttctcatggaggctgtccgatatctccatcgaactatgcagctctagagggaatattgtactgcaagcaccatttcgctcagcttttcaaggagaaaggaagttacaatcatctcatcaaatctgcttccatcaaacgcgctactgctgctgctaccgcagctgctgcagctgtagcagccgttcccgaatcttgaattcaaattctctttatttttgtgtatgtgctgtgttgtttacatgtattcgatatgattcatgttctttgtcttccataattgaaccaggcataaaattctcccagttttctctgagtttcttgtttgtgatactactacatctataataaccgaggacttttggctttgatcttggtcttttgagctggaccgaaccggaatgttagaccggacaaatctctatcgttactcgtcgttagtcatctccggtccggttcttcactaaagttaaaaatccagttaaacagaaatcaattaagaaaacacaaaacccaaattgaattgtgtaaagatatgaactttacaaaagaaaattgtcaatttcgaaaaatgttgagcacaagctctgatcttcatggccgtcttctccggtgagtgacatctctctctggcctctgtttttttggcctttaagtgcttttttcttgaagaaccctaattttgatttgttttgaggattcagattatcagaaccaatagcagagattcttagacgtacacagtacacaccgcaagagagcagcaaagtatccaccaaagatatactcttgtccttgttaccaaacacttcgtcttctcgtctcgccaatgaagaatcgatcaaaagtctcgcgcttgcttgtgcccttctcgcttcttcacgttcatccactcacgaacttctctcatggattccagaaaacctctctgtcatgggggaatctacattttgggagatttcaagggattgtttcagtgatttttctagcaacagtaatgctgagaagcttgtggaattggtagaggatagtgagaagatcgaaatgttgccgatagttttgccggagttaaaagatggaatcgaaaagagttcacttggtaaaggcagtgatgcagaggatgtttcagctgcaatggctagaacacctgttggttatgctatacttgctgctcaccagctcaggtggtttgttactcaggtctgaatttctaaatattgagaaattgttctgttctgttgtgaacatatccaactttataattttggaggtgttgatgtctttttgtaggttaaaaaaccgaatttggtgaaattttgtaacttggtggttccttgtgctttgacagcacttgatcattggtctcctgaagtcaaagtaagtctttggagatgtagattttgatggcgtctcttttgttagttgtgtgacttgtaacatcgataacatgttgtgtgacttgtaacatcgataacatgttgtgtgacttgtaacatattgcaaaatttaagcttttatctactcgtatcttaaggtatagtgagattgatgttctatatttgcttgatgacaggggcagggtatgataacctttgttcatcttgctaaaaatgtgagttccggtgatcttggtttgtatggagatgtggttcttgatgcgtgttgccagaatatagcttccgatgatgagatttggatacatgtggtagagttatctgtgcttcttgttactaaaatccacccaaataatcctcgaagcccgtggtaaatctttctttctcttatcaattggcataggttcagaagattgagagataaggagaaaaagttgctttaaagatcgttttcatagcgtcttctttagtttctacatttcttccatttgatgacttttatcattctcaaaacccaagtggggaatttctttgcactgcatccagtttaactccttttaagaagatcatgtcatttgacagattggtttgatcgttccatctttctcagctctattttgctcattttgagttttttttttttgccttaggtatgagaagatcatgaatgagatgctcgggcatttggaacgccaaccaagaaataaggagcgacgtatcacttggctaagatttgttgagccactcttgaactctctagggcttttcttacttgctcattttcgacgtatcttccctcttttctttcagtggatgcattcagacgacgccgaaacagttctgttggtatggtcttgtttcaatcctcacagtttataagaaatgttagatttcccaactcattttggtattctttaagataaacatgaaagtttcattacctgctaataccatataggttcttgagagactggagacagttgtgaggttgacgtggattagacactcacctgtgttcccaaggtttaagcctctaaacacttgagagtagtaacttttagatgcttcaactcaaactctttctctcttatccgttttttaacattaatcatctcatgattttgaaccttcagattggtggatgagcttgtttccttgtacaaagagtcatcgatgcgtaaggatcgcgatgatattagacctcttatcctccgtatcttgatgctactccgccagtatgtttctgtggcttatcaattgcactaccaaagattgttcacattttcgctgttttatttaataagctccccccactttctctccacaggtgcaaaggtctacggtttgagtcagcgtggagtcaataccaggaggatccaaatctgagtactgttagtcaacatatatggactagttcaagttgatctcaagagcgtatgtttgactaaaacagccatttttttttctaattttcgatattagtttggtctaggcctagtgatgcaagtaattactggcgaatcctcgaatttttgtaagcatttggctcttgactcttcttaagctaatctgatttgatacacatactcttggatacatgaccacccactgtgtgatgtgatagtgacaacatgagacattgaactattacaaaatgtctctactttatctttggaacatataaaactatattttacagaaaactcttgaaaacctatacacatcaaacttcatgatctcatctttcattgtaatccaaaacatcatcataggtaaggcttggaagtttgaacagacgcttgctttgccaattccactggcctcttaacacatccatatgattaccaatgactccaattacgcggtgacctctttctaactcttccttttgtcttgtatcttccctgctataagataatataacctctggctttatgctactttgatgtgaataaaattagtagttgtaaaagcttattgcaaacctcataatcaaatgtgaccagtcgctgtatcctctagattttaactgctcgattgtggcgttccgctctgtttcgggtcttcttgataatagaaccattgaatagccttgtgatctaagcttagaatatagtgcaagtattagtatgcttttctgatgctttgcttcttcaatatacttcatgtagtaactatcttgttctaatctacataaagagaagaacaagaacgttaacagtttaaaaacttacaaaatgttaaatgaaaaacaaaacacttacagattggtgtcatcaatatcgatcacaacaacatcgcagttatcattcatcggtttgatggtttggaaataagtgagagccatttgaatagtgaagtttaactctctcaagtaaattccttgtttgattctgtgtaaagcaacatctctacataacagtggtaattcactttcttcatccaagctattgagctgagagtgtaaagacaagattttacagtaaccgaaactctcatcgagtctttgagcctcgacgattgcaatattccggttctcacagctttgtaacatggttgataaagcaataagaagtgttatcatcaaaactccaaatgttactagagaagctatgaagatggaagctgctaaagatgtcatgtaacatccagattctatcgaataccgactccccaattctgcaagataaacaagaagatttatcaaattcaagaaaatcattgcaataaatcaaactaaacacagatggtagaagataatgaatatattagtacataccggaattgcctcggctggatagaccggagagctccctctccatcggatgcgtataagccgacattttcaccttcttgtctaatcaaacacttacgatgatcataaaaacatcatctatagttttagaagacaaaagagtgactactaagaaagaaaaaaaaaagttccaaaatattgaagatattatggatattgttttgatattttccataccttgtagaagcttcaaaaccaaaacgaatctttattttgatcaagatccgaaaaaaaatccaaaggttcaaaatctgcctctttggtcacaagaaaacagagaacatataatacatttacacgtgactttttttttttgtgtgtcatcagatccaaagttgatatgcctcagcttatcttctttactcgatcaaataaacttctcttctcttcaatttttttttaaaaaatcttacactagtttattttattttccaaatttggcggagacataagaaaaaggaatcagaccaaacttttctttatttagctgctgatagatcgtttcatcattcctttactcgattatacaattatcaaatatatattgattagtcaacacaaaagtgaattattgaattttatgttgttggacaaagtaattttaacattctagttacaagtaaacttgcaagatggatctatatatagatggaaagatttgtgatgtgaaaaacatctactcgtatcgtatgttataacaactcatacggttgaaaatcgtgtacagtaaaacctctataaattaaaaatgttgggactgctaaattttattagtttagaaagatattaatttatgtattatacttttagtatattgaaccataatttgtacgtatttgactcttatgcatttacgacaacaattttttaaaccctatatatgttaacaagtaaataagtcattatcattaggggtttaaatatctgaacttgaagaatttgtaaaacggttctccgcgtcatcagtatgtataatatggctggccactccttagaccgaagagctcgttgtataatatgttttattttagattttctcaaatctcgcggagacatggaaaatgaaatttattaaatggatggagcaatttggtaatttaatcagtatgtctgtatgtgttttgtaatgttatagtttaagatatgtatcacaatcatctatatgtgacgtatacgacaagaatttaactgtacgtacgatacccttataattattattcacttagatttttgtttgtactttagaagaatctgaagaagggtcccggcgtcaccatgcatgtatggtcactccttaaaccagagattcgtaaataattatattgtagtttccattgttattgtcgatttatttatggtccccaatgttctcttggagtcgagggaccatacatttagcttcaaaaatcttacgattaggaaacgtgtgacaataacatttgttttgttagctacaattcctaatttcctatgatttgtacaataatttaaagattaacacagcttgtgggatgcacatggaatttgtctaatagaatttagttccatcatatttgcatacaaacaattgtcacctattaatactttcattattactttcgatgaaacattgttattgggtatataaattaaggcccggccctaaagcccatttattagccacgtgcagtaacttattatttttttcacttatcaatagtaaaaaaaaaagatcaaaatgatcactcttttgagtgtgagtgaacacacttcgtcgtctctctttcactacttttgagaagctctcttcttcgagcttccatggatgcaatcaaatgcagttccagtttcctccatcacaccaagctcaacactctcttctctaatcacacctttcctaaaatctccgctcccaatttcaagcccctcttccgtccgatttcgatttccgcaaaggacagaagaagcaacgaagctgaaaatatcgccgtagtagagaaacctcttaaatcagatagattttttatctccgatggacttccttctccattcggacccaccgtcagagacgacggcgtcaatttctctgtttactctacaaactccgtttccgctaccatctgcttgatttctctctccgatctccgtcaggttcaatcttcaaagcaactgtttttgggtttcactgacattttcatgaaacccctttttcaaatttgggtttaaatttcacgttgcagaacaaagtgacggaggagattcagcttgatccatcaaggaatagaactggccatgtttggcatgtgttcttgagaggagatttcaaagatatgttgtatggttatagatttgatggcaagttttctcctgaagaaggtcattattatgattcctccaacattttattggatccttacgcaaaggtagttgaaaaattgaagcttttttctagcagctgaactacagtctcatagattatctcttttgttactttggtttggtaggcaattataagcagagatgagtttggagttttgggacctgatgataattgttggcctcaaatggcgtgtatggtacccactcgtgaggaagaggtaccaatgatatttataaagctctagtaatagctattggaggatataaagatattctttagcgagtgattttattgacctttgttactcttcagtttgattgggaaggggatatgcatctgaagcttccacagaaagatcttgttatatatgaaatgcatgtgcgaggttttacaaggcatgagtctagtaaaattgaattccctggcacataccagggtgttgcagagaagcttgaccatttgaaggtacttgctctgaaatatatacagttgagaaaactttgaactgtcattttggaacaagcttactaagtagtctctagctgaaattttgagatgctgctaactatatctgtagattttttgttaaaatattcatttgttcagcactgaattcgtcctttctgatcattgtgggacaataatattcccagtttatcaacttccattgtggtatggcgtacataatgctatcacaaagtcatcatgctttttaaaaagacaaaaaataatcaaaatcgtgttttggagtggctatcagttgccctcattttgaaaagattctgccttgtttaattcagacgagttttggtgatttaggccatttccattttgttgttcaaaatgagcagagagtttatagttttttttgtcccttttaatagtgtgtgatttgctatagctcttatctaattgacagtaatatttgtttacatattgacaggagcttgggataaattgtatagaattaatgccatgtcacgagtttaatgagctggagtattacagctacaatacgattttgggagaccacaggtatgacatttgaccagatgcctttgaaatgataatacaacagattttgctatgtaagttttttttagtgacatttgggatgagcaaactaaatagtagaaccacttgtcgttaacgtctgcgagtgttagcatgtatcaattaatctcaagaaattcttcatctaggattgttgttttctcttccgattaatgaggggtgaaacaacctacagatgatatcacatatctggaatagatagattgagcaagcactcttacatgaaaccataccattttataattttcacgaattgagttaaatgttgcatatagcatgtctaatctggctatcttgctatttcagggtaaatttttggggttactctaccattgggttcttctcgcccatgatcagatacgcatcagcaagctctaacaattttgctggacgagccataaatgaattcaaaattcttgttaaggaggcacataaacgaggaattgaggtatcaactagtttccaaatagcgaaatatttgttgttaggtttacggatgcagttcttgacagattttaagcaggtaatcatggatgtcgtcttgaaccacacagccgaagggaatgaaaaagggcccattttctcatttagaggagttgataacagtgtctattacatgcttgctccaaaggtaatgctcatcaagcagtaatgtgtttcttttcgcgagtttcactgcttagagaacaagagacaagcaaaagttctgtggtgtatgaatctgaaatataggactcattttcttttgccaattaaaatatacagtacactcaataaactaagtcactttgctgattggaaattctggtagttggtcggtccagtaacttattatgcgtcagaaacctgtaggagccttcttttggaatttctgcatggcctttacataacttctctaggactagcaaagtagaatacattcccaacaatgatgatataaaagtcaacacccataatgcttttggttttctagttttgtagtctcctactgatgattctgatatcattctttattaatcaatctatgcatattttgtaatttaacagggcgagttctataattattcaggctgtggtaatacattcaactgcaatcatcctgtggtgcgtcaattcatattggattgcctgaggtagatcccaaaatagggtagacgtattgcttggctgtttgtcaaattaagtctgttatattcattgttgtacttgcaaactctcattgtctcgtcctactcgttaatattcctctggtttttatgtctaatgtctaagccttatttgtgacataaatatatttaggcaatttgttatgattacatctagaatacactgtaatcaacatattcttggatactttattttgagtttacctgctttctgactactaaagaaaccttacactaggttgatttctgaaattaatgtatttcatgatattctcctcagttaactcttcctaagcatgtggatatctctctctctctttaaacagatattgggttacagaaatgcatgttgacggcttccgctttgatcttggttcaatcatgtcaaggagcagcaggtgcaaatgttctagagtacgtcaaatgagtgcttgtttggtccatgtgtttctggaatatttattgttctattcttgttagcctttgggatgcagccaatgtttacggggctgatgtagaaggtgacttgctcacaactggtactcctattagctgccctccagtaattgacatgataagtaatgatccaatactccgcggtgttaaggtgatcaactagttcccttgatatgtccccttcagatagcgtcggttttccttgtttagagtggagaaatgctgactacatgactactattttatctcaatccatgaccaaactttaaaatctcccaatgtgattaggcaccaaaaggttaattagcgtacaacatgttttatttcttcttgttgtacttcagcatagagcttcctttgtgtttttttttcaagtcatgtcataatctccagatctaaagatgattgttaaaaagttgtcattttcttgatggaaatacattcaccaatgtaagatctttgacgatgagatatttatgtgtttatgttgcttctttgcaaacagctaatagctgaagcatgggatgcgggtgggctgtaccaagttggcatgtttccacactggggtatttggtctgagtggaatggaaaggtcagttaatgtattacgaggataaaatgcttctttcaattgtttgagacatgagatatggaagagtaagtgtcacagtgtataagggtttcatgccaaatgtgatgtaattattagtggttattcatctttctgctgacccttagaatatgctctaatcaattgaaaatgggacagcctatgtgatctgcctgtactagctaactgaagtgtatagtaacctactagcctgtattagcaatgaacatggaagtcttaaacttactatccaatagacaacacatgagacaacaataatgaatattcagttctcgtggtagttcccattagtgtgtgcactgtgctggatatctatcttcgttgtgaatttgatatggtatagtaacatttttgtccatttcagtttcgggatgttgtgagacagttcataaaaggcaccgatggcttttctggtgcttttgctgaatgtctctgtggaagcccaaatctgtaccaggtaaatttaactcctattatactggggtatctggatatataactaatctttatggtgttctcttggttgttttgtctgtgaagcttcatattttggttgtatatcttatcgatatctgattgtgtctgtgcatcagggaggtaggaaaccttggcacagcatcaattttatatgtgcgcatgatggttttacgttggcagatttagtaacttacaacaataagaataacttggcaaatggagaagagaataatgatggagagaatcacaattacagctggaactgtggagaggtaagatattaatctttgttttctctttcatcagctatgtgaattcagtctcatattatatcatacgactttttgtagaatgtttataagctgaaatgaaatggctattgcacttttacctaaactaaaaaggcttcatttgattgggctgcaggagggagactttgcgagtatctcggtgaagagactaaggaaacgacagatgcggaatttctttgtttccctcatggtttcccaagtaaagctaaccatttgttgcttctttaattttaattcctgctcaaagctcgtttcactgatgttatgcacattgaactatgatactggagtagagggcatgagttcaaaatataaattaataagccacaagagaatctaaatccactagcaattaagtactatgcactgtttgtttgcctttgcaacatgttaagttgtgactggtaatggcatggtgtcatgcaaagaatatgtattaagggtactgctttgtcagattgtgatgctccggttttcattgaaattagtgtattgcttaaccttttccttttctgtctttctgaactattaatcaccagggtgtcccaatgatttacatgggagatgaatatggccatactaaagggggaaacaacaacacgtattgccatgacaactatgtaaaccccttatgctttgcttccagggtgattataagtaattttttcgatcttagctttccgacattaacacaactctgatgcagatgaactattttcggtgggataaaaaggaagaagcacattctgacttcttcagattctgccgtattcttatcaagtttcgtgagtatgtaatcttctttcatgagtctatcgatcttaattgcttagttgatcgcttcacttagtctcaaatccaataattgacatgcttcttccttttcacctactgctatgtgttttctttcttttgcaatcccctgtttctcgggtttcctctgatcgatggccattatgactgtattgtagtgaatgtgaatcacttggcttgaatgatttcccaacagcaaagcgtctgcagtggcatggtcttgctcctgagatcccaaattggtctgaaacaagtcgatttgttgcattttcactggtaccattttctcataccccttctcttacatggacagtttccttagtgggtgatattaatcccttttgtttttcggtaggtcgattctgtgaagaaagaaatctatgtggccttcaacaccagtcatttagccacacttgtttcgctaccgaataggccaggataccgatgggagccatttgtagacacgagcaaaccgagcccttacgactgcataacaccggatctcccagagagagaaacggcgatgaagcagtataggcacttcttagatgcaaatgtgtacccaatgctcagttactcatccatcattctccttctttcaccaattaaagacccctgagtttgcgtgattcctccaaaagcgtattagacaaaatcacaacatatgaaggaatcttctcaaatgtgaatgagatgcatatacagacaactatttcgttacctatataatgtattatagtaaaggttccttttatggttagaagaatctgaatggggtacctttggtcggcttcagatatgcccactcattgttaatagattcctttatcgtctgttaatccaatcaaaagcttgttacatcgttttcagaattcgtgtaagaacaagaaatcaaagttttcatctataaagttataaatgattattagtactctattatttgcctttttactaatgttatcaaaacaatcacaaccacaaataaagtttcagatgccaatccaaacaaatatagctctcagaagtcaacaccatggacgataaagaaatctctcaaaatcttcggggttttattaaagaaattaaagtaaacagacccctgaggaaaaataaagaagtaatgaccatacaacaaacaagactgactctatgtaatctcccaaaaacatcgacgacacaacatgaaacaaaaaaagaaccaaagtagtatagtacacagtttgtggaaaccccaaaactcgagactaaaaatctttatatacaaacctgttttttgggtcatatcatattggctccttcaggactctaacagttgttggacaatctgttctctggccagccagagagtagtaagccaatatatgagccggatgctccatctctcttatctctccttgttgattcacttccgggactcttcttgatggaatcagctcgatgttccagtacggtctagccatctgcattagatcttgtcccgtcatcgatgctctgtaaccttgtacccacaagtatctcagtgaaggcaattttgtaaccgctgcagcgattgctcgctcactgaagcaacaacctctcatctctagcttctgtagatttggacagcctcttgagaattccattaaaccttcatctgattcacctacgtaacccagcagcatccatctcacgtttggactgtactgtccgatgtagcttaagcccaagtcggttaagccgccttgtctcagatagaatgcaaatcgtctgagtttcttgcatccaatcaaaagagatcggactccgttgtccagtggcagatctgtaatcctttcttcccggtcgagtaagacaaggcggaagtcacagaggtttttcagatatgtgcctatgctttcaagagattcgttagttatatctgagacatacaccgccatgtattctagctcctggcagccctgagccaaagcgattaatcctctttgtgagactaagccttcttcgtcctccattccttgttcatctgcaccgcgttcaatcctcagccgcttcaactgcttacagtactgtgcaaggacctctagacccctatctccgattacattccttgtctgaagaaaaacaacaagtgttgtcagtcttatatagatgtaaagactaaagagaaccaatattgcattcatatcccttatctccccaaatatttcgtgaaaaaataggaacacaatttagtactaaggacgcattcccaagtatgtagtaaagacagcaaagttaaacgtttacctcgagaacttccaaattaggacacttttggataagcgtacaatggtcttcagtttctagcaatgcataaagcaaatccagctttcggatttgggccgcgaatggaaatagtattggcatttcattaggtcccatgtaagagagaccaagccgacatagttttcggggaaaaaccagattcatgtacttctcaggcattccaatatcctcattcaaggagccaccacaaaattcttcaagattagctgcagccttaaagaacccaactagttccaaaatctcaaagtcaccgaccttcacagataccagagagcggcaatttctagctatggtttccaagtctttgggactgattttggcaaactccgtcatgtagaagtttaaaacctcaagagatgtgttgtgctgagcaagctcatgaagccacttaccatccttttcactaaaagaactctcttccattaacaaagtttttattttcctggacaagacaacagacagttgcatgaataaagtgagaaacaactcaagatatttggatttcccgctaaaactgaatatgaagaacagcagcagccgaatcaaggattcaaaaaccaaataatacacataaactctggcagactgaagatgtcagaaatcaatctttttgctatttatgcataaacaaagtgaatgttccccaaagagggaaaaaattggttgtagataaaatccggatcaaagtttatacttccccaattgagaaataactgaagatcattgcaatttctgctttaatagcaagcataacagttgcaaagcaattaaggatataagacaaacatgaacgcctaaatactgaaactttctgaaataaatgtttctgcttatattactcttagtgtaaagtgtactaagaaatcaaatgaagtaaggttcaccaatttcattaaggacaaaaagtatccaccaaagttacaacttacccaattgagctaaagaagatcaaatctttacaaacacaaactcaagatatggttctttgtacaacgacgacttattaagttttttaaaaagagccaaatgcatctagagttctagtcaaagtaggaaatgataaggagtcgctaaacctcaaaagcatcgagccaaagtagctacaagatactgagaagtaagtgtacctgcagtgtgtaacgatgctcaaaagtccatcagtagtaaaaccagaacacttgtctagcttcaaagtctcaagatcatctgctctagctttagctaaacgatctagatctaagtcactgacaatcatccgtcggaagtgcaccgatttgagctgcctaaggttgttagaaatctcagtaacccaaggagtaacataacctccccagttctcagggatcagattaaacatagctgctctaggcttgcctttaagcttgagcgacctcaagttcgggaatcgacggctaagacgatcaggcgtcgcagtgtagcaaagcgccatagtcacatgctctctcgtctcggaatcaatcttgaaccatctccgacacaccaaagaagccgaatcgcgatctttcgggtcagttatataggtcatgacttgctcgatgacatcatcaaccgtcgcgacgcagctcaatttacacctcttgatatcaggatcctccatcggatcgaaaaaaaaacaaaagaaaaaaacaaacgaatcctggaaagattcgatttagagaagaaaccgacgacttcgaattgaaatcgaggtcgcagatccacacataaccaccagagtgagaagaaagaagtaagaaaggaaagatccggtgaatcggagaagactagagattgagagagtgagggagaagaagacacgcgtaggaagaagaggcggattgggaggaagaagaagaaagtgggacgatggaatcaaattttgtttggttaataatatttttgaggatcaagtgggacgatcattatttcatacactgaagttgacggtcgagatgcgatcttctctctacttctatgtttttcttttcatttttgcagtggtcagatctcagctacacgacaatattattagaatatttaactgatccaataagctgtgtgatttattcgatggatagatttaattatttctttatagagtattaataacctgaatcctaagcaaaaaatttaaaaatactaaatactagtatatgttatctttggttgctttatatgtgattaaaataaaaatacaataattctcctttcttttgtaagataaaaattttctacagtattagtagcttttaatgaggaaaaaaaaagttgttgactgcatgaatttatatggtccataatatggttaactatatattatggaccatatgaatataagtatataacaaaaaactacatttaatgatgtatgattttcaaggtttatttggtacaagttcaacatcaattgtcgaaagaaagcgctcaaaatggtacttttggaacaaagactatttacatgtcttttttttaacgtctttgggattaaatcattcagcaacaagacttaaaaagcagcaaattattaacttttagtgcttattacagttgcgaaaagaaccaatcacattgaaatttctttcagtgacaaaagtttttccaatagaaaaaaaaagctcaggaaaagtattagaaagaacaacaatgactatgaataaggagggaaccatgaaagaaaatgaatactgcaaaagaacttttttattatgatcgtatttcttagcttcatttgaaactcggaaataacaaaggtaatataagcaagctacaaaaaacccgactaattacacctgaaaccaaaagacttgggctgaacaaaaccaaaaactaggcgagagatgagttttctatacacttaactcggaccacacttacaaagaaccaaaaaaattaaccagaagtctctctgggaggcgcaggcactgcttcgcttgagctcacactctcaccaccaccatctcctccctcaactgaactcggttgttgcaacccaataggtgcaaacaagctcacaccactcacatcccggctcacactgtatagacctctgcttccatgatggttcaaaggtgtagatgttgttgcattggctccgcttatgagcaatcgtagtgtttctcttgcacctttctcgaccagcgaatcattctccactgggagcggagggatgcccgtggatattatcccggtgggtccagcgcttaccagatagctttgacctgaagagaagatatcgataactggaatatgaacaatagggtcgcacattataggaatcatcatctgttgctgggatgatgatgatgatgagcctggaatgggtatgtggtggactaatggtaatggagggatgtcagagagatcgagcggtgatgacgggatcaagaatccatctgatcccgatgctggtaataaggaggaaagtggcggaagggaaggtagctcaatggatagtggagggaactgataagaggcagatggtgcgtgaagcgatgaagtggttggagggcaccagcaataataaggagaaaagactggtggacccatcttcaaaggaaatgggggaggtccggtcattgtacttggtgttgactctgcttcttcaaaagcaataatttgtctgattccattataattctcagtagcttcttcaacttctccttctgactggataaaaccctctacattggtggggatagaggtaatggatgaattatcaaagattgagaaatggccttcactgtgtccctttgatttatctctagaggagatacgtagagaagcatttctcagtgtgttttctttgaaggagcttgctctagggctgaggcttccttgggtctttgtctgttgagtcccacagtggcgtgctctaagagattttgatgatgcactcgaggaggaatcagctgtttcagaaaagccagaagatgatgatgaatcaggagatgggacctgacaacctttgatgttaggcaccactgaacccatgagatacaaacggagatgagaagcaacagagccaagacgtgattcttcaattccagttaattctgagattgatggcttcttcttgatcaagtctttcatctacacaggataacaacagatgatgagaaaatttagatgcacagacaaggattttaaaacaacactatttcacaaaccttcctacgcaattcagttcccagaagttttgacttctctgagcaccaatagtaaaaagcattgccatttgcgatccttataacaaaagatctaccagagctgtccacagttatctcctcaattgacaccgcagagcactgagatttgctggtataggtaaagagttgttctgaatgaccattgtctccaataaatgagagtctcaagtcagatgttggcaagaccataaggctcaggttacccctgaccaataggagataaaacgtcaagaaatcagtcggaaaaacactctaatatcaaaatcaaaagcactaacaaataaacactagatgctgaaaaccagaagttggatcaagtccaagagcttttaaatgcttgcaagttacccttaattcaaactacatcaaaagaatctaccagataaacatgcagaactgtttacagaacagctatgttattagcctattactaatattcacaaaacatagggtactgccggaataaacattatgttcaataatttggtacttgacactttttaagactgtggcttagcttaactgaaactacattattcataacttagcatagggacctgcaacttagaagctagaacaaaaaaagatgataacatgattatctaagagcttcctgaaacgaactttatatagatccattgtaataagtttgaacagaatagtaccaccagaacacacaaaagaccttttaaatcaaataagtagtaacgatgagaaaacaaaaagcttaaatttacaaaaaaaataccattcaatgaaagccatagcgagataatataaagtgattaagaaggatatatagtcagtgatgttatgacaaaacagagagaaaattaaagccctatatgactagaaatcaagaacatactacacaacattggtgatgaaactacctttacttcatcatctaccagagatcataacagattacgcccacattacctacaataaaagatacattttatttggaagcatgaacagtatcactatacgactgattgagatcctatgatttctaaaattttaactaaaccaacgcaaattatggatagaccttattactgaaagctagatatacattgatacaaacataactaaccatatgaactaagactatgtaataccccaacctccaaagtgttagcacataaagaactgcaaaaggtcagtaaaacagagatacaaccattcatatgaaaataggtatagtatttgataaaatgagaccaaacatggagaaactcagcgagagagtatcaataaaactaaagcaggaattgtatgtgtgcacccaaaaaacttactttgtatcagcagatgatttcaaaatcactactgattcagataatcagcctgcaattgaacaagcattcataaaatcgcctaatcaatgacagattacacacaaaccattaattaacattctggtatatgctatgctacatctctaacataagaaccgtcttcaaagacaacaaaacctaactagagagctataattcacaaatctctaagacaacaaagagcgaacaaagaaaatagcaattaacacgattataacaaaaacaggactcattgattaccttatgggagtggggcgcattagaatcccttcctttataatcttcccgacgcgaaccgaaaccagaggtatgcaaaaacatctagccagcataccaatttccgcaggctcgaagtgctattcaataaacaagaaatcagtattattatctcaacaaaaatggaaaccaaaatcatcgaattcagaaactattcaaacctggctaagatgcgcaagcaatcgatcttcagccattccattagaaacgttaagcttcaacaacggcttcaatctctcatcacctcgacaagctcccataacttgcatgtccaaagcttgtaaccaccgtaaaaccctatcctctccaaccaaaaagtctcctccggttgcatcagtcaacggatctgaaactctactctcaatcctcgtcaattcattctctccttcggttccattaaattgagagtcatcagtcgtcgacgacgaaatagacaaatcatcaccgtcatttggttgatcatcacggtgctgatgatcgtctccggtatctcgcttcctagaatcggccatatcaaatatcgtatcggtaacttgtcagagaaaccaaaaactcgatccagaaattgacaaaataaaaaaagttcgtcgagtttcaaaataaaaaaacctaaagattgattagtgctttcaaatttcaaagaatcaaatccaaattgagagaagaggtagggtttgttctaattaaatttttttttttttttttgattgatgttgtttcgagagagagagaataaaaatatctttaattgaaacaagtgcctttttttggatgcccttcgcggaagatggaaagataagaaaaccaaaacagcacaacgtttacgtttatataggttagatgttctggcggattcgaaacgattttatttaatttattttattcaaaacatttgagatccggggctcgttttgattgaatcctatggtgggtcctacaaatttaggagtgggttccttgcaaaacctgacttcgagctggtgccacgtcagcttttaatgggccctagcaaaggatgggcctgtgtttttttttattgcaaacctatatttttctttcgttgaaattgatcttcggcgatggacaggttgtattttgtggccaatgaatggataaaaaatgtatggattatagcatgtgatttggaatattttaaaattccactacgttatgttaatacgaggagaaagttttttcaaacgaaaattggtttaatagcttccatatttttagagatttattttattataaatttttatattaattttttttttttttgaccgctgctatgattagaatttagaactatgaaaagcaggaaaaacaaaaattatggtatcttttaaaacacaattctttacattattttatttggagttttatatgtttaaaattgtatatccaaatttggattgtcatcttacatcaagaaagttattcaatacttttgcaaaatcatagagacccatctcttgttaagctgtggaattttttataacggaaaatggaaaattttctaatcaaaaagtgctaaaaaaaggcgactccaaccaactacaatcaccaaatgaactttcccaagccatacgagaaagaaaaggctgtctaaaaagagactagagtcatccaagccactcatatcatatgtaggtgttttatcatcaatcatacaaaatattacgaatcaaatcatccacaattcgtgaagcatttgaccttttttttatgtatgatctagtacaaataactaaacgacaagcatatacttgatgtgagccattggcttactaacttaggtaaagctttttattcttttctaaatagtgatcataaaatctcggattaattcaaaaagttggctataaggaaaaatccaaatattagtttcatctctaaacaaagtcaccatcgatttagtattctaaaacgccaacatatggagtttcaaaagcatatatttctctggaagatgatcatttcttcttctttggttcttcttctgcatagttcttgattagtgcttctacgtctttccagaataaaccctcaacaagaactccatctttcgtgaacctgaaaaacacacagagaaaccatctaatgagactcatgtaaggaaaacagagcgagcaattgtaagaaagatgccgagagagagaccattgggtgacacttttggtgagctgaactgacttcccagctgagattgattttggatcagcactgtcgatggtgagagtgtactgatcagagaatctgggcaactttgaagataccaccaaaccagtgctggtgaatgatccctgcgtatcaaccatcagattttaagatttttccaaagaggagcaccaaatgatgagctaaacatacatgtttgaacagtagcaaaacaaatgagagtgagcaaatatatatcaaccagagagctttaggatcttgagtcttgacataacaaaatgaagcaatcccactaaccaaattattgcatcaatttaacatggcttcagaaagacaaaatgtctgagctctttttgttatgtttcctagagctaactaaacgagtacagaatgaaatgtttggaaaaaaaaatctcatcgtctcggatactaactaaatgagaggagtaatttcttcaagctggtaagaatgagaaataaaccacccaagttacagtccagaatcctccacttagttgaacaattatgtttcgagaaacaagacagaaacgattgcaaacatcaaaaacttttgttcaactatttttcaaaatctaaagtttgaagactaaaactaattgaacaatacattgaaagggaaatgtagttttgcctagagctcaaatgaaaaaaaaaaaaaaaaaaaaagatgccttaagatatgcaaagttgcaaactttacataacatgtcaggcaagcagaaacaaaatacaaaacaaaaggaatgcaaaagtttgacaccagaattcaaactatagctccagttaaaagtaagtgaacaaggaaaaaaggtacattatgcacctaaatcacagaaatacaatacaattgtagcatcatagacaaaacaagaatgtagcccaaaccacgaaacttctcaatgaaataacttttctaaatagtcagagaccaaacctcaggaggataggtgaacaaaatcgcattcttctccttagtgtacagaatcagctgcaacaccgcattcaacactacatacgtgtcatatagtcaaggaccaaacatcttcttcagaattatccaaatacaagacatatatcgatcagcttctatagtcatactttagatacaagaaggttttccaaaatctaatgctaactaagcacaaagaattcgagccacattacaagttctctaatctcaattttcttaaatttcatcttagccactggaaaccaaccaaatgagagtcaagcagaaagcagaaagtatcaattgaattcgagaaaaaaggatataatgcgatgcatccaatcaaaaaatccctgttctcagggaatttcttgttgtagaattgagcaacaagagcaacaacgatgataatcgttcccaaaatcagtttgaggttgctcaatctcacatcctccttatagccacggctcgtaacgatctacgaatcatagattcacatatcagagaaatatggagcaacgaacaaggaaaatcttagaaaattcttacatcggagacggattcgtcaaggatgtgcttgatcgagtggtggtccaatagattggccttcttaacattcttgttggttgattctgtcttcttctcctccatggtgaacagatcggatccagataataccagatctctaatgttcttcgaaaattcgaacgcagagtttcagattttcacgagcgctgagactaggagagactgatgtttttggttcgaggaggaagaagacgatatattggatggagctagaagacgtttcagtcaaaactcgtttattatgatgtcgttttgatggatgaaatttattgggccttgctgggcttaatgtagtcaagtcaactaatgacacatctaaaccttttttgtcaactaattaaacccttatttgactattataaacttaaatgctgaagatttctttctattgaagaaagaacaaaggaaatctgccaaactttattcagatttcattactaaagaatcttgcagaaattacaataatcaattgcaatcatcaggaaatgaacaacaatcccaatagtgtaataattaatcaagaaaactattggaaatttaatctatttttatttatttctaactactagcgttcattcaagaaggcttggacttgacttagctagaggtagcgtttgagagcaacagcttagctcccttgacaagctcttccttgatcatgaacagaaccgcagcagctaaaacgctctgcacaatctttgtgctcatccctttataaaacccgtaaagcccttcatatcgaatcattttcagaatcgcgtccaatgttcctgtaattcaaaaccaacacagcaactcttagctttaactgacaaatgagttattttggccatttcatgataagagggaaaacctttgtattgttgtcttttgtcccctgttgtgacctgtttggcttgaagtcgcgactttacaaccaagagagggtaagttgtgactgtagctccgagtttcgccacagctccgagaagaaatgtctgtggaaaatagaaagcacaatcatgggaagttggaaagcaagtaaacatcttattcaaaaaaaacgaaagcaaaatgctagagtctgaacctccaaagcggtaacgttgttgctacccttcaaggcacgctttttcttcagcttggttagcattgtctcgtacaacataaattgcattgacggattacttacctgtgggttaaaaacacacacacacatctaattattaataaaatgcacctagacaaacaatacaagagaagcttcaaaatcataagctcacgtaccatgatcaatgttggaattacacctttccagaagccagttattccagcttcatcgtaaacctctcgaatctgagacattgttcaacaaatatcacagaaactgtcttaattgagaggtttatagagtttgatttgactcataataattgatatgagtatatgaccctagccagcttcttctagtttttaaatacgggaagctgcctcataccgtattaaaggtcccatatggacgcggctcaacagcaaccagagcttctgcattagaagaaggtgactcgggggccgctgtttgatcttttgtcatttttctgtgggtctgcatacaagtattcaaaaaatcaagaggagaaataaaagtgaggagagaaaatccatagattcatgctcaaacgcaaaactaaaactaccacggaccaaagaaaatgtaattgaaattgactggacagcgtaagaagcactttacggtactagtgtatatgaagccatttatacctgcatacgcgtaacaatcacccaaatcggattcgtcataagaacattaaccgatctgcacagtgagagtgttatcaaaattcacatgagccaacggaaacaatggaaaaaaaacaaattacaataatgaactatacatgcgaccaaagtttacaatcaaagaagaaaacagctatgacagtaggacctgacaggaaaagttaagaccatccacctagaagctccactagacaagtaacagtataatagcatagatgatagcattagaaatgtgaccgtggcgagccttcacccacagccaatgtgaagtttatgagaaaaactgaagcacctaagagctattttgaaattctgtatagcattcctaactaatggtaatctctaatccgtattgtaacagaccaaaaactagcatataaaacaaatttacataacgaaattctattgtacccggcaaaggcagccactaaaagtgaagcaaacatcccaactgatccgtcacccaaacctttcttcttccgtgcaagagctgtggcttcagctcgattccgaaacacttggtagaagtagtagtacacaccctgtctcatccaaaattaacatccactttcaagcctatattctaaacttcataccaaaaaaatggctaaaattacagattctccaaatattcacaccaatgagagaacatacctgtgatgcagccgttccagcaagagacggcgccaatccaccatataacctctcccatccttcttgtttgacaaccttcaacacaaatcaaagctatttaataacaggtcatacaaatgtaagacaacaaaagaatccattacacgttctttctaaaactagaaccaaatcagagcaaatcaaggctcatatactatagcaacactcatgtattgaatctctgatcatgagattgagagtggaaaacaaaaaaaaaaacctgacacatgtgttcgatagttccaagtttcctcttctccctcttcagatcccgctccgtctgttggcgcgtatttacctaattcaacgattaacaaacagacacaatcgcgtttaaacgagacgattgaagattatccagaagaattaggtgacgaaagaatcgtgtacagtttgaagaggataagtgagaagctgagcaatgatcccaccaccagctccagccaatccattgatcaaagcgtccgacatgatttctatattccaacaccaacaaaattatgagcaaaaacaagagaaatcgaaaatcgctgattctaatgccaaggaggaagagatccagaattacctccggttcggataaggattgaagaatcgtcgtgaaatcttccgacaaacggagagaatcgcagaagcttaagaggatgttgttaatgatggcgtctgtaggaaaggagcttcttctccattccccaaataatgaatgactttaattctctctttttttcgcttcagaagttcattcgaagaaagaaagacacgcaagttgacgttgaggaatgaggagtgtaggaggtatgtaattgactgatatgcccttataattgagtgatattacggaagcctaaccttccatgtactactagtttggtttagctggataagactctttttcttgaactgcgtgttcggtcttatttgattcagcttagcatataaagatggatatcattccataattagtttgcctccgtggtttgtttaacttttaaacgtttggctgaatatggtatgactcggtttacatatttgctttatactagtatcatagataaatcatgatttagttttatctacattatgcatattgttagacaaactaaaatatgttttaagactgaaatattttcctcattttcttaaataactcgttttgtaaaactaaattacaattcatttgcttcgaattatcttctttgattttatagtaagactgttggggatcgaaagctatctatctctcaccatcgtatgggcttactagctttaattgagcttcttttaaacttttcaggttaggcctaaagctctttgtacaggcccaaagcccatctctaacttttggacagaagaatccaacaagagagaaacatttctttggcagttgaggtatcaattgttaataaacaacttcagaagtaaataaattgttaatgatttgaatgaagttggagtgcaggatggatataataccaaatgtacatgaaaaatttaatctcacgattaatatgagtagatgtatctttaatatagaggttgggcgtgtggcattttatagtttttaatctaatagcgtgcttacacatatttccattttaaaaagatttaagtgcatacttccccatcatttattttgatacaggtgtgaaaattaacaataattaatattaatcataattgtcaataaattattttcacaaattataaaatattgttaaatcttattataaatagatgttatgataagttttggttaagtaatactcaaaatacagtagcaaactaatcacatcatcaataattggaggttttaaaaaaaactaagtagagcttatattttcaatactattatgaaagtaatttagctttttttagctctcccactataaattctaacacccttatatatgtcttacgtgtagagaaaatcaaagaaacaacaacaaaaaatggacttattcgtaatggtagtaggagcatcaggaattggcgacggtggtgaacaaaaatacaactacaagttgagagcttggactaacgaagatgatccacgccaaacaaagattgtgacaacaaacgcagatcctgagttccgtgaggttttgcatcttcctcaaaacatggcttcatcttttctcaatttggagttgttcagtgtaaattcagctgacactgacgcatttttcattgggagggcaaatacagcattgcccatgaaaacaaacgctaatgtgtaccgtaagatcaaacttcagaacttggacaccagtggaaatatcgtaactgttggttatcttgaagtttatcttggcctcgagactggttaaggcaaattgatgatctatctaatgttacttttggattctagtcgcaatctaatatagcaaatgtataacattcttttcaagggtcaacttacaaagtcacattacaataatcttacatcgttaagttcttaattaacaagaaaagaaaaacagagaaaaaccgttaacgttattattcataaactccgttacttattagtcacgtatcgcataaactcaccgtcagattcaatcccagccatagtctccggcgataaaaccacctccaaatcaacagtcccgtttccttccctccccggaaacgccgaaatcttcccatcaaacttattcgaccgtccacttctaaccgccaccggccttccccacccgaaatcattatcatacatcggaaacctcggagagcttcccatagtaaccgaagctccgtcggcatttccaagaggaaaacacctgggattcgcttcccaatccgccacaacgctacgaatcctcccgtcttgatgagccgcaacactctggttaagctgatcagcgcaccatttaagatcacgtgacaaaacctctgccgcagtcgcaaacgtaggaacgctttgaatcgcgtttccgaaatactccggattcagtttaggactcaaacggtgacgacaattcacagccatacgaaacgtagtcgttttcgaactcggaagcttcctcgcacgtgtgatcgcacgccaaagcaacgcgcatagagattgaaacgacgagatctcaaccgcgacgggtttcgaaacggcgtcgtttctcccaaacaaactctccaacatttccgttaaaataccgttttcttttccgttaagtttatcgttgctttgtttccctaacaactcaacaccgtctatttcgccgttatcaaccgtcaaccatttcttcttgttcaccacagctttaagctcttgaatcgattctctactgaaactgaatatccgttcacgtaacggcgcgttttcgtcaaatgtcacctttggaccaccttgagggactttgagcacagccggtgagattagcacagactcccgcgtaaaatcaggctgacgtgtcacattcttagcacctctagaaacctccgcgaaggtgttaatgaaattccacagcgaggttccgtcagtcacggcgtggttaacggagcatccgatgaaaacgccgtcgttcagttccgtcacttgaacggcgaggattggtctgttatgtccctcgtagctcacagctctgtcgtaggtgaaaaactctttgactacatcgggaacgtcgattccggcgatcacgtcgctcacgtggatggattttgcttgggcgaaaacaaaatcggcgccggcgtcattgcaggtgaggaaaacgtggccggaggaggaggttgagagacggccagcgagaggagggaagtgggtgagagtgattgagagagagtgtttgaggtgtgagataagcgcggggagaggaaggttagggcacgtgaaaagacaacctttttggatgtagtggcaagagagcatgggaagatcggagacggagagcttgaggtcaacgagggttgacttttggtctgggaagactctgtttcttgagattattgttacagatttctctaaagaaggcatttttgttttattcgttggttctctgttttgttagctctcaagagttttgtgtgtgattgagagagtgtgatgagagaaaaggatcagaggaaggagttatatatagtgggggatgaagagagaggaggaagaggttcatgaatcagatgatgatgtggcattacttgtcttattccctattaaaaaaatagaggctttgatcatcaacttgtcgcctgtactttggaaaagtgtttccttatttgtgaatttggttggtaatttgatcttctgttttgtttgtgtaaaagggtgttgttacacatgaacatgaactaaaaagtgaatgcacactttataaacatttaagagtaagaacaaaaataattaatggtgaagataagatgatggaccatcattcaataaattagttataggtttcactcaaattttcttcaatttgtaattatcaagttttaaagcaataaatttaaataaactaggatgacatctcaattatatcttatttattaatattgttttgatacttctaaaatctactaaaaaatcttaaaatatatcaatatgttataaaatccacaaaactctaatgatatgatcaatttaaatttgtttccatgacttatattaggtgtgaattttctaataatatgtactttagaaaacaaaaacaaaaatgactttcacaatgtttttatggaacaggtaacctgatgtgagcaaaaattatccttggaccaatgaaaacgtatattttataatataatgtgcaaagaataagaaaaagaaaaaaaaaaaaaaacttgaaccataacataacaatcaaatgatagtacactgaaaacaatcaaaataataaatttgtggaaaactcgaaaaataatatctctaaactttgcttatatggtacgaacattccgaagataaatattgtctccaatgggttagcatttaacactctctgtctttgctgccaacagttaaacctatattgttttaaaattgcagtaaaaaagttaaaacactagtttcaacagagatctccataaatctcaataatccaattaacaaaaggatttgcataagtgacgagaaacgtatattggaaaggtaatctagactattgtcatagcgagtagttattattattcggttaatgttgattgcttcacatcaaagagaatatctctgaataaagaggtttgcattgaagtccacaaacaatttgatatcatgaaatcccaaagtttattgcagcctctctcgagactagtgaatccacgtggcaaggacacacatagtttcatttcttacatggcctacatgcacactgcacaggtcagtgtatgagacgaatagcaaaccaaagtgtatgggccgggtcggatcaacatgcgtaacggacgagctatagtaacatatttagacttaacttcgtcattgacgatttgtatattattgtaaaagacaaacgaaattaacgtcttctacatttatagaacgttacgttcgtggccggttactaaaaatcgctatgtggtggaaattaaaacccttctgcgaaaggaaaaaataaataaaacagcaatttaatgaaagttttgttttatatcatctaaggtagttgttgcccttcaaaagttgcattttaaagattgggttcgaaatttgtatggaagaggcttcaatctcatcgaaaatatatttgggttcgatctatgattccatcggttaaccaaatagtaataaaaaggtttttgggggtatatgagtgtattttatgcaaacgtgataactaattgtgtttatgatattaatataaactaattttcatttaatgttttgagtttatgattgttatcagacagatatgatacgatattatacagatagcgacaattgatgatattcatatcacactatctaacaaaatctggtttggtgtatttgaggtaagagtaagatagaaattgcatgaatctttgaccgtgtgagagctgagattctcaaatccaaaagattttatctgtataaagattaaagacacttctaaaactacgtccttggagttccgagagatttgcatggggtatgtgaaaaaaagaagacttgtaatgcactttttgtaagaatttgtcttacatgattgtatacacaaacaatacaaaataaaagactaaccacaaatcatcaagtaacaaaataataaactattagtcaccgagagaaaattgagataattagcaagtgtgtttaattaaaacactataaatcacactgttaatgggttgtcattcctaaaatcccgataaaagtcggcgtggagaatctcatattcatctgatacagtctagctttggccactgtcacaacacttcaagtgtgtttattctattgactaaattaatgtaagaaattagaaaatcctaatcatagcttatgtttgagctaactttgacataaagtgtcggtttctgcaattattacaccaagattctcgttaaccgtcattttcgtttttgtcggcgtcttgagatttttattatttgcaaactgccacttgaagtgatctggtacgatgcaggaaactgcaaacactagtcttaattttgaccgttggattggaactccagtcgtttattcatgttcatcggacggatagtgtaggttacttgagtttggttgagttgcgattgacacatgataaacattagtataagtacatgaactatttttgactcggaacgttcttgacgattattgactcgttcactaattttattttgatatttaatcgacgtcatatctttctcgttttaccaacaaagaaaaaaagatatatctttcttgatattatttcgagaaatacttcaacttctttttcttctgtcctgataaataatataatatattttacttacaaatctctttcgtctatagttgccaaaaaaaaaaattgcttttgttggttaacactctgaatacttgtgctcagatcatatatatatatatatagtaccacgtacaagttattaaattatatatgtatagttacaaaatacaaccataatcaatctcggggttataagaaaacgacaataatgaatcaggcgttaataattattatatatacgtctacttttcaaaacttttttaccatcactcctcatttggaacacacaaaactctggaataatgaaatctatacataatttagctgtggatcagaagtatgataaaaataatattagttggttgattaaaaaagaaaaactttgagatctaccacgtgtttgacaggttgacaagcgaagcttgtatactatttccagtacgtggaatgtattatgtattaaattcgataatcagatgagatatgctctacgaaaatgtgtgaattcaagtacaataaattgtcaatagatgatactatataactgatttattatacctaacaagtggatacatgcgacccattttgacagtttagaaccagccagacatgagaagcttcgatccataattttctgacgggttaattaatcatataaatgctagtattcttttttactttagtgaacacaagaatattctggatgaaatatccagttttttttttagtataacaagcaattaaaatcttaaatgatttaattaaaatttgatatacaagaataactggaaaaaaaattgccattatagattgtatactttacacgctggtctatatcaacatttaagtcgaggatatctcgaagtcaagataattcaggcttaatacgaatggacatttgatgatattataggatattgatgagccgaaatgatcattttggaccaaaccgataggatcaaaacttattatttttgttttgtttttggcgacctgcatatctatcttcgaccagccgaccatgagctattttggatgaggtcttacaaaaaaaacagaaccaatcaatcacaatatcttagatcataatttaggagtttatataaaagacccttatataattagttaatcgataaacgtgtaaaattatttgtggtctgtgagagagagcatgaatatgatggaagcaaagaagaaaataattaaaagcaaagcgtaggagggttgtttgttttgcttgaaactataaaatccgatgatagttttggaaatgatcgaaagtgaaaagttggctatttctttggtttctgaagtctatttttgacattctttgttggtacattataataaaacagaaaaggcacacttggctatccacatatatcgaaggacgccgctttctacctacaaatttttatttttggtcaagactacaattttatttattaagctatttcattttatttacttttctttatttatttttaaattgtttattttattgttaaaagtttatttctaatcgtaattgcaaaaaagagttgtccttttcttcctcttttgctgatcagatcataaaccattaaatgattccgattttcacatatgaaaacagttcttttaaaattatccatataggattgagaaatcacataaatgtttaatatgcaattggtaacgcgaacggattaatgtttatgtttttctttttttgcctcaagtgtttatgttttacaactatatttttgaaaattatagtcacttttcatatttgtttaagaactattacatataaacacgtacgaaagcaagacatgatgttttgttctaatgctttgagctaattacttttcagccaacaaaacaatgcccttaaaaagaaagaaaaatatactttctcgatatgtctcgtcttccactattgtccggtgctgtactcttgtaatggactagatcgtgtgtcaattcagaccgaaagccatgcattttgttttaagtctaaagatttcttgatataataatttcagattcttaattcctgacagaagaaacaaacacaaatgcagttagtgcatagcgaatttaaaacaaaagaatcaatgctttatcagaataattataatagttaactctaaatttaataaatggataatatgaaaaaacgactgtaaaaaattgaataattttcatatacaaaaactcttttttcactgaatttatcattatataaaacaaagaaaaaaatgaaaccgcatcgcacaccctttttgtataataaataataaattaacattatgaaggtttgatttttttaactatgctcaccaactcaccatcaagaaaatcgtcaaccgtttaagatcacagaaatgtaaaaacagtaaacacatatactcacctcaacattgttagtgtagattttttctaaagaaatcttaaaggagttcaatccaccaattgtggccatagtgtttaaacctcatccatcgaatcagctattgttacatatccgaatttaacatccctcgtcaaggaaattagaagaccaatatacaagttatagacaaattgaacatgacagtagacctacatgtcaagagacgtgaaatatacatacattatatacatatgtatgtcgagaataaataaaatcatattgtgctatgtatgaagtttttaaaattcgcattttatgcgtgcatccacgcataatcggatgtgggggtgacctttgaaatgccacaactttgcgcggccttgatttatctcacgcgggacataaatttaaaattcccatataaattagatagaaatttcatattctcttataatttatacattatcacaacataagtcaaacctttgacaagaccttcgttggtacatatactatttgtataattattataagtagcatataaggttggttcatgtaccgcagactaaatgcatgtaacatactttgaaccaaggcagtgttcgtcatattcattttattcttcacttctacatcaaattatacagcttaaataaaaattatcccattcttatgatttctttcccaaattccgtttttcgagctatgttcattcatcagcgtaatgatttctctccaaatgtcgtggtgttattaaaaagaaagttaatcaactctatacgaatcatttgaaatgggacattttgataattggtatgtcgtccatgccaagtaaatggaggttttatgaagaaagtcaaaacacacaacaaatttatgtggttcatcaacgggatgttgattacgtacgcatacaaatagataatggtttactgtatatagatcccaatatataatttcaataactcaaatagatatataatttcaaccgaaaacaacggtccataatgaatgatctcagcgagagttcagtttaaacatgattgttgcactataaaattaagtaatgtatcaggtactgacctgccatgcactctgcatcttttaggttcacgggtgattaaaatcagtattgtcattcttgataattaagacacaagaattttctatattgaaacccattgtcatataagtgcattgaacccaaacctaaattggtgacaaaaagaaagaatccaaccctcaagtaactagctagtatttttttttaccaaaaaatatgttcaggacagctgacattatatttacatataagtgtattattctaataaatgcccatgattaaaaaaatataagcataaccaccactactactatatgagggattataaagaaaaactaatgccagctgagtcacgtataaacaattaaatgattaaataaaattttaaaaagctatacctaagataaaagtaatgatatattttcaataacataattaataattcttttttcaactatatatttcagtttttgtattatatttatagacaagacaaagtctatattagacagacttttacgtatgtacgtctctccgtatgcctgtcgtttgttttgtcttttgcacctgcacgaaacaatatggagacgtctcaacaatctagcttgtatttaaactacttacaattactaatccatgtagcatgaaaataacttgtccgaatcgttaggtttaaaacagccgggaccatgcatgtcatagtttgaatagagatcatgtgataatatatcacgggaccatatatgaatgggtggctcttttggttacacatattatcaaagagcgttttaagaattattttggtctaaaatatgatgtcgatcgtattgaaaagtcgagtgcccatccctaattcataaatatagttgtagctagtcgtcgagtatgtgttttctccgtgttatgtttagtccgtctcataaaatcatgagaattattgcaaattatcgtaaattttcaggttttaaataaatgtaacccacaactactatgaaaatgattcgaatattaatttatcggttagcactaatacgtatgatactacgtcaatgtataaataaagagaaaaggcaaaggctatggagaccaataaccatagagtgaaggtgggtgaagtggaatgataagttagattactgtgaacaatgtatgcaagttgttcacttacatcacaagtgcatgcacgtctttaatgttgacccatctacacaccggcctacacatattcttctcaagtttgatatgtacatgtactggtacggtcgtatatgtctgtataacatcgtatgtagtacgtatgttgacagagaaacaggcgtatacatttgctatcaaaatccattccacaaaaactcccctcatgtttttacaacacaaactaaaataatcaagtttttaaccacaaaaacttcaaatactcgttcggattcagcgaaatcagtttaatgtattccgatacataaaccgtagctctaatttagcttatcagaaagacaaaaaaacgggtaaaaaaattgattgtgttagttgtgtagtgaaagcaggaaatgaaaaaattgctgaatgatttcaatcgcaaatgttgtgtaatatttagatattaacttccaatagtgtctattatatgccaaagttagcattattatatgcaaccgcaaatcgcaaattgtttacaatttagaagttagtttccaatagtgtctattaagcctgttttgtaagatcctacataggccaatcgcaatacggcaaaagagaaagcagtaattctaggcttctatactctttcaatgtaacatagctaatagagagagaccatgatccaaaattctgagcataaatatctccagtgataaagattaggcgcaacaagtggcaaataaaaaaagaacaaagctcatttatatgtatattgtttaaaattaggcacaccaactaaaaatcccttttaaagaccttaattcacgaaacagagcattttgtctttcttaaacttgcaatttaggaacactacaacaagaagctgattcttacataaacttgttaaaagaaaattcgaaaccaaaaaagcagcattccccatttttagcaaaaccttgtgtttccaagcttattatagcatttgagcagctgtgtttagcttctccgctagactcaactgtgtccttgttatgcttgataggtacaacagaagcaattggtcctgaaataacagaagaaacaaccattagttttttacaaagtgttttgctttggcttgaaatttacaatcttttacctggagactatcattcacgaggttatcgaagacttgtggaggtaacttgggaagggaggctactgcatctgcaatgaatcgtccaatgttgttgtctggagctatttgacctccctgggaaatttcattaaaactctgtatcaaagatcatgtatctatggtcgataatagacagtcaaggatatcataagcttaccacgacactgtcaacatatttgtagacatcgttgattagagttaacagcctctccattgttaactccattccttccaagtcatttgggagtttgtcaacagatgttgccttaagtacatcgactgtggatcaaaatgatgtttttaaatcagtcacaatcattaatctactgaacagacacaaccaaagatcatctattcccgttggttcattcacaatcattagggaaacaatctctagatactgaatcaaccatgcagaaactgaactacttagacaattgaggaatgaggactgttatgtattttgaatatagaattggttactaataaaaggatagaatactcacatccgactctctcagcatcaaccatgcggagatcaacaggaatctcttgaaaatgtgcaacgagttgtcgatcaccgagtgagaggtttgaagagacaaaagctttgatagtaccctcaccattagtaaacccagtatccacagttaggtgaattgggttgggtacttctctagcatagaaatcatgaatcagcgaactaccgccattaaccccagcaccagttgaatacctgcaaatcaataaacttgttcaatcaactattccaaaatgagaaactacctaatgcagtgttccaacacagctacaagaatcatgtgacaaagatatgagactaatcatgagagtataagagaataagagtgggaaacgagaagtaccagccgacaatagtttcctttgaattcaccttaaggtgtgaagctaacatattgtggtggtaatcaatatccacagcaacctgcatccatatcaaaccataaccctcaaaacttatcacaagtcacaaccttggggtatgaagctaacactactcctataaacattcacatcctaacaagcaaatcttcagctacgaaagatctaggatctccaacgatagagaatcgagagagaggagaaatttagagatcaaaatttcgaacctgatcggatgattcattgtgagggacggcgtatgaattgcggatatcgacggttccgtcaggtaagatagatccgaggagagttccgatgactcgttcagctgagtcaggacgtctcacgaagcaatcacagacgttaaagataacgagagggtggatcctcgccgtgagtacagaggttgtagcggacgccgttgatgacggagacacaaattgcaagatggtgtgctcgctcgtcgccgccatggttaagattctgagaaggggtaaaaggcgcgagagagtggagatttagggtttccgatgtgagcgtcagaggaaggtaggagaaggcatcaatgatacagaagataggttatgtgccagtgggcctacaaacaggcccattaaatgtttttcttggactaatgaatgaatactcattcaaacacttcccttctttctcttaatgaaatttgttgaacacaaaaaacagagaaaggcaatgtcgttttatacatcggtttggttactcatcgtcggtttgggttttttataacgtttttgtgtgtgtgtttatcattgaattttgaatattatacactgtgaaagtgaaattgtgtttttctcataatttaacatctacaaaggataggtgtgaaattgtgtttttctcatacactaacatctacgaaggataggtggtgatttgttgacgattagtcagagcatatagattagtcgttactcgttagtagaccacccatatttgaattacgacttgtggataattcaaagtatggattacgatattcgtaaatgttatcgtttgttaaaaaatctcataaatcatataaaaatgaatttgtattcaaatatggatcgtcaaatgttccaaaaatttcactatcttacaaactaaattaaaccaaaccaccaatttaaatttatattaaataattataccagcagaaattaaaatttaatcatcccaaatgactccaaaactctcccagaaacgtctttgccgcgtcaaggctcgggaaatacgtcggctccataaatatctgactcagtgagtcacacgactcttgactcgccgtcgcgttcatctccgcacttcccatcatagccgccactaactgcctatacccaaagaagaaactcttcgccgccgcttccaccgcttgcatcccctgaagcaaatgaatcttatcgcactctgtcttcctcgcgtaaagcttcatcgccgcctcttgtaatcttggtcctccggttggatctacctcaaccgccaagaccgccggtactttctgtctcagatctttcgacatcttcatcatctccactaatcctttagatctgaaacaaaacgcatcgtttttacccgtcgatttgatctgtaactgtttcttcaatttcaaaaaatcttccggatccatcaacatatgaagatcttcaatctccgctaaaattttccagatcttctccagcaagtaaacatcgtttgaagcttttccgaatttctcttcttcgatacttgagacgattcgattcagaagatttccagatgcgtagatccacgattcgaggatctggtgaatgatatagagagtttgattctcgtgattatcgatatgatctgcgtatggattatccttgaggctatagatctcgtttggtcggcaaatcgcatcgtaccggagatttggttttccggcgatgttttgttcaccgagtccgagcgtgtacttacaccgactcatctcgttatcgatcgtatataagatcttcttccccaaagcctctgatctcctccacgtagctagctgcggtaacaaactcaacgaactccgtccaccgccgaccggagcctccgctgatataccttcttcttcttcatcttcgcagatcgctgctacaagctggatctgcttcgtgatgagagaatctagcctccggttccattcacggtggttgatgtacggtctagtatcagaacaaacggcgaaaactaatctgaaactgatctccaaagcttgaagagctggtttgagaatcggctctgatgtccattgaggaaaatcacgagatgaccagagctttcttagctcagggagacgaaggtaaagctcgtaagcagagcaaagagcaggtgctgaacatgagatcggagatgaaacagggacgattttgaacggtgatggaatagttacgtgaagctttgaagaaagcttaggtgagtttggtaaatctgatgataccatcttcctcttccaatccatatcaaccatttttatttttttaaggtctgtgttttttttggtgtgtgtgtttgtgtttgtgtgttaaattttgaatttgaggatgagtttaggatacgaggagagtatatatagagagaaatgtggatagaggatggggacgagaaaaaaggcgtgtggaataataccgacgcgactgatttgaaagtcagcgtagaaacgcggtctcctttttaaaaaaaaaaaaaaccagtactgtggattaatttcaggataatctttttttcgttttttggctttatattgctttttgaactgttttctatgaaaggtaaatgcctgatgattagtcgaatgttcagtaatctgatttctaaggaaatatcgaatattttctcgtttttggtaagatattatcttttaataaaagttaaagttaaaacacacagtcatgttcataacatgttaatacatatatagaaatgttttatttgatgatatatgcgatgtagtataacatttaggggttgatcgataagaatataaaattttctgcaaatacatttttgaaagtcagtcatgcgttatgggttgtcacttatgagcaatatttacaagctgtagatagtttttgatcgaagcaaatatataataattttgatagttgtcgatctacagctacaagttcaactaatcatgcacatggtgttttgaatatatatcaacaatcgtaaaacataacaggtgtcatgtaccacataaaactgaaagaaaacaatgttttagttgcaaatatgaaaaacgtcatttattttctataatgaattgaatagaaaaagagagaaaaatcacgtatttgtttatgtatatttatgtataaaacggacaaaattgtgaaattttagtagcgtaatgacgggcaattaaagaaactcaagaaagcataaacttaaattcgcaacactagagattttaatacatgtttgatgtttccctacaaaagttataaaagctctatctataaggtcaaacaattaggataatacttgcaagtaggagcattataagacaaatatacgttacgataaaattattgctcaaaattaaatttggatactagaaaagtgtatagtccgcagttttcacaaatatagtgtcccctaaattagtactgtatcgtgttatcagtatttgaaacgcgtatataataaaaatgactattttttattgtagtgtggataagcatttagacggtgccgtgttatgaattgaaaaaggaatggcacatggaagtaggaggaatatagatgcgaagcttatccaaaatatgtgaggaaggttggagtttggtctcacttaatcttctaatagtgttttacttggaagctgtcgtttcctttgactttggtttttcttttttcttttccagttcaatattctaatctcaccgatttttttgtttatttattatatacgatagataaattttgattgtaataagactgttttgagatttcttcaccaaatctcttttaagtgcatgaaatatattttttgtgaccaagactttcatggatgtttctgttaatttatcggtacattggatattgaatttaattaatactatcagttggaaacggttcgagtgaagacagaccatttcttccattacatattagacattagacaagtagattataacaaaggacaaatgattatatagtttgaaatacaaattagtggtctataatcttctttatgttaagagttttcttttcaaataactacttatgttttaattggtattgtttacatctattttacgtacgtcacttgtttgcactttgcactgatcaaagccatctttaacaataacgtttttctacaaccaattacacccgcctagtaaattcgagacacatattctctttaaaaagaataaaatgttacaactagtaaattcgaggcattagtcttaccctaaaaccaactttttatatatgttaataaatacactttctttagctatattgttttggttactgaatcattccactattcatatcatttaatatacatcctatactattacgttttaaaaaaaatatatatatatgaaaagtatgcaaagaagtttgtagattgacgacaaaaaaaaaaaaaaaaaaatgtagattgtctgcttattttctattttccttcctcattccttaactttgaattcaaataactaaaataagtcatcttttgaggaaaaagaaatttagtgcatatataaaagaatatatcacatccacatatatggttagtaatagatatatggatatcattgatatcttctttttatgtaaaccatcaatatatgaaagtatgaaacaagcaaccaccggtccatattagtcatgcaaattacattaacattattataattacataaataatcacaacgaataatggaatgcatatctaacaaatactgtatattattactagtagtaaatatcacaattcagtttctggagtattttagaaagttacgatatggcaaacaagcaataaaacaccataaatgtaaacatttccaatttttagttcatctttattaataacaaaatgtaaacttaccaactgttgttgatgtaattacaaaaatgtaaagttagttttcaccaaaataaataaatgtaaagttagttttcaccaaaaaaaaaaaaatgtaaagttagtgaccacaatacatgtatataagtattgaactgtacacgagaataataagaagaagaaaaacaagtttagaaggattagagattggtggtgtggtgaagatcgaagatgataaaaatagttgagaattatttgtcagaaatcattggcttatcgttgggcgtcctcatcgtaatccttgtttggtccttgtatggctcttatatacgtcgcacgtgctgttgctgtgttaagtctaatgactctaatgcataactgttgtcattttgctgcttccaactatgttcttgttatttctttttaatttacctacaaaatagcagatcgaaagttcttttgctttatcatattgtaactctattttctatctaagtattcattgaaattatacgactatgcaatttcccttttttcctttaacttttatttttcattttcttcgacttcgatattccatctcataggtttatatatgaaacaagcaaccaccggtccacattaactaacttatacaatacatttacatttatatatggtcaaataacttctatactgtaatatctttccccaattttttcatgttcgacctaaattattacgtctcatatataggatttggacttgtgtagtataatttcacatgcacgttaggaacgatcattagaaaaaattgaacctgtctatctcacccatattcttgatagtaactttttaaaaacgtatttgaagaaatagatattaattttgtcgaacatttgtgttatatatataaaacaaatgagttatgcaaaaggtattcataaattctttaagaaaggatatagtattataggatggggttatataagtatcaaacggagatggtgttacttgttagaattcctttcacgtttacgataagtctttcccactcttttaaaaaaaagtttaattcgcctttatacgtaatagtctttttccttatacttcttcccttaaacgttatttacacaaaaagaaaacagtgacatcgtatatttcccactagaaaaaagaaaagaagaaaagtctagttattgtttatcgctattatattttggatttataacgctatagattattgcatgtttggctaaaaactaaacattttaagtctcacgtttacattattgacacacagttggaaaaatcaagcgtacacaaagattatcgaactaatttattgtgtgtttctttatttttgactgggaataatttcatcgtcaacacgaaaaaggataatacctaaaaaaatgtgatattccaaaaataaataaaggaatggagtctaaatcggggcctggcttccatccgtttgggcaaccaatgaggtggattcgcgcgtcagaaaatgacacgtgggattcgtcatgtggccattcaccaacttggtccaagactctatcatccgttcccaactgccacgtgctcgaaacagagcaagttaacggttccaagaacatgaatacacgtggcatgacagctgaaattctgattggctttcacgtttatctacgccgctgattaatccacttggattggatgggccatcaccagctaacctttatttttatttttactttggtcgaagaacaacaaccatttttttccctaagttgttgctataatcggcatctatctttttgttactattattaattcgtctaattcttagcaatgacatctaaaaaaaaaacaaagaaaaaaaattgtcttcttcgaatttattaagagtagtataattaaacaaaaaaataataattataatgagcaagtgcgtttgttttagatcgagagacacatttctacgttgcttcatcggattcgtttaaataaaataaagttgtgtaatagtatttctttactttatataattgtatcaatgggaaaacaaaaggtgttttagttatattcttgtttgtgtataaactcatgattatggttatgaaaattgaaatcataaaaataaaagaaagtaggagggagatagagtcaacaaaggttgagctatcaaaaacaggtttcctcggaatgaagcatgtctccggccgcattatccgaccatttatccattatccattccttttcaaatcaaaaaccaaatataataaataaatgattaacaataattaatttgggtgttaaggaaaaaagggcttgtactccagaaccagaaggtacatgcccaaaccaaaatctcagtttaatttttatgtgaagccttaaagattttggttgagcctcactaaaacattatttaattgtttaaactcaatcgaaaatacaatatactagaagacgactttaacagacaacgatacctgaacaatcaattacagtggtattttttttatttccttggtaattgtattgattttcagtatatcctgttttttagttatagtttaacttgtaagatactaagatggcatgattcggataaagtttggtatgggaacacatcactctgcctaaattcctcaataaatgccggaatgagaaagataatatcaaattatgcatgtggatgagatcaaactctaataaacttataaaattctttgatgggacattctttcgacggtaaccatatttcgtcaatccatgtgatctctccatacacataataagtttaaaactgtgaaaaatctcgtactagagaacaatgacgtttgtggctatatatccgctatttttaaaaagtcgtaacaactttgatgtatatccgtttgggaacatggaaacatcttccatttcttctcctatgtcggactctttttttgacttttacgtgtgcacgaaaatggatacaacttggaataatacttatgtcatcgcaaaaacgtatcgtagaggaaagtccttatccactaaaagccccgatattcattttttttcttctaaaatatacaaaagctaacttaattgacgttaatcaagcaacacattcctcattcttttttcttttaaattctgattattataatagacacgacatattcaacctttaactccgcaattcccacacgcttatgtttcttcgtctcatgggaatgcctcgaatgagtctgatccattttcttatagactttacttgtttttttctgacaattatcaacaaaagcatgtttgtgcttctaccagagaacaaggcatgcttaacccctttatttcttctttaaacagtttataaattaacgtaacacttgatttaaattataatctgattttattatgaggataggctatgcaattttctaaaagagtttttaataatttgatgatattttgtgatatgtatctaaggaaagtttgtagtataattcagatagtatataatatgatataaatagataataaaataatataattcagaaagtttgttataggtgaggtttggcacttcaaaatcaaaccatcatttggactaagcaaggctgcaaccttttaaagatagatctacacaccaaccaacatagttgctatgcgcgacgaaagaaagaagataagtgaaggaatgaaacatatattctatgaagtaaaatctgaaatattatgtaaagtagactgtgcttttggttatatagctgaaactaaccaaacttgttatatgttggatatgttcctgtcatagttgctggagtattgtctgtttgagctattgaaacctttactgaagaagatgaaatatactcatttgcgtagttactgacagaatcagacaatgacattgttaaccaatataattgggttcagaaaattcctcaacggagagaaattaaaaccagaaaggtagttttgatgaagaaacaaaatatccataaacgtaacaaagaaattctgaacgtgaaagttttaaaggtccataaaataaataggaaaggctggcaaaagataagacggtgtattttaaccgaacagatcaaatcccatgtccccatcagactcttctgcagcttcttcctcaacagctactgccaccactgctccaccagactctcctgaaaccggtgcagccactgcaactgcaaacttggttggatcctgatccataaatgtacagttaacaaacaatttcatgactactaatcccaatatctgaaacgcaaaatgaaagaggacaaacctttaggaactccttcacattctcagcctgagggaaagagtactcagtagctaaggcaacagcaagaacgttcttgtaagcattgaggaacatgtgaggcgcagctgctacggttgggtaagagattgcaagagaaagcgcagtgatcatcgagacaccagctgcaaacttctcaacaaggtcgtcttcagtgaggttaagcacttcagggttaaacactgacccattatcgtagactgactcaacaacgagaccatacgaaaagggcctgattccaagcttggcaagaagcgcagcctcggatgaaccgactttgtcgcctttcttgatgagctccacaggggttatgatctcaaccgtacctttgttgattttggttggaatgttaagcacctggaagaaggaggtctgtgaagggtcaagaccagtgttgcctggttgcacgaccacatcaattggagcgactaaacctacacgagcaggagctccaacctgtcaaaaaaaggacaatgaatttctcatcaattaacagtacaagactaagttgaaaaaatcaatcaatccaacaacatgaaaggacgctacaaaaatgtgagcctaggaaactagtagactctcaagtaagtttcttgaatgtggttgcgtttcaagacagaaaatagaggttttgagttccaatttaaaccaaaatgcaaactttatcacctatccaccttacaagttaataacctaaagccataggttaaaggatgatcataaactgactaaatcatcaagtaacagtagaagctaaaaataaaccaatcaatcaaaacacaaaacagaaactacaaatgtcgtctcctcaaacctcaatgaaccaaaataactagtactataatctaatcaaccctatttgcttggaaagtgaaagtttgcatttgtgtttaaaatcgaataatacaacaccttgcattcttgcttacttagagataatcagatacagcataaaactaaccaaactaagtaataaaccaatcaatgaaaatgtaatctcctcaaagctcaacgaatcataataatctcaattagaatgtggctgcattttaagcaagaacacatatgatttcatttcaaactcaaaaatacaaactttcactttccaagctatcaatccatatttgaactctactaaagcttaacaacaacaataacatcaattgagccaaagaaacaaaccttgtacttagcaacctcttcactgacttccttcaagtcacccttagtgaagatcaacccaacattcccctgttaaatagattctaacaccaaaccaaatcaaattctccacaaaaccaaaaaatcaatactttatatccaaatgaaaacaaactattcaagacaagagaaatgaaacctgaagaagaggaaggagactgaggaaagcttgattgccagttttatcagcatgaatcctcacagatctcttcatcattgtgttcttccccatcaaaacaactgaatcacctcgtaaacctttccttatgttctgaagctgagttgatccaacattgtcagctgcaacgacaagaatctgagagtactcattcaaaagctgacaaagctttgaatcgtaaacgatcttcttctccgcctttgttgctttcaccgccatttccacttaaaaatgataaagtgagactaaagaaactaaattttggggtagagaaaatggagggcctagacgaagcttggagctcgtacaaggtggacagcgcgaattggcgctgtctctttaacctctgtaactgtttttaacagaggaaggaagagagaaagaaaaaaagctgcgtaagaatttgcttaaggttgaagaagaagtttcttgggtttatatagttatcggaagacggaaggatgaacggtcagggtttgtgggatgacctaaatctaacggcttatattatttgtagtagtatcaatgggatgggccaatattgcccaacatgtttaacattatgaatctttttcctattgggctaaaagctctttcgacccacatctcaagcccaactgagatccattcattgtaattcatactttattattttttatagtaaccaataagaaaatggttgacttaacagagaaaatggttgacccaaacaaatactatattatttttttaattcgatttcattcaaagaagcatttttgggagacgaggaggcgatccacggcttattcttaagaaaccttccacagtcgccgccgattttatcttctccgccgtaagtactctctttccctatcgaatctgaacgaaacagctcagcacattgtcatctctgtagcaaaattaagttcgtgtttttgtgttttgttgtgattctgtttaggtttcatttgggtttgaattttagggtatttttggtttatctctagtgttactgattcgggatttttgggaaagagctcaacttttgttttgtttcatctttcgttgattttgttgttacataggtttgaaaaaagggatcacttgtttggttgcctttgtttgtttgtttgattataacccaaagacttatacttttggtcctccaatttcttctgaaactacagggaattgtgagggatcaacaaatggctcccagaggaagaagaaaggtataagctgtactgttttttttgttttgtttttccaaattaaaatgctggctaacaagtaaagatatgagcttttgaatcatatagtttttagagagtatagtggaaaactaagataaaagcatagacatagacattagagtagaatgactatatagatgaagtatttgaatgacatgattgttgaagttaacattttgtttctctctacgacttctgtgtactcaacgttgagaacactgatgagataagtttacaaatacttctttttatgatgggtgttcttgtttttttccttctatgattatctctcttttctatgcttttaaattgctacttttcttttgcttttttgcagaaggctggattgatgcgagaggatgcagcacgagatcgcatgagaggatttgggtttcatgagcatgttatcagtgagagtattaaggaactgttagaggtttgttcgctagttttagggtctccatttttccgttgttgataacattttccttgcaacttgaaaataacgttttacccactttggatttcaggtctacgaagaccaatggtttttgattgaagatgatagctatggtcccctccttgctatctgccttgaaaagcaagaggaaaaagagaaacaattggctgaagtacaagccaaccaattgcctgagaatcacaatgaagagatggctgaggaagaacaacccaatcaattggctgtggaaatacacgaagaagagaaggtgatttgtttttcttccttctcgttctctttctgtgcaggttcacaaatctgttgcttccattgttgggattcgttttgctggcattattagaaaccattgacagaattcttgaacttggtttacccaaatggtatgtaacttgcagcatgatccatcttttgtaatacaggagcaggagcaggacatgcatattgagtatggaagagaccaagctgatgagttatcaatcaatagcgaagcagtcaatgacccatcaccagcagctattcatttgggagaagcatcatcagattatgcacaaagttctgttcgaggtaataaaagcttttttactcatatccataccaatctcaacataagaaatgaaacattcttttactgcggtcaaaataattgattaggtgtggagaatcttcattgtggatggctaattgatgaggaggagacggatcctgaggaggaaacggatccagaggagaaggagaccgagccagaggatccaaaggagaaggagacggagccagaggaggatagtgatggtgatgatgatgagatcattcagcttactccagaacctctttgtgaagaacttcaagagcttctcagggaagtacgtggacagaagaggaggaagaaagagatgaggtgggacaagtaaaggagctatggagctcctgtaagtagcaaattgatatatatgttaggaagccaaatagtagtagtaagctatagtattgtggtgaaaaaaggtaaaacgacccatcttaacatctcttgagatattggtttttaataatttgtgatggagtagagaaagcagatagtctttatcagtagttgtatgagtcatacaatagtacccgaacccacttatccaaagatcaatgtcgaaagtggaaaccaaatccctctaaagtaaattgaatagccagtctaaaagttagaccaaatctgaaagtcggtttaattgcaattataccttctaaatgcaagaaccaatatcaaccggtacttcatattcttttgatttttgatttgtacatataaacttttttttgtacatataaacttaaatgcaagtatagcttgacttgtattttacacatcagcggaaaagtttgagagaggaagcatattgtatttcgtttggttacaacttttgctaacttttacaataaatggaatgaaatttttttccacttaattcctcctgaatagaaagaaattgatgcaattttgttccctttttaaatccatgagccaataagtgcatctccaattatattccaaatttcactctaaatactaatttagaaaaaatccttttaataccactatattctcaactctaaaagggagtgatgaatatggtatgatatcatctgtcacttcattttggagttaccctttactttttatttacaaaatattttcctaaatttatactcatgttcttcatttatgtgtaaacaaaattatataaatgaagaaaaagagttattgttaaccttctccatgttttcattataaattgatatgagcattggttaccgttctttcggataaaaacgaagtttatctcttgaaaacattgttcctttcatattcatatcgcatcaatatataattgaaaagttcatttatggtgatcgatcaaatatataacaaaataaaatgaaaaaatactttaacattttatatataatttttgaagacaaaagagctgtttttttgtctttaattgattggtcaactgtttacatattcatttttttggtatgaactatttacaaattcatgaatacaaaaaatatctcaaatttttttttacaagtcgatccacttagttcttaccgtttttttggtataaccattattttataaaacatcgttcccgctagatttttatcgcatcaaacatagcgtactacaaacggaaacggtcatctatggcgatcgatcaaatatacaacaccaaaatcgaatccaaaaaatagtttacttgaagtatttatatgttttgcttcactgctaattctatggttttgaaatcctttattcttctcaaaaaaaaaaaaagtttgtcaatggttgttgacatggtcttgcataatatgtggataaatatttgttttaatcattttcatcatcattgcatattcccaagtgttatcaattgtttgacaaataaagaaaaattaaaattgatacctttttattttagttaattaataacgaaactgaaaatatttctccctttgcatgcaatgtgggttttaaagacggaagctgaagagtgaagaagaacaaaagatttttgagagagaaaagtagagtcactccaaaattgttctctcgcaatcttctttctcggtttcctcttttaagaaaaagtccgccattttcactctcactcagatttcttccctcttctcacctgcaaaaacccttgtttcccgctgtttcgtttcttctccggttgaggaaccaaaacgggtcaaatacgcagctgaatcatcgaattcttaggtattttcgtcttacccaactcttatctttagatgtttttccgggaaaagagctcgatcatgactccgccgtgtttttttttgggggggggggggtttctccgaaatgggtttcaaatgtaggttactctaggtttgaaagttcggattttttggttcactgtgtgttactacagcttcgattttgtgtaaacgagtataaaaattgtatcttttacagatttgagaacttgttcttcaaagacttgatttttctttgtatcaagttagtgagctcaaatgtctttgtttctctgtttgtttacatctgataagagctaactcggtctcgctggtgtgtgattttcgctcgttagggttttttcatggaggaagaatctacatcagagattcttgacggagagattgttggaatcacatttgctcttgctagtcaccatgaaatagtaagttataagagttatactctctggaattgatccatcttgttctgcatcaatgtttatcatgggttttacataactgaaggatttcgaatagctaaaacctctatgttttggttatctttggcactaaattcactataattgtactcaagctctgtgtgatgctaagtgctacacttttgcatataaatgttgttctgcgatatatcctctgtcactattccatttctcactggactgtaattctttcttgcagtgtattcaatcgattagtgaatccgcaattaatcatcccagtcaactcactaacgcattcttggggttacctcttgaatttggtaaatgtgaatcttgcggtgcgacagaaccagataaatgtgaaggtaatccagttccgtagttgctatatttttgttcttacatcatttgttggaatacttcttcagatatcggtatttgtttctacattttcaggtcattttggttatattcagcttccagtgccaatataccatcctgctcatgttaatgagttgaaacaaatgctgagccttctgtgcttgaaatgtctgaagataaagaaggcaaaggtattacctcattgagttttcttaaattccatgtgatccacacataaataaaccatataaaatctcgactaatctttttcacctttctgagtacagggcacaagtggtggtctggcggatcgcttgttgggtgtctgttgtgaggtgagtaatggcatatacattctgattgtttccttttaagttttacctgaaagcaagttgatagatgtttcttatgtgaacctggttcagcatttagttagtttttctaagttttccttcaactagttgcatgttagaaaacttgctaattcaaatctaaatagtatttgtgcttcttttgatccattcagtgaaagtaacattaatcaatgcttgtgaagcagtagctattggtattttcgtggcatcatgaaacattcactgctttatgttattttggatgttattattgctgaacgtcttggatttttaactactatattactttattaggaagcttcgcaaatctcaatcaaagatagagcatcagatggtgcctcatatctagaactgaagctcccatctaggtcaagactgcagcctggttgctggaatttcctggaaagatatggttatcgctatggaagcgattacacgcgtcccctgctggcaagagaggtttttactttcttctgtgtgtttatgtttctgtttatgtaggattttatggtgacgttctttttgttcatttggaatcattctctatctttaagatcttttctttctggaaactgatgattatgtactttccgtgtccttttccatatggtgggaaaacaaataggttaaggaaattctaagacggatccccgaagaatcaagaaagaaactcacggcaaagggacatattcctcaagaaggatacatactagagtatcttcctgtcccgcctaactgtttgtcagtgccagaggcttctgatggtttcagcaccatgtcagtggtaagttgaaactaaattactatgttgagttgaatgctttggcttgtgttgtaacccctggatttgtgtcattcttattttcaggatccttccagaattgagctaaaggacgttctgaagaaagtcatagccataaaaagctctaggtctggcgagacaaactttgagtcgcataaggctgaagccagtgagatgtttagagtggtggatacctatctccaggtgaggggtactgcaaaagcggcaagaaacattgatatgagatacggggtgtctaagatctcggatagttcatcttcaaaagcttggacagaaaaaatgagaacacttttcatccgtaagggttcaggtttctcttcccgtagcgtcatcactggagatgcttaccgacatgtgaatgaggtagggatcccaatagaaattgcgcagagaatcacatttgaggaaagggttagtgtccacaatagaggttatctacaaaagttggtagacgacaagttgtgtttgagttatactcaaggttctacgacctattctttaagggatggatccaaggggcacactgagcttaaacccgggcaggttgttcatcgcagggtcatggatggggatgttgtgtttatcaacagacccccgacaacacataaacattctcttcaagcgcttcgggtgtatgttcatgaagacaacaccgtgaagattaaccctctgatgtgtagccccctcagtgctgattttgatggtgattgtgtccatttgttctaccctcagtctcttagtgctaaggcagaggttatggagctcttctctgtggagaagcaactgcttagctcacatactggacagctgattttgcagatgggtagtgattctttactgtctttgagggtaatgctggagcgggtatttctggacaaggcaactgctcaacagttagctatgtatggctctctgtccctgccaccaccagcactaaggaagtccagtaaatctggcccagcttggacagttttccagattctacagcttgcctttccagaacgtctgagttgcaaaggagacagattcctggttgatggaagtgatttgctgaagtttgatttcggggttgacgcgatggggtccatcatcaatgaaattgtaacttcaatcttcctggagaagggtccaaaggagacacttggattctttgattcgctgcagcctctattgatggaaagtctgtttgctgagggatttagtctaagtttggaagacttatccatgtctagggcagacatggatgtaattcacaacctaataatccgagagatttcacctatggtgtctcgcttgagattatcatatagagatgaattgcagctagagaacagcatccacaaagtgaaggaagtggctgctaactttatgctgaagtcatattccattcggaacttgattgatatcaagagtaactcagcaatcaccaagctggtgcagcagacaggcttcttgggtcttcagctttctgacaagaagaagttttacacgaagactctggtagaggacatggctatcttttgtaagagaaagtatggcaggatttcttcatctggtgattttggaatagtgaagggctgcttctttcatgggctggatccgtatgaagagatggctcattcaattgcagctagggaggtaattgttcgctcttcaaggggattagctgagcctggaaccctctttaagaacctgatggctgttcttcgggatatcgtgattacaaacgatggaactgtaagaaacacctgtagtaactcagtcatccagttcaaatatggagttgattctgaacgtggacatcaaggtctgtttgaagctggagaacctgttggagtattggcagctactgccatgtcaaatcctgcatataaggcagtgcttgattcctctccaaatagtaattcatcatgggagctaatgaaggtatagcaatatcaaatctgccttctgaatacagctttgttcatctgtattgttgtgtaattgttttctgtatttgttcttttcccaggaagttctgctctgcaaagtcaatttccaaaacactactaatgatcggcgcgtaatcctttatttaaacgaatgccattgtggaaaaaggttttgccaggaaaatgctgcttgcacagtcaggaacaagctgaataaagttagtcttaaagatactgcagtggaattcctagtcgagtaagaattgggttttagtaacttcagtcgctctttttagtgtttgtgttattttttttttatggttttactaaacctctttgcaatctgctttctctttacttgcatgaagatatagaaagcaaccaactatatcagaaatttttggaattgattcatgcctacatggccatattcatcttaataaggtttgaatctggttcctttactgttgaatctttctggaagcctctacctgtcatagaaacactttcctattatccttttcttgctgtgtaattggtgtttttggtttactagacattgctgcaagattggaacatcagtatgcaggatatacatcaaaagtgtgaggatgtaattaactcactaggacaaaagaaaaagaagaaagctactgatgatttcaagagaacaagtttgtctgtcaggtttgtacaatgatttgcttttcctctggatgtcgtctctggttgaatgttatgcataatttgtccagaaagcaagtctgatgttgatttctagttttccagttatcttctttccatcatttttgttcttcatagcataatgtctagctttggtttctacctgattatgattgatttattctccaatgaacagtgagtgctgctctttccgagatccttgtgggagcaaaggttcggatatgccttgtttgacgttctcctacaatgccaccgatcccgatctagaacgaactcttgatgttctttgcaatacagtttacccagttctgctggaaatagtgatcaaaggtatttgaataaaacttttcatttttgtatatttcgcttgtttccctacacttcgatttcttctttgatgggggagcagtgtatctgatagagtcttcctttcaaaattttgtagttacatggcttacgaaattttgttttttgccagaagtttaatgaaccaaaatattttctcaactagtctgattgaattttcctccaagttgtgatcgatattctgtgctactataaaagaaagcctatgttttagtaagatttctagatacatgtttttgatgatactcctgtatctaaactgagcaggtgattcacggatttgctcagcaaatataatctggaatagttcagacatgacaacgtggatccggaatcgtcatgcatcccgccgaggggaatgggttttggatgtcactgttgaaaaatctgctgtcaagcaaagtggtgatgcatggagggttgtgatagactcatgtctttcagtgcttcatctaatagacacaaaacggtcaatcccttattctgtaaaacaagtgcaagaattgcttgggttatcctgtgcttttgagcaagcagtacaggtacttactaacttaaaacgtgatccgttcctggatcttacacttaagtcatgatacttcttacatatttcatgtttggtatcacatttgctcattgtttgtgtaaggattttaaacgtaagatgttgatttgatttgcagcgtctatcagcttcagtgagaatggtctccaagggagttttgaaagaacacatcattctcctagcaaacaacatgacttgttcagggactatgttgggtttcaattctggaggttacaaagctttgacccgatccttaaacatcaaggctccattcacagaagcaactctgattgttagtagttcaatcctttagtctaatacaaattattttcttagactatatactggccgtcatgttaacaggaattactttttgtgcctttaggcaccaagaaaatgttttgagaaagcggctgagaaatgtcatacagattcactatcaacagtcgttgggtcttgttcttggggaaaacgcgtggatgttggtacaggctcacagtttgagctcctatggaaccaaaaagaggtagacattctcactggaaatcataccaattgactgaggttttctcatataagtttgttatgtaattttatgtcatttgttgtcaacctatttgcagactggtctagatgataaagaagaaacagatgtgtacagcttccttcaaatggtcatatccacgacaaacgcagatgcatttgtttcttcccctggttttgatgttacagaggaagaaatggctgaatgggctgaatcgcccgagcgagactctgctcttggagagcccaagtttgaggacagtgccgacttccaaaatttacatgacgaaggcaagccatcaggagccaactgggagaaaagctcttcgtgggacaatggttgcagtggtggttcagagtggggagtctcaaaaagtacaggtggtgaggcaaacccggagtctaattgggaaaagactacaaatgttgagaaggaagatgcttggtctagttggaacactagaaaagatgctcaagaatcttccaagtcagattcagggggtgcttggggtataaagacaaaggatgctgatgcagatacaacaccaaactgggaaacaagtccagctccgaaggattccattgtcccagaaaataatgagccgacttctgacgtttggggacacaaatctgtttcagacaaatcgtgggacaaaaagaactggggaactgaatcagctcctgctgcatggggttctacagatgctgctgtttggggttctagtgataaaaagaactcggaaacagaatcagatgctgctgcttggggttccagggacaaaaataattctgacgttgggtcaggtgctggtgttttaggtccctggaacaagaagagctcggaaactgagtcaaatggtgctacttggggttctagtgacaaaaccaaatcaggtgctgctgcatggaattcttgggacaaaaagaacatagaaactgactcagaacctgctgcttggggttctcagggaaaaaagaattctgaaactgagtcaggtcctgctgcttggggtgcttgggacaaaaagaaatcggaaactgaaccaggtcctgctggttggggtatgggggacaaaaagaattctgaaactgaattaggccctgctgctatgggtaattgggacaaaaagaaatcggatacgaaatcaggtccagctgcttggggatctacagatgctgctgcttggggttctagtgacaaaaacaactcggaaactgaatcagatgctgctgcttggggttctaggaacaaaaagacttctgaaattgaatcaggtgctggcgcttggggttcgtggggacagccaagtcccactgcagaagacaaggataccaatgaggatgatagaaatccgtgggtttccttgaaggagaccaaaagtagagagaaggatgataaagagagaagccagtggggaaatccagccaagaaatttccatctagtggtggctggtccaatggtggtggtgcagactggaaaggaaataggaaccatactcctaggccacctagatctgaggataatttggctcccatgtttacagcaacgagacagcgcttggactcattcacctctgaggagcaagagctgctctcagatgttgagccagtcatgaggactctcaggaaaattatgcatccgtctgcgtatgcctttctagttcttacgctctgtttatacaatttccagttctatgtataattaattatgctgtttcacatgccatatacttgttatgcttcatctatctaaaactatcttctttcgatgaaggtaccctgatggagacccaatttctgatgatgacaagacgtttgtcctggagaagattttgaacttccatccccaaaaagagacaaagcttggttctggcgttgacttcatcacggtaaacaacatttctccttaacaaacttagcttctcttctaaagcttacttagccttatgcctgatgtgaaattcttggttgaacaacgatgtaggttgataagcacaccatcttctcagacagcaggtgcttctttgttgtctcaactgatggggccaaacaggacttttcataccgaaaatccctcaacaactatttgatgaagaaataccctgaccgtgctgaagaattcattgacaagtactttacgaaacctcggcctagcggaaacagagacaggaacaaccaagatgccacaccacctggggaagaacagtctcagcctccgaatcagtctataggtaatggaggtgacgactttcagacacagactcagtctcagtctccatctcagactcgggctcagtctccatctcaggctcaggctcagtctccatctcagacgcagtctcagtctcagtctcagtctcagtctcagtctcagtctcagtctcagtctcagtctcagtctcagtctcagtctcagtctcagtctcagtctcagtctccatcccagactcagactcagtctccgtctcagactcaggctcaggctcagtctccatcatctcagtctccgtcccagacgcagacataaactcttgagaaccaaagaagatttggttcgtttaggtaaaccattcagtctccactgttttgttttgatgtacataaagagtggagagaatggcggtttttatcattaaaagactctgatgtgaagtgcaaaacaatgtgtaaatgcagttctctagtttcagatcgtttgtcctaaaatcaggtttagggtttcagtgaccggtttagttataaagtctagcggcattgtagtgatgttttgacattgactatttatcgagcaatgcatttgccatctcatttgcttcttgtttgaaaccttcgagagacgaaaatgattgcctttctaatcgcataagcacatggttagaaattatatcttgtgttgaccgatgcagctcctccggcagaaaatcatctaattcaaagagctcttgtgtaattgcacgaattgagaaatcagtttagttttatgaaattgaaatcaataatagagaaattacattttattcagatgcatggatacattgtttaaatacattcatatgaacattcaacacggtagcctacatcatatattttccctatacaacggttcttgcaagaaccacataatggtcgagaaatattacatttgggaagaacttgaaccctgcatacccatttattgaaatattgaccgggcttgatatatgggtctccaccaattaagcattcaatatgaaaagtggtgcaacactcgttgcaccagtagaatacttttgtgcatgtatcctttaaactacgttcacatatttcacaccattcttgctcacgtacttcttcaccaaatgaaattgtgaggaagtgtgtgtcatgcttatattttattttgtatggtaaggtaacacacttaaaacatacaatgaaattgcatttgatgcaatttaattgttttaaacattctgttttgcatatatgacatatgggttttatttctgggtttaaagctaggaacaagggatcttcatgacctttgtaatcaaacggctcagaaattaaagcgcaccttacatcaagcttgaaaaagttgcatacctccatcctacagtgataggcaaagccaatagaaccacgatcacaagcgttgcaacggaaggtattgtaagtaaagctattgataacctccaatacaagtgggtgaggatgtaaggcatgttggattctacggggagccttagcacatgtttcatggaggatgaaatcacactccatacaaacatataagttaccttcatagataggaatggcacacgcttgacaaagcatgttttcatcataaacgttgctgacctcgagtcggagatgatgattatgatgaaaataaagtatcactccttcagatatcacctcgaacggtccatcattttctgttatatcgattatctctggtataccttcgagttcttttccatcccacacatctttcccaagagcgcatattgaatgaacaacataatcgctacacgtgtcacaagtatatgcaccataatcaacgttaatacttaaacggcaaactccacaaaaccattctctagatgtaagagaaaaagtgaacgagatacgatgacggtgacgtgatatcttgatgatgtgtggggaattcatacagtcattatgagttacaaagttacatctgaaacaaacgtaggtgggataaatttttctcaacaaaccacaaacattacaagtcaaggaagtttgtctggggaaaaaagtgagaggatggatatgcttttttggtgggtctataagaaaaggtattggcttcatcgcacatatgggatgcataaaagcctggcatgtggtgcaatgataaatcaaccaatgtgcttttcttccacaacataaacactcaatcttacgaaagttatcatcatgaaagaaaagttggagatagtgctcagggtggtaaggatgtttgattataagtggagattgaatgcattctttgtgtaattttatgctacaatagttgcagaaataatagtcggtgccggaatttgagccttcgcatatgtagcatccaccatcagcatcaaattctttattgttgcaccaaaacaaagggagtacatgatgatcatgagaggtcgtcgttgtagaaaggacgtactcgggggaagaattaagcggataagtgtctgaatacgacttgatttttcgacgtcgtgatcgagggcataagaaaagaggttgaaggtcactggaggaggttacggtctgtgtttggggtatggggcaatatttcggatgatggtataccaaaacaaggttaccatccttttccacctcataaaatcctccgacgctagaatccatgaatgtgttaagtctttgtttatttttgttttaggcttttataaaaaaatatttgtcatacaagatatcaagttgttaacatttttcctctataaatacgaaaatttgattccaaaagttttcttctactcttgattattaatatacttaaacgtgaaaacatatggttgattttgttccttttctcagtagttgtgatgataatgttcttctttacatgcaaataaagaatcaacttttctttgcacatagttttgttcatttctgatgttccatgacttcaagactctatattaatcgtgctcaatgattgtgccaattcattagtagtgtataatttgagactttgtgaactcaatcacgaaacacacaaaaagaaaatgaaggtttattcaaaaaaaaaaaaaaaatgaaggtttgaaatggaaaatgaaacaatcgtaccaaaaccaaattgcaaaacgttttaaacaagaaaagaagaacacgtagtttcaatgatccggttgaattagaaagtagaacaaccgaacccacactaaattgcaaaacgttttgattaagataagaagaacacgtatggaacattaattgtaatctaatggatcggttggaacctaaaccataactaaaccggaatactcatgatgaattggaagtatttgggctcgaaaaaagcccattaagaaaaatggaaataaaaatagtcacaaatctccgttattaatttttgccataagcttgagaacacttgaaaagacaagattcgcgagttcttcgttctgcctttttttttttttttgtgtgttcgagagatgtctgcctttgaagacgattccttcgtcatactcaacgatgatgcgtctgagtctgttccagtctcaggctcttttgacgccactgattctttctcagctttcgacggctcactccaagtcgaggactccgtcgacgatgtttttgcagcgccgtcttctgactacggtgcttactccaacggtgacggcatcttcggatccaacggggatcacgacggtcctatcttgccaccaccgtcggagatggaatcagatgagggatttgctcttagagaatggagaaggttagatctactcaaagttttgatctttgttgctttttgtttacttcttcctgaagaaaatcgataaagtggataaatttagttgagaatctctttgataatctgagaatttcaattttgaattttgattcacaatttttgtgaattgaagttatctgctagttagtgtccattgttctcagaagtaatcagtttattagattggatctgttacttttgcttagagtttattgctcaaatcgtgtgttctagaataacatcttgatccgtaagcttgtaatgcttgttgagttgattaagatgtatagatctgatttcgtgctatggctttattatgtttatgtgtagacaaaatgcaattcaacttgaggagaaggagaagagagaaaaggaattgttgaagcaaattattgaggaagctgatcaatacaaagaagagtttcataagaagattgaagtaacttgtgaaaacaacaaagcagctaacagagagaaggaaaaggtttgttcttttgctaaaagatttgaattttttatcatcttttctcaatctgtgttgttgtcatgtggtttgtggagaattgtcaatgcaagtcaatggcttgttgatattaaaattttcaaactttgaccatcttagtcttaagtcaactgtgattgattatcttaatgcattgtcagttttgagattatcttaatacattgattatcttcattacgtgtgtgatctttgatacctttttatctgcatattgcattgttacagtgttgattaaactttcacttatgtgtttatttgtctttgaacacttaagctgtatctggagaaccaagagaagttctacgcggaatccagcaagaattactggaaggcaatagcagagctagttcctaaagaagttccaacaatagagaaaaggagaggaaaaaaagagcaacaagatcctaagaagccaacagtctctgtgattcaaggtccaaagcccggtaagccaaccgatctaacaagaatgagacaaatattggtgaagctcaaacacaacccaccttctcacctgaaactcacttctcaacctccatcggaggaggcggctgctcctccaaagaatgttcccgaaaccaagcccactgaggcagttactgctgcttaaaaacctcctttgttttcttattcgttgcttacatctgtgtgaattcagtctttgcatttcattatgtgttataaacagctgagagattttatggttcatgtgtgttattaacataattatgtcatattggaatgataactttttatgttttagtcagttaccattgaatagtggttaatatctcaaatcaatcggttaaaggatccatccattttagggttaaagtagagacgagagtggagaggtttacataaaacatcaaaacgctacttcacatatcatcattatcaaactcgtgtgataattaaaactcacaaacaataaaagagaatctcaaatgtgaacgttttacaaaaggcttttcttctttcttccttcatctcccttgtaagcttgcaggggacctgcaacctctctcgctgcctgcgtcgtcttccttttcacttgcctctaagcaaatgccattgttgttgcagacactgatctctgagcttgcgttgctgcttgttgctagtggagaagagtctgaaacattcatcggtctaccacgtgtatgtccagacctcacactgtacattgatgatgctggaatattcgtcattagtggtctcaggttccctggaatagttctacgtatatcctgttttcatcaaaacgtttgatcatcagttaaacgcaattgccaccacttgaggaagagagaagagagagatacataccatatgccttattgccatatcaagggacttcttggagagcgttcttccaaatcctgcactgtcgggtgatgaagactttgcagacaagttaccatgaggagaacccttgtcatctgatctgggtggagcaagtttccgcatgtttattactctctccaccatttttgttcccatcatcaccggactaacattgtcactggctttggaatatccacgattaaccgcaggaacagagctaccactagagtacattggtgctcttcctcttgatggtgaacatgattgccttcttggtcttcctcctggagggccccctggctcaactgaaccagaacgagagcttggagctccaggtctgcctcttgtcgctgaaagtggcctttcgggtaatgttgtccttagatttggaggagtttctaatgagaaaccaggcatgtctgacggcttccatggtcttgacctcactgtaggagatgctgcacgagataaagcagggttcttagatggtgttggcataggctttgctggcgctggagaagaaggcttgatttgggatattgtgggatttgctgtagtagttgcagcacttgcagaagcaattggacggcgagttggtgtagatgaccttgatatggttttagatggaggaagtgtgggtcttgaagttggtgttgaagatctggcagtagatcttgacagaggtgtggtggaccttgaaggacctgcagattttgtggtggtgctaggggtagatctagttactgaaccagcagatctagcagttgaggtagtcggcttagatgcagtaggtgtgagcctagatgatgataaacttgttgacctactcataggcgtgggcttagtcgttgcagatactgtggacctcgagttagtcaaagaaggtcgagtagctgaggagacagtggctcgcgaagtgggtgttgaaggccttgaggattttgaatttgccgtcagtgttgatgatcttccagtgggtgtggcaggtcttgatccaggtcctccagatgatgaaggtcttcgacttgctccactggaagagctcaatccaggagaagaagtttgttgtctagatgttagatggttccttgcagcagactctgttgaggaatttgccagctacgacagataattcataggttaccataacgaagtagtgaaaatgtgctactctaaaaaaaatccagagcaacatcccacatagcaataacgataaatgcgatttactagtgtaaatcatgaaacttgaaatgtaaacgtcacagactgatgcggcaggttaaactagtagtggcgattcaaaacatataaacaataacagcagagctttattttaatactggttgcactacattaggttgtttatctagtatccattccaggagttgataaaagaggtcagaacactaagcaataacattcttactctggaagtcaatgtagccgggcgactctttgaatcaccagtctgactcatcatagtcctatgtgattccatctccagcgatggaaatagaggcgtacctggaggggtcagaagccttcgaaagacaagaagaagttagggtggaaatgataaacagataaatgatatattgttcaagaaagtatatgaatgtctaagaagaggtaaacagagatgctggaatgatgaacaccttatgcagcaaaattctaaacttgataagaattcagtgcaagactcgcacacctcacaaacaaagggttccaaattgtgacaccaaattcgagtctattagattaaacacatgccttatacagaatgatgtaatgtgaagaaacaacacaatttcaaggaaacaaaactaccacacatatattacttcagaacctcatggttaagatacagcaaatcagtaactatactatcacaaagaatacttaaaccgcctgcacttaaggtggctaagaaaattcaaaccatcaccggtgaatatgttactgaagtaatgaaccatagcgtcgcaacatgaaagtttgtgatcaaaaagttaccattcatagtcatttttatcgccttcagaattgagaaaatcatcaggagcagccttccgagatggtggagcaccacttgagatgttaaacaccggcgaagttccatgctttgaacctaaatagaccaaaccccatcaataactaatcaacctccaagctcaaatcagaaacctgattccacaaaattagaaagaaagaaaacatattacatacctaatggagtttcaaactcatcagggttattgttaagaagaagattatcctgctctttctcacggcgtctcatctcaagaaacaaagaaagctcttcatctttctcagccatcatagaagccctaagctgttgcctttgtctctctgctgaatccagcaatagagactcttttgccctaaaacttcgattcattgctcaccaaactttacaacagatcaaagagatacactaacttagcttccaatttactcccaacggataataattatcctataatctttaaaaagttaaataattgtcctaaaatttaagaaccccaaaacgaaaaatcgaaactttcacaagcttaacttgcaacacatttttcagaaatttcccattttgaaagttagtataaaaaaggggaaagttagcttttttaatagaaggaagacacgagctttcttctcaaagaaaccgccattatcgaggaacggagctcaagaccctagcccaactacagttaacggagaaaaaaacccagaagcagaagaaataaaaaaaaactaacagagaaagagagagattttgggagatcgagggagagagattgaggaattgggagagagaaaagagaaagtgtgaagacgagtggcattgagtgtaaatactgagctttgtgatcggttaaattggaaactttttcataagttcaaaagaaaaaaagtttattttttgggtttgatgagaagaaaaattcagtgacgggacatgacatctggactggtacctaatgtgttatcaattgtttctatcgcttgaagcctaaggattctcaatgattattccgatgtttttttgtttgtattttaagattatattgtcagagttttatattcttcaaccattgaaacacgacttactcgaaattgatcaatgattcttgagtttattgtattgtaatcacgtttgttgaaccatataaagaaatattgttcggagtggtaagacctttgtttgaatcctaattattaaagttgaacactatatagacctaactaataaatttatttcaattggaaattagttttttcatacattattaggtcttaatctgtcattaagtacctactgattaggtaacatactaaaatttctagttttggcaatgattttaagcttaaatattctaagaaaaatataaatttttaagctcattattggcaattgtgttttgggaggggttgacattttgaaaagttggtggatcggattgttgttgttcagttggttagtaactcacttaaaacactattgagttatgaagtctaatgtttgatccgaagatcgggccgggcattaatcgatataagctaaaagaaagggtgatatattgtcatagttcgagtgtcttttggttaaaattccggtttagaatgctcaaacgaagtactaactattttggtatcactttgttagacaagtttggaggaaggagtgatagtgcgtgatgtttgttgtcactatattgcaacatttctcaacatttttgttgtaatatacgataaactgtgtggttgtgtgaaacatcatttggatttcttgactaaggatcggatttgccgtcgtagatggagagctaagtttgattaatagtttaaaacttaatattccactagatttatatgattgtgattagtgtcgtacacactggtcgagacttgtagggcaaaatcctaaattttagatgttgctaatttggaatacactgcaccttcatttgtcttccctaggctcaagcctacaagtcaagagattagcctctgtacctctatctctagtatgtatacccgtgtaatcttcttcttgaggaaaaaagaaaaagctcatataagaacttctatgaagaaaaaaggtttacataacttaatctgatgaaagagacaaaaaaattcaatggtccagtaagacaagataatataaaaggacagatatttctcctacgatttatatggtcaagggcatgtacaatgtcattgtcaccaccatcacataactgatgaacaccatcatgttgaaaacaaagtgtttggagaagacaaagccagtagttgtcaaaatggtacagagaattttgtcataaatgaagtattatgacacgaaaacgttgaagatagatttgatcatgtggtgtatttcctaaaaaaaggaatataagttacttcaaaatccttacaatcacacaatctttaatatgtcaattacatctaatgatatgaaaatgtatcctcttctatataaagattaaagagtaaacaatataaatgaaaatgtatcctcatgagtcatgattcaagaataacatcaaccatatcagtgttgtaatgtttctaatctaacacatcttatgtccaccacagtccaaattaagccaagtgcaaactgcttaatgacatcaactccaacaagcagtcgattcttgcgagcccgacaaaccccatcaggcccaagtagttgttttctttcaattgtttagtttgatattaatgtgacctctgtttttttatccttttcgaccatcaattatttttcctgcttagacaaagtaagtttgtaatggttttgaatcgtttttgtatgaaatattttttctcacgaagaacaaaattcttaatgctcaacagaaaaatcaaattcaaatgttacaaagtatcgtacataatttccttatatataccatattacacacacaaagagagcaagaatttgctattttatgatgactgagaatataaggtacaagaagtttacaagaaaaagtagtgaaatcataaatttactcagtcacagcagagctaatcactttaaacctcttcatatgccattttaatcccaaaaaaaacttataggtttgatagttcatgttttgatatgaaattggccatttgtcccctttcaaataactatgcttctttttagtcctttttgtgcaaaagctctttcgtcttcttaagatctttgctttctagtggtatatgaatgccgaaatagtttgcctgggttttagatcatgatctcatgtatcaacatttattttactgcagtttctgtttgctttttgatggaaatgaatattgtcacaacgtagaaattttctatgctagagttctctaatacacagcctagtgaaaagtcactagaaaacaactgtatttaacatgtcataccaaattgcatcactatgtgacgaaattacttactccaagttgcaacaatctaaccacaagccttcatttattatcaaggtcacatgagaaaagtctctaaatagaatcaaaccagaagtaatctaatactgtatcaattattattataatcattagagagattgcagtagagacacattgaaaaagactcaaaaccataactaaaataaccccaatagagatgggtttgctcccacggattattctaacgacaatcatcattgcaatacaaaaactaaacatttactttatatcatagcttgaaccggacagattcaaaattctcaaaccggccggtccaactaagaagaaacaatttgattccggttcattaagctctagttccggcagcaccaccaccatcgtgaccgttcttcccaccgtgaaagcccgacgagaaactagtattgagatcagaatacatgttaacaaccttggaaatgtttccgttgagttcttgaatcaaagcaacgttcttcgacatgttatcagccattctcgattggtgattgtcgttgacttgttgaatcagtgatctgtttctgtctaaaactgattgcacttgtctgaaattccggtcaagattctcccacatcgccggatcctctccctgctctgcctcctccgccacgttcctccgccgtttcgtctcgccgttcctcttcataataatttttaattgtgtttttctctctttttgattttcgtcaaagtcgagagaaatcagatatttatagtaaatatcttctgagtagaatcggacaccgaggcgagtaagttctgtttcatcaccacttgattaacaagagcgtgtatctcacgtagacgtatctatctgatatcaaagaacacgcgcgtgagtgaagctgtgaagtgattgggtagaggaataaaaagtacatatctttttatgcacttttcttggatttatttttaattaaaccatggagagagataaggatcttattgtagaaatatctaaagatatttattgtaaagtgaatataaagtaaaatatgaataaaatagggaaaaaggtatatggtgtacgacttgccacggtgcagcaggaaccaaattcctatacgcatgatctcatgtttaatgaattgtagtgtttcacatctaattagttccaagtttagataaacattacaaagagtgttagattctttagagaacaaacaagaagaagaatctctaagaaactttctttagttaattccaagcttcatgttatgcaagacaagagctacaataatccgcaagatatttttttgtagtatgatcagaatttggttcccggaacctgggcactaactaccaaaatcaaaattccaaagaaccatagtgaaaccatgattctcctcccaactttttcttccattacaaagaacaaaactttatttcactttttttggcccttccctttcgactgttatatatgatacaatcatcctataatgataatgattaagatgatgaattgcataaatgattctaaaaatcatgagtcatgacaatggtgatgcacaaacaactcgatgctgagaagcaataagagtatagggacctcaattcatttcagtcaccaatgagtaatgatgaaaaacatttaatttatttttggcaatacagttcttaaccgcaacattttccaaactgtttcacaaatgaatccactaactggaaaaacatgtgccagattttacttagaacgaccttttatgacacaatgcaatcttgcaataagagctaaatgcgctaaaacttaagctggcttctcaaagataaagaagcagataggaaaaccaatagaaatggtaattctgcaacatctaaatgggttggtaagtggaaagattcagaagtggactcacaatggctctaacttgaatccaagttcatagaagtacgagtggtaatctttattactaccattcatattgaatgcttatttggtgaatacccataaatgaagcaatgtcaccttctcgagatatatgggaataaggttcaaattcgtcgcaaatgtaatgtttctcgaccattatgcgttacttgcgaaaaccattgtcaaggtaaaacatttacgatagacaactgcatattatatgttatgtggaatgtgtttgattcttccttcaaaaaaacttgtaatttctcttttagtagacttattgatctgttaagggttggctttgatgatttagagtgataaagataattaccgcaggaaatcatgaggggcagagagatagaaacatgatagaaataggttactagtgaagaaacaaaaaaaaaaagtctaataaacaaactaagaatcagagtcctctggatcttccactgatgattccgcttgctcttcttcttctcccactgcattatcatcaaaattgtttatctctttttctagaaaacacaacgtagaataggaagatgaaacacacacaaaccttcgaattctagttccctaagaatggcattaaactgatttctcaactcgcgcaattccacaagagctctttgaatcctttgaatgagatgattttctgccggaggagctgcatcggcggcgatcaccaccggacggcgctgagaagctgacggagaagcttcgtcgtataatggaggatcaacaacaactggttttggaacagcatcactctcttccatctacaacaacaatgacaaattcaaacaaaatgtgtaagctttttcaaaaaagctgtgagaccccaaatatcaaaatcacatctttaatagacctaatttcatcaacagaaatagattacgtgtaataaaacaatgacccatcaatcgaattttaacaatgtgcttctgcgatttcgaaaggcactcaatttgtttctctctagggtttatcaaatgtaggtgacacgaaacacaaagcgaaatgatagagacgaagaaagatagagactttaccggagaaaatgtccttattgatcgcaggggagattatagagcggtggagacagaaggagtcgcggctgcgtagaagagacagacagacagactcgagtgttgaaaagacagaacagagaataagatcttggtcgctgcataattcaggtttctcaatttaaccaaacccaaaaccgaaccaaaccgaaccatctcggttcaatttgattcagatgtcaacacctgtttacataaggttctcataaatgatggaaaaaaatgagtagaaattctcaattgtttttgtaagaaatactattaagaagataataagatttatataaaaaaaaatttaaagtaataagctcttcccagcatacaaatgatacaaatctcatagtatatataaagttgatttattggtttgttacataacagccttgtgtagtatacaaagaatgataaatgttattttttgatacccacttaccaaagaatagagagaggtgtgtaatataaaattggcaggaacgttttatattaaagggttaaggattttctgacttgtaagatccaaagtgcaaattgcattacccaaagccttgcttcaacagagaacccttcaaaccataccttcagccatttcatcaacgatttcttttcagctctctttgcctctaaaaccgcttgggaagatactttcccgatgatcaagaacgactcgagagacgatccttgcattagctcattgttaactgaccggagacagtcgtttgttttcagcatcagaaggatcacgcgtggcaatctcctgagaagctctgagatttcggagaagtactgtgatgcatacatctgtagctctgatacatcttctttgttgccttggatgactaaatgatccacagatgtgtcgatgacttgcttccatggtctcattgtaagtatcccggcgaataggacgtatagatcatctccagcgcctaatttctcactgtgttctttaatggctttagcatccgaaaagaccaatgctttccacagtgaagcatagttgaatcttgtgttgaagtcaagctccttgtacaagccatggtcaagaatcactaattgcggttttctcttgccatatatgttcctcttaccagaaggatctggacgaacaatcaaattggcagcgtgtgggtcacagtgcacaaacccatgtttaaacatcatttctgcaaatgtttgactcacctgcaagaaaagagtttaaagcatatcaaagtttgtttcttcatagtagtctacaaggtattataaagataagtctttgaaattaccaaactcttacttgaacggcaactactatttagctaaattcaagaaatgcatgatattttaaggaacatagatgaaagagcttacgagctttgatacttcatagggctgaatcccaagctttctgatcttatcaacatcgttcacttgagcaccatccatgaactccattgtcaacaacttagaggtactcaaattccaatagattgttggcgcataaacatactctgcaatatggggagacagcttcctaaaattatccagacatttctcattgtttttcgcctcaaccaaaaaatctagttcctgatgaaaattacattaataaaaacaagagcaattaaaatatcaaaccagtgacagcaaaagctcaatggcgaccatacaaaaatgcttcagaacagaaaccttaatattcagataaacatatacaagactgaagactgtataaacctattaaagaaaatcttcatatgttatgacttatgaatcaactaaagacaccaacctttggtaagctttcactcatttcgtcgagcaaccacctgcatacatgagccggtataagctatttgctagaggctcacacaatatgaattgtctacagaaaaagagaaagtggctgcacctatagtcaaatgatgggaatattcggtgcaaggtattcactaaaactccaacagctgcagtgtccgcagctgcagtgtctgtcatgtgcgcatgttgaacctgcagaaaaaagatttaagaacataatagaataaatacaaacttactcttaacaagtccaagatctttaattatccgcaacatataaagtaaacgagtaccttgacagcaaccttttttccatcatgagtgcgagcaacatgaacttgagcaagggaagcacttgcaattggaacagggtcaaattcagcaaatacctgcagatcaaatacgatagccaagtgagatgcaatcataactcaagcgtttaaaactctggttatatacatgaagacaggaacgtaaaatagaacatacttggtctggcatctctccaacctctttcttaaaaacctcacatacttgctcatatgaagaaatagggcatttgttcaacatggactccctcatagtacgaacatactcttcaggcacaagatattccttgaaacaagaaaaccgtaaaacccgttggttttcttaacataacataatcattattacaacttgagacattcaatgctacagaaagaagaaaaagctttacatactagttgtcctatatgttggccgagtttgatatagattcctccatttttaaaacagagctcttgaagcttttgagctgaccttaggtggacttcatgtttgaccttagctctctcactgcttccctcagccaaacccaacaacgagtactcataatctaacacaacacaaaccacaaaaatatatattgattcaactatgcaaatcccaattgtcagaaattgaaaacgattaatgtttaattccacaaacttaaagctttccaataagattagtgcaaagccagtctcattaatcaaagcacagaaccaaatcaattgaaaaaggtgaaatttaggcattgaagcgaaacaaatcatgtaaagtattatcctttaatggtttagtttccgtaccgaaagcaatagaggcggcggtaacggtattgcggtagagacgaacggggatggaggtgcaaagctt

SEQ ID NO: 354 - DNA, 19304 bp, Arabidopsis thaliana
accctggagtccgcccctggtccgctagagagcgattaatgatctcataaatgagggaaaaaaatgagtagaaattctcaattgtttttgtaagaaatactattaagaagataataagatttatataaaaaaaaatttaaagtaataagctcttcccagcatacaaatgatacaaatctcatagtatatataaagttgatttattggtttgttacataacagccttgtgtagtatacaaagaatgataaatgttattttttgatacccacttaccaaagaatagagagaggtgtgtaatataaaattggcaggaacgttttatattaaagggttaaggattttctgacttgtaagatccaaagtgcaaattgcattacccaaagccttgcttcaacagagaacccttcaaaccataccttcagccatttcatcaacgatttcttttcagctctctttgcctctaaaaccgcttgggaagatactttcccgatgatcaagaacgactcgagagacgatccttgcattagctcattgttaactgaccggagacagtcgtttgttttcagcatcagaaggatcacgcgtggcaatctcctgagaagctctgagatttcggagaagtactgtgatgcatacatctgtagctctgatacatcttctttgttgccttggatgactaaatgatccacagatgtgtcgatgacttgcttccatggtctcattgtaagtatcccggcgaataggacgtatagatcatctccagcgcctaatttctcactgtgttctttaatggctttagcatccgaaaagaccaatgctttccacagtgaagcatagttgaatcttgtgttgaagtcaagctccttgtacaagccatggtcaagaatcactaattgcggttttctcttgccatatatgttcctcttaccagaaggatctggacgaacaatcaaattggcagcgtgtgggtcacagtgcacaaacccatgtttaaacatcatttctgcaaatgtttgactcacctgcaagaaaagagtttaaagcatatcaaagtttgtttcttcatagtagtctacaaggtattataaagataagtctttgaaattaccaaactcttacttgaacggcaactactatttagctaaattcaagaaatgcatgatattttaaggaacatagatgaaagagcttacgagctttgatacttcatagggctgaatcccaagctttctgatcttatcaacatcgttcacttgagcaccatccatgaactccattgtcaacaacttagaggtactcaaattccaatagattgttggcgcataaacatactctgcaatatggggagacagcttcctaaaattatccagacatttctcattgtttttcgcctcaaccaaaaaatctagttcctgatgaaaattacattaataaaaacaagagcaattaaaatatcaaaccagtgacagcaaaagctcaatggcgaccatacaaaaatgcttcagaacagaaaccttaatattcagataaacatatacaagactgaagactgtataaacctattaaagaaaatcttcatatgttatgacttatgaatcaactaaagacaccaacctttggtaagctttcactcatttcgtcgagcaaccacctgcatacatgagccggtataagctatttgctagaggctcacacaatatgaattgtctacagaaaaagagaaagtggctgcacctatagtcaaatgatgggaatattcggtgcaaggtattcactaaaactccaacagctgcagtgtccgcagctgcagtgtctgtcatgtgcgcatgttgaacctgcagaaaaaagatttaagaacataatagaataaatacaaacttactcttaacaagtccaagatctttaattatccgcaacatataaagtaaacgagtaccttgacagcaaccttttttccatcatgagtgcgagcaacatgaacttgagcaagggaagcacttgcaattggaacagggtcaaattcagcaaatacctgcagatcaaatacgatagccaagtgagatgcaatcataactcaagcgtttaaaactctggttatatacatgaagacaggaacgtaaaatagaacatacttggtctggcatctctccaacctctttcttaaaaacctcacatacttgctcatatgaagaaatagggcatttgttcaacatggactccctcatagtacgaacatactcttcaggcacaagatattccttgaaacaagaaaaccgtaaaacccgttggttttcttaacataacataatcattattacaacttgagacattcaatgctacagaaagaagaaaaagctttacatactagttgtcctatatgttggccgagtttgatatagattcctccatttttaaaacagagctcttgaagcttttgagctgaccttaggtggacttcatgtttgaccttagctctctcactgcttccctcagccaaacccaacaacgagtactcataatctaacacaacacaaaccacaaaaatatatattgattcaactatgcaaatcccaattgtcagaaattgaaaacgattaatgtttaattccacaaacttaaagctttccaataagattagtgcaaagccagtctcattaatcaaagcacagaaccaaatcaattgaaaaaggtgaaatttaggcattgaagcgaaacaaatcatgtaaagtattatcctttaatggtttagtttccgtaccgaaagcaatagaggcggcggtaacggtattgcggtagagacgaacggggatggaggtgcaaagcttgagggttgttgatgggtcatcggaggaagcaatgaaggcggcgccggaaccaccgcataaggcggtaccaacaacgaggagcttcgtacgggttctccatagggatcgtgccgccattgaggaagcacgtaatgaacgcacgcctcagcagatcggaggagaaatagaaagcgagcgagcgaaaacaagtggtttattccgacaaggctaaatttgcgttcaatttgttcggaagatgcggattcggatcttgtttgatgtgggccttacttattgggcttgtaatgggtctggcgttggactattctttgaaaactacgagtgtgtgtatttacgaattatgaattcatagagttaggctaaattactaattatgattttggtgtggttttaacaattgtttcaggataaacagttttaaacatgaaaataaagataaaatttgaattttttgtttctttttctaattatttttgatatttatacattgctagttatacattacatttgtctaatatcacatatattaacaaaagatgtaatatataattagaaatgattgtgagaaaaatggagattattgtattttgataaaatattctctcttttctagttattttgatataaaactcgtaatatagcctcaatatttttctaatataaacaattctagcaataatgtaatatcaaatttattttattttttgacaaatgtaaaatatttttgtgaggttttaggtttataattgtgccactattttggtggagtataatcaaaggagaaagctttataagcgacgagtgcatgtttttggtgagctgatatgtcttgactcttgacttgagaagtttcttcaacttccggtcagtttcgtaggcctataaactcttgactttcagctcctccctctttattttggatggtcctactctaattattgatatgcaaatctgaccgttgctatcacaagaaacaaaacaagcaaagagacacatatttgttgttcggttaattaattctcatcatcggagtttggtgacaatttgtaattatatattccaggtaagaataatctgtcactaaatctaatttagaatgttcagctggaaaacaacaaaaacgaaataagtttggaaaaattctattagaacatatcctgatttccgaaatttcctaaggttttgcttaacagtcaatatatacatatatcattccatttacgagacaaattgtaaatgatcaacaattgactagtacatacactcacgcaaagatatacgcgtacaaagtaaagagttacgacttttttattagtttgtttgtgtaataacttggcaatgctttctttataacaaacaagtaaattaaattcctatcgaatgttttgaaaagtttgataagaaaaggcaatcatttcctatctttatatttggtagcattagacgagaaaacaatgaaagatcacaatcaaacacaaaatagttattaaaaaaattggatacgatagttcactgtttcttttagtacaatgaaacaaaaaaaaaataaaaaaaaataacaccgtaagatataagttagggtaacaaacggcatgcatgtggtcacatggctgaaatcggtcggttcctccattcccgtatatgtttgtgttaacgaataaacgagtctcggttcatttcttcggcgggagaggatgggtctaacattattttactagtaacaatttaataaaacgataaacatatattgtgatgattttaaaatattccaatccattatatattatatacaaatgaaatcaagaaagaaagaaaaaatgttccaattatcgagttttgtttatgcttcacgttatttaggttttaccgttattacacggaggctgaaatctgaagactccgaacactattttgttttaatttaatacaccagtcaaaggattcaaagagctggaagtttctctcaacatttttttttctagaatgtttcagtttccaattactatttaagatttttcagttggctaatttttattttattttagtgtgaatgagagaaataaataattttacaaaaaaaattattaagaaagtaatacaaataaaaattcaaatatgaatagcctcatttttgtgtgattatgattaacattacatgtatccttaattttaagagggttgagagcgttttatctattaacgagacatttaggagattcagatgatggaagatcagagcatctaccaaaaaactttgcttactaaaaagtatttaggaagcaatgttttggaagttttacctcaacaatatttacgaaaaagctttcttttgatgtttttaagtattattactcagcatataaagaaacaactgaaatttataaatagaaagtggaaaataattaactaacccacaaatcctatattcatcaaaattatgtatgaggatgtaatttcataacatataaattgtggatctgtatcaatcgtcaatatcaataaaaaaattaggatagatcgacgaatgaattgactttcattcatcttacgattcttttaaaaattaatcaaacatgatttacatacaagaaaattaaatcaacaacgaaaacatttatagaaaagaaatattcaaaagatttttatagaaagaataaaatttaataattatattatatagaagaaatccataggtaaaaagatatagacagataaaaattaccaaactaatccaaaattctatattcatataaatattccaagtccaacaaggaaaaatcataatagtataaattaatcccttagtatttatcttagcatcatcatcgccgtcatcgtcactttgtctcgtccaccttttaaaaaccctctctaaagtctccgaaacatcttctctcttaaacaaatcctctctgattcgatgggttttagcaaagaagagattagtaaaaccagaaagctttggtcatctctatggagaggaatcaaaactatattcgttttgttcacaatgttcttctcttttctccttgtctctgctcctatcttcctcgccgtcgccgatgctctcctcccttccgctctcctccaccgcttctcttcgccggcgactctctcttctcatctcaccaactacgatttccgtcactccctcatcgatattcctttaatctcaatcattagatccgctgttatactctgtgagtaaaaaaaagattcaaactttacaaaacccaaaaaaaaaacagagcaattgctctgtttgctctgtttctgaagaaatcgaaaactcatttctttagtttgatttttcgtgtaaacaggtgtttatggactctgtgacggaccaaaactatcgagaggaccgtatctgacaataacaatgatttgttcaatatcttctctaatctacgtttcgttaaaagctgcgtttgtgttcggtgagccagcgatcggagacggaggaggaaactacttcagagcggcggaagtggctctgtttctatgctcgtcagtcttagccataggtcacatcgttgtggcttatcgaacaagttgtagagaaagaaaaaagcttctcgtcttcaaaatcgacattgaagccgtaagtccacttctccatcttctttttttccgccgttacagaaatttattattttattatatttgattgataatcgatgtagggccaataataccaagttgcatttactttttttcaaatctaggaatgaattagatttttaacctgcaatgggtcagagtcagagatagcatgtgaatgtatattagtcaatgttgaatattaaacacatttttacacatttggtccttttgtgattctagaaactcgatgagatttgtctttccgatatgtttggttaggaaaagactctacttggtgagaaggttttcaaatgaaactaagagaaaacaaaattgaagtttggattggaaaactttcttatagagttatagttttgttttgtaggttagaatttcatgtggaaaccgtgtggcatgtaacctaattttcttagtcattttataataagataatatccgacatgacacgtcacacctcacgcatgcatgcttcatgattgttttcatggaggcaaaaccatcaaacctctttcttcgttatagttattatcaccaatgggaaaactaatgtgttttgattgatccatttttcaggtttcggcttgtaaaaacgtgtacccgagataccaaaagatcttattacaacaagagagactcaaatagagacgtatttccaagagaatcaatacttgtaaatatatacacatacctcaacatgtaaataaaactaatatataaaaacatacggcgtataaatgtaacttctccttctgcctttcggcgttgacccatcaactccttcgcttttaagtttcaggtaaaccaacctaatctcatcctcttccaatgttcttgcttacgtatttgttattcttcttctttttttgaatagaaatgatttctataatattattaattgggaagtgacattatggacgttacaaagttgagaacccttttgctgataatgtttgtttatttgtcttttttttttctttaacagaaggatccaaagcaaaaggaatggagattaattatataacctatgcttttttaaatgagacatttcagatgaactggcagttgttagctttaacattatattagttagggcgatttgtaaataatccagagttcctcaatgagaaaagaagcccaaggctgtctctccgttttgtatatatgtttatgtttgtatttctttgtggttttaatatatgttttgtaattgtaatttgtaagcataagcacatagtatgtgatacgtccgcgtggatttctttatacgtcaccaaaatctctaatagaatcgtaaagcaacctttttacgatcattatctatttatcttaacttacattctagatatttgcattaatcaaagatatctcaatctatttaacaatcttataagagagtctttgtctattgcaaactctaacttcctatcttttcgtgtaaataacttaagactgtgaggatgtctaaacaaaccttaccaagtatagggagaaatagacaccaattcggtttgatttactcaaaccaaacaccaatttgaaagctgagaggcattttagttccagttatatgataaagtactaaacacaaaccaaaaccaaagtattggcctaaaatataccaagccaaagttgtagaccaaactaaatgctggacttactactagacaatatcggaaacacgatttaagaggcattttgtagtcgattaatgggcttctataaatgggctttagggggacagaacttcaactgggaccaaaatattttctcttttgtgaaatcgacaaaagaaatccttaaaaacgaaagaaaacaaaagaaagaaaataccttaaatgcagacacctaccataaggacgaaagagagagtgcaacgtcattagaaagtagccaggccacaaaagaaaaaaggtaaagagagagaccaatcacaggagataacgctaagataaggcttcttacatttaccatcacatataacataacgttactattattctaaaatccaaaaaaactatatgttataacattggaatcatcagtctctaagcagtatcacaccaactcaatatggctaccaccactgcagcagcagcctcaggtatttttgggatccggattcaagatcctagacctggaaccggtagggtccaagcccggttcgggttcagtttcggaaaaaagaaaccggctccaccgccaaagaaatcaaggcaggtccaagacgatggagacagactagtttggttccccggcgcaaacccgccggaatggttggacggatcgatgatcggagaccgtggatttgatccgtttggtttaggtaaaccggctgagtatcttcagtacgatttcgatggacttgaccaaaaccttgccaagaacgtggcgggtgacatcatcgggatcatccaagaatcttcggagatcaaaccgacgccgtttcagccgtacactgaagtctttgggatccaacggttcagagaatgtgagctgatccatggaaggtgggccatgcttggcactctaggcgccatcgccgtagaggctcttacaggaattgcatggcaagacgccggaaaggtacactcatacagtcgccgctaacgtaatttgacacgtggacagtctcgtcattagttgaaactaaattagcatttgttaaattaaaaaaaaatgaggcataggtggaatcaagccaaaaaaacatgcatgcaaattttaaccactaaaatggaaataggtttaggcttttggttttggagttttgttcagattatttggagtctggtatttcgagttcttttgatttttggatttaacaaatatgagaaaaataaagagaaaaattaattttagttagtactatatgttttagtttgtttcaatgcatttaactgaaagtgttaaattttccaatgattttaattttttattcggttggattcgtaaaattgagtttagtttggtttatgagataaaaaattgctttgctattcgagttattataaaacatgaattcgattttgaatttatgcatttcggtttggttcgcctaggtggaattggtggaaggatcatcgtatttgggacaaccattgccgttctcgttgacgacgttgatatggatagaagtgttagtggtcggatacattgagttccaacgtaactctgaactggatccagagaaacggatttacccgggtgggtattttgacccgttgggactcgcggctgatccagagaagttggatactttgaagctggctgagataaagcactctcgtctcgctatggtcgcatttctcatctttgctcttcaggcggcctttaccggcaaaggccctgtcagcttccttgccacctttaacaattagttaatgaacctttctatctttattttatcaaaataaaattatacttcaaaaactgtataatgcatgttacgctatacttataaagaagtcttttattgtttcgtgtcgtactatcgttggaaatttggttgtcacatcaatcgttcaaaaccggcctctaaatgttggtctagtggcttacggaaataaatatcgaagtatttattgtttatgttctaaactaatataccgtgaatattcaacatttttataaaaaagattatcatatcgaaattcgatatacttgaccatccaataatggcttgtattgcttttttttgaataatcaaatccttctgtcgtattcttaagaccatactagtattatcttatttttgataaaagataagatacgatattggagccaaaaagtagagttaagatatgatattttcttgattactaaataacagaagggagaaactattgttagtttgagcttaagtaagaaaatatatggttattatggtttaattttgcatgattactactaataactaaatattctgtttatctgatctcattatacatgtagatactatttgttgcttttacaacaattgtagcaatgaaagaaaattagaaattgaagaaaatcttgaaatgaatagacaaaggaataaagaaagtgtaagaaagcaataaaataaacatgaatatagaaaatgcaattggcgaagagtacacgttgttccacttttctggagaaaaaagtgaataattgaagaaaagacgttataccttccccatccacattttcttgcttaactgcagaacaacaccaaattcgaccctatcaagttttgattcgtgtctacatagaaagagtctcaattgttctgtccctggacttttttttgtttcgtttttcttgttaagatcgaaaactctgttttggtagatttttgtgttcttgattttgattcaagatggggaggctgtttgtggtgaatcttgaagggaagatctatagctgcaaacactgtaagactcatcttgctacttatgaagacatcatctccaaggttttgtcccttttccaatttcttgacttttctggagattattctaatgggtttgtgattaatctgtttttgttgtttttctgcatgctcctaaaatttgaaatatataatgatagatggttctctagaagatgttgtatgttgataagatgtggttgtatgacttatagaaatacttcaactttcttaacattctttttgttgtgtatttctcttctgcttggaatagggtcatgttatgtagacgagactgttaataaaacccctagatcactttcgaaattttcattttgagttactacattgttgaagtcatggatcagtacttgtattttgcccacttgccattaagcagataatgattacaaccacatagttttgaacattgagctcccctttagctgatcagaccacatagttttgtctttttgattctctctgtggtctaagatggattatctttatgcttcttgagaataacagagagttgagctattgagctttccctgattctgcatttgttgtttcttgagctaagactgtagtgtgttgtgtttttatgtttccttgttcagtcttttcactgcaagcatgggaaagcttatctcttcaataaggtgtaagtgtttcttatttctaaggaatacttgctaaattgggctggcttatctgatgatgattgatctggtttagtgccaatgtttccattggagagactgaagaaagactgatgatgactggtaaacatactgtggctgatattttctgtgtctcgtgtggatcaatcgttggctggaaatacgtaagcaaggcagacatcaaatgttcttaaagaacctatccgtgttcgattctttgggtgttaagttgtatgttctgttttatcaggagactgctcatgagaagaaccagaagtacaaagaaggaaaatcagtgcttgaaaggttttatttccaacatttcaggacttagttatgaattctactagcgtttgatcttgagattgttgtgacagatttaagatatcgggtcctgatgggagcaactattgggtgagtagccatggaaggcatataggtggaagtgatgcagatgatgcttgaatcatctctctctctctctattctctgatttgaccatttcatgtaaatgtaaattattcaacctccattccaatttcttgtaataagactaaccaatactctttcttctcttgacttattatgtctcagtaaataaaaaatctgattctgtctaatgactatttattggttttctgtgaaaccatcaatcaaaatctacgtatgcttcatattacaataacaaatgttataaacatcctctaaaatatgtatttgtgtgttactaaacaaaaatatgagcaaagggtctttggatggaaatattctcatcgctttggagctaatacattacacacagatagacaattgaataagttaacaaaagataagaacaaaatatctaaagagtttgattgttagcaatctattgacaaaatagttaggggagacaagttggagctgacatatttgactctttttctttgccttttatgagtcaacgctatgacttgaaaagtcaaccatcaagctgcattagaccagtcagatcagtgatcttctctatttcagttgtccacctgaatagctaataggccgtaaagatgtcagatgctcagatttggaggcccattaaagtgttgagaaaatgtggttttggtcaacaaatccttttaaccaatggtggcttagtgcttactgaccaaacccacaaaagtcagttgatcagtcttctctgtgatggtaggcttgtttcttcattttctgctaactactacacttttccccaaagtgtagttagctgagataacacattgaggtccaaacaaataataagcgaatggagttggacaaattgacaattttctctccttaaatccatcctcttcacacacatcattcttaacctatattgagatatggagagcttctttatcatccgttgcttcttgttattattcttcttcttcaacggagcatttgcagcttcaagtaagttatggagcataagagagatgtcggatatggctggctacggggaacacaaactctcatccgtagttatcaccggttctcttctttgcaacacccctgtttcaggtattctctacactgcgtcttgtgagaaatcataaacttctaattcaaaatcaattgaaaatgagtgaagagaactatattttatgctttttattattacaaaaaacaataaagacctacgaattttgtacatgatcatataggtgcaactgttgccatcaagtgtcacactggactaaaacagagatcaaaatggataaagagtgttactaatgactttggagaatttgtcatccatcttccttctcatcttcacgcaattccgcaactcgaaaaagcatgtttcgtcaaaccaatacatgtgcctaagcactatcacagatgttaccacactttttccaaatccaatatacacaaagacatcaaacttgtttcctcgagaaatggcttccgtgtctacacctcagggactatcaagttacatggaggacacagttcaagaacatcccaacctcataaagccaacatgtaaacacaagtttaaagaaaaacaaaacagaacacttgaagattcatcttgtgtttttgtgttcctctcacttgtttaggttggcgcttcagtcaccgaaccgagttgagtctcttcacattgttatcggtttcaaacagtgtaatagcttcaccagtataattccatatcatacttctgtatatcaccaaatgaaatgttaggaagcaatgcacaaacctaattttaccaacaaaaaaaaaaagaggaaaagaagactaaattaggcgactaaaacctaatttactcttgtaaatgccctagctaagtagtcgtgtgttctcctagctctgtgtgagatgataaaatcatcaattctatgaacctttacatggtatcaagagcaaaacaatctttacaaagttataaacacacacaaaaaaaaacttttctcttttcctttacacgatttggacatatatataacagcatgtaatcttattcttagacatagatataacatacaaaattttcaacctgaaaagtgtatacaaaagaattacgatctttactaaattaaaagcaacaagactaaaattaagaatttctcttattagtaatttcaacatatctttttttttcttcacaaaaaaatgatcagtaaatgattcaaaaatcgattttgattttagaaaaagaaaaaaaaaacgaaaaggtaggaataaaaattcaaaaaagaatcagaaaagacaaacgatcccgcttcaaagcctcctcatctgtttttaggaaactctcctctttctcctccaaaatcttctcaatccccaaatctctcagttcttcgaccaaaaacatttttctggattcgaagaatcaaaccctaaaagttattaacaatggggaaggagaagaaaacagagtcgtataataacgatagcggtagttacaattacagaatgttcaaattttataaccgtaaattcaagatcaacgaagtcacacccaccgacgacgtccgtgacgctttttgtcaattcgccgtcggtggcggtggtggaggaaccgatggagattcaagtgatggtgacggatcaaccggtgtaatgggtgcagagcagctttgttctttcctcgatgatcacggtgagtcaacaaccgtcgcggaggctcaacggttgatcgatgaggttatacgacggagacaccacgtcacgcgcttcacgcgccacggacttgacctcgacgatttcttcaatttcttattttacgacgatctcaatcctcccattacccctcacgtaaaacaatcacatgttgattctaaattatcgaaatatcgaaactttggtttattaaaatgtgttttttttaaacaggtgcatcaagatatgacagctccattgtcacattactttatatacacaggacacaattcgtatcttacggggaatcaactaagcagcgattgtagcgaagtccctgtgatcaaagccttgcaacgaggcgttcgagtcatcgagctcgatctttggcctaactctactgggacagatatcaatgtccttcacggaaggtaatatatataggaaacttgttcttgttatttctcttcagtcaaaaacattttcaagaaaccgcggttttcttgattcttcagaacgcttacaacgcctgtaccgctgatgaaatgcttgaaatcgataagagattacgcgttttctagttcgccttatccggttatcatcactttagaggatcatcttacacctgatcttcaagccaaagttgctgaggtataacattttatatatctatatcttgtggttatcaataagtttgattttgatgttgtttgagttttttttttctttctttagatggctacacagatatttgggcagatgttgtattaccctgaatcagatagcttactggaatttccttctcctgcttcactgcttcatcggataatcatctccaccaaaccgcctaaagaatatctcgaatcgaggaacccgattgttaaacaaaaggataataatgtatctccatcttcagaggatgaaacacctagaacagaggagattcagaccctagaaagtatgttgtttgaccaagattttgaaagcaaggtaagaaaaaggaacttaattcatgaaaaaggttcaatatacattgtttgttgttttgtaatttagttttgagttttgagttagagtgatagtgatcaagaggatgaagaggctagtgaagatcagaaacctgcatacaaacggttgatcacgattcatgctgggaaaccaaagggaacggtgaaagaagagatgaaagttgtggttgataaagtgagacgtttgagtttaagcgagcaggaacttgacaggacttgttcatctaatagtcaggatgttgtaaggtagtactaatttatataccatcctaactctttataggccagggtttgcaacttgattaatctcaatgtttttttaggtttacgcagcggaatttgcttcggatataccctaaagggacaagatttaactcctcaaactacaaacctcttatcggttggactcacggagcgcaaatgattgctttcaacatgcaggtaacaagctaagttttataaggtctatggataccttgactcttaagctaccttttgtgatgtataaagtgatctctgtataagaaatgaaacatttggtgattatagggatatgggaaatctctgtggttgatgcacggtatgtttagagccaatggaggttgtggatatgtcaaaaaacctaacttcttgatgaagaaagggtttcacgatgaagtctttgaccctaggaagaaactccctgttaaagaaacgttaaaggcaagccaacaacaatttccatatatatacttataggatattttaacatttcaaatgtcattagccttatctttttgtcgcggttattacaataggtgaaagtgtatatgggagatggatggcgtatggacttcagtcatactcactttgatgcatattctcctcctgatttctacactaaggtaatatcaattttacaaattgtggctctttaaattcctcaaaaaccttattagaatgcggacttgtgagctttgtagatgttcatagtgggtgtaccagcggataacgcgaaaaagaagacaaaaataatcgaagacaattggtatccaatttgggatgaggaattcagcttcccattaaccgttccagagcttgcattgcttaggatcgaagtaagagagtatgatatgtcggagaaggatgattttggtggacaaacatgcttgcctgttgcagagttaagaccagggattcgatctgtgcctttgtatgacaaaaagggtgagaaaatgaaatcagtacggcttcttatgcgtttcatcttcgaatgatttggcttaacagaaatgtgtgtctctgagaaagaatttgcaccatttcaaaaagcttttgaggtattgtataatgtagcttgaaagatcaaaatgatctttgctctgatatctccagaaagtgaatttacctaaccatattgaagaaaatgtaatttatagagtctatattttttttcaatatgtaaaatctattgtaagatgattatccatgcttgcaatttgcaaagctgttacatatattaaattaattcataattgagatatacatggaaaaactaaactattgatgaaaaaaataaaatggaaaaactaaactatccaaccgtttgaaaaatggaaaaactaaactatatcaaggaaaataaacagtttttcttctttcataactatgcatgtggaggatataatttgtagtaactaatggaactaccaggatattaattaggatttgcttcgctattcggtctacaatgatcttaaacatagataattgatatttgataagggaccaaaatgatggatcatatatggtcgtcactggtcagagaatgcacattatatggtcataggtccaacgtttaatttgatttagaacaactggtaactgagaaactatgtatgtatcaaggttattatattgcaccacacaagctttttacttacaatgtgaaatcaatgtaaaaaccgttctatacacatattaatctcacaattacagcgattaaacaatacaaaaatcacaagcaagattccaagagggaaaaaaactggagaaacaaagaataagacaaaaccaaacaaccaacaaaagaagaagcaaaatcaattgtaagatgaagaagaagagagccaagggtggttaagtgcctctagagctgttggacgtctcaaaggattgatatcaagtagagtccttacaaaatctaagaacaattcatcactaacttgtaattgttcttccaagcttgattcttctgtgattatgtattcaatctcattgctctcctaaataaaaaataatgcgtcacattcaagcaataacactcaagtctttttggttatattaagaaaaattacctcgtttaagtggtagagatcatactctttggtgaagtatttatgtgtctcctgacctttctctagcatctctgtttctataggacctaaaactgcaacaatcctagccaatatcatcgctactgcttcgtttggaaacagaacctgatgcacacattgatacattgtgttacttgtttcttcagtatgtaggatataacatatagacaagacttttgatggaaactagacagtacctcaccagagcagagttctgctaaaatacacccaagagaccacaaatcgatcttttcgtcatatggaagcccgagaatcacttcaggagctctataggaacgagattgtacatacaagcacaagttatcagagcggaaacaactacttccaagatcgatgatttttaccgcgcatcttttgtaactctttatcagtatattctcaggtttgagatcacaatgtatgattcctagtccatgaaggaacacaagagcatccaaacactgacgtgttataacctgaagtctgcttaagttaaagtatggttctcctcctgattcttggttgaatttctgaaactcatacaagtttgctcggagaagttcacagacgataaacaaatgttcctgttatacatatacacaagaattagtaacttaattaagagcaacagatatgtatatctttcaagatctcttacttggtggtagaagtaatcatagaggcgcaagatatgatgttcatcagcaggatcatgcttattgacatgtttcaatagcttgatctcatctaaactctgatcaaagaaatctttatcgttcttaataatcttgaggcaaacatcaaccccgttgtgtagatcctgtgcctgaaccaccttgctaaatgcagcagaaccaatgtattccgtaatgtaatatcttcctccaatcacagtgtttatcacaattggtagatccttgttctcttcgaatcccgtcctgtcaaatatatacaactatttgagatcacatatttaaagactaactaatgcaaataatgatcatacctgtttttccagtgaatgattctaagattaaacacttcatattcatcttcaacctcatgaacaacatcaacctcttcatctgttacattcaactgatcaccagtcttgagatcaagctcatcagttttatcctcaagaccaatgtcaagaagaaagggcttatctaagtaatcgagactcgcttcggttagagacccttgagatgatgatctatcatagacaccaagc

SEQ ID NO: 355 - DNA, 82652 bp, Arabidopsis thaliana
aagcttagattagattagatatgatttgcatctttacccaacattttatgtttatttttttttgatgtgtgataagcattgttttctacttctttttatcacgacccctcttttcgttatctcctttctcgacttctttaattatcttttcaaccataccaaaaggattcctcgcaaacaattgaatccaaaaaaaagaagaagaagagatattctttaaaagtatcttattcccaaaatcatatcttcgttttttgtttgtttgttaatgtttaatcaaaattacacataagaataatctttagtatcatacataaaatatatatagtagtcgagtcggttaattttcttcactatattactctcgtttaactataaaataagatcaaatatgttcattttgtcatactgtaattataaaattctcataagtcattactatatataaactaatactccgtgaacaagggttcttttccttctcgtgaactcatattttattagttctaagcttaaatggctttctagatagaaaataaacacgttttccaaatcaaacaagaatttgataactagctttctaaaaaacaatacttaattcaaaatagtagccacgttatagacttttaaacatgaactaaaagtttttttttttttcaatcaactttacgtgcttaaaaagatagtatcagtttaggtatctcataatccttatttggtttcatcatccttaattacctaaattttccctaataatactttcttgagcaaaaaaatattatccatttagttatagtctctgaatccttctagtgagctacactcacttacacatatatactaacaaactaaaaattataactctttcacacacacttggatgacattgtctttaatttagaaacataatgggtcagagtttcaataacaggcctaaaagtacaaaataaaagcccatgtcatctcataggcccattttcttaataacgttcttggcttaaaccctaacgaacaagaaaaatcaatttgggaaactcaatgtctcttctccggcgacgattcgtgaaacaatcagttaattgcataacattccttcaaatcctcgccgagcgatccttctccaccgtgaagattcctccaggtcgtcgcaaaaccaccgaattcgacaaacttatcaacgaagctggcagctccggcgatttcgagaccgtacgccgtctcctaaacaaccgtatagttctcggatctttcaacacgagcgacacattcaaattcctcaccaacaccgcttcatactcctcctatttagaagatctccgccgcgttttgcctcagatcgacggcggtttctcgcggaaaaacgcttacgacattttaatctctcgtctctgtaagctcggacgcatcgacgacgctttaatcgttatcggagacatgtctaacgggagattaggcttaacgccgtcgacatatcacccgatcttgtgctcgctcacgaggaagtacaaaatcgaagaagcttggagagttgttgaatcgatgagatccaaatcggtttcgatggatgtgacggcgtacaattacttccttacttcgcattgttacgacggcgaattggaatcggctagcgaggtgatgcgtaagattgaagaagacgggaattcgccggattcgcgtagctacgacgcgcttgtgctcggcgcgtgtagggcgggtaaagtggaagcggcgatggcgatattgaggaggatggaggaggatggtgtgactgtgttgtactcgacgcatgcgcacgttataacggggttagtggagggaggctattatgcgctgggtttggagtttgtgatggcttacgccggaaaagatttgaggttggatagtgagagttttggttttttggctggtaagcttgtgaagaggaagaggtatgaagaagcgatgattgttgtgaaagagatggttatgagaggattgagaatgggtgatgaattgagacaattctatgaaggaaatgtgagatacgatgatgatgatgaagatagcttagtacaatcagagagagagtgttacattgagcagaagcttaattgattgcagctcaagcttaaagatttgtattgtggtgcagagaaacagagcttaattggatccataagctcttgtttgatagggtttaaatcatggaacaagaagatgtgaatgtgaatatatcgaaactctgcatttgttgtatctgctttgtttgtggcattgttggattcagtttgaagcatacatgagctactttagtctaaagttatcgtcgggttttcttgagatgttgaattgagcagaaggaatgaaggaagctctctacaggagaaattattacctttgtgctatttttaataatcaaatgaaaacgtgctcttacaaaaccaaaagacacatttaacatcttaaaccatgttacttaactaatatacctcttgagatttgaaatgattggatcatataatcataggatacgtatcaccgtaccatgccatgttatttccactaatgttggaataattgatttatgacttgaccaacttatgcattaaagggttcatcgtcagctacatgccagctctttgcactctatgtatgagtcattttcggtccttttcgtattctttataaacttaatgggttccaaaaagaaaaatccaattctgattgctccatttattatagaaacttaaaagtaatgtactatagaaagtaaacgcattcaattgtttacattttttgcccatccattttctgtgttgttctgcacatgcatttatgatttctgcctatcatattcatatgctctctttttttcatatgctcgttaacttacgtagttacgtaaggttttgaaatccaactaaagttttcttaatcctcagataaccttagctagaaggcttctatgttttgcagaaacatttccacgtcaagacaagatgtatacattatatagtgactaagttcctctagtaaacaaaaatctaattacaatttttttttgatacgacaatctttttgagactcaaagtagcacgttaatagatttctcattaaattggagaatgaaatcattcatcgttagagaaaaagaagttgtacattattaaacttttcgttgtccaaaaaacaaaaaaaaaaaaacattattaaacttttcaattccttttgggactcggactcggactctctctctagtctctatatatatttatgcaattcccggaaaatctgttttttttttctttctctattgtcatcaacacactaaccaaaccatgaaccgtaatcaacacaaaccaatgtttgttacattcctcatcaatattcttctcctccaacttctaaaccttaccaatgcatcaccatccccaccaataacagccctatacgccttcggcgactccacagtggactccggtaacaacaattacattcccactcttttccagagcaaccatcctccctatggtaaatcctttccgtccaaactctccaccggaaggttctccgacggaaaactcgccaccgacttcatagtctcctctctaggactcaaacccactctaccagcttacctcaacccttcggtcaaacctgtagatcttttgaccggcgttagtttcgcctcggccggaggtggtttagatgatcggacggcaaagtcatcattgactattaccatggacaagcaatggagttacttcgaagaggcgctgggtaaaatgaagagtttggttggagactcggagactaatcgggtgattaagaatgctgtgttcgtcattagtgcggggactaatgatatgatctttaatgtttacgatcatgttcttgggagtttgatctccgtttcggattatcaagattctctactaaccaaagtcgaagtttttgtccaggttagtttcaacgtttactttaaagttcatatatatagttttatcggatttattgatatatatatatatatatatatagttcatatatactgtatatcaaagttcaaaaatagtaaatttcctacgtacatggatcccactcattaaagttattcactagagtaagacctgtacgcatttgcttatataatgattagattttactgttttcatttcaatttgctttctgctttttttttttttaatttccattttgttttatagagaaccatgataagacgtattcataggccgaaattgtgttacttgggaaggtctcacaggcccatatgtactagttgttggtttattgagagaaagaagaaaaacagagtaagagagacatatctcttctcttgtgaagaagacaagaacaaaactttgttttattgaaactgaaacttgttaatctttacatgacgatacaaggtgtttatatagaaaacaaatagacacaacaactcaattagttctgtctcttcatacttgtgtctctttctacttgtgcctcttgagtgaaacaacacaaacttacaacctttaactgaaaactcaattaccgaccaacactagttagggacctccatagttatcttgttttcggatagttccatttgggtctcaaacagagaaagagagagatccaactaacagctagatttctgactttacaaatgcttacagagactatacgaggcaggagcacgaaggattacaatagctggactaccaccaatcggatgccttccggtgcaagtaacacttactagcatcaatactcctcgcatcttccatcatcggatctgtacggaacatcagaacgatgattctcgggtttacaatcaaaagctacagaagctaatcttcggtctcagtcagaggtttcgaggttccaaagttctttaccttgatatctactctccgttaatagacatgatcaaacatcctcgtaaatacggtaactaattgatttaagtttttttttcttttttttttttgttttaaagtttttccatatacaaattttgttaattgtggcatagtttctaatttgaagagtaatgtatgcaggactagaggaaacattgagaggatgttgtgggacagggctacttgaggcaggacctctatgccaaccattgtctcggacttgtgacgatgtttccaagtatttattctttgattctgtgcatccttcacagacggcttattctgtcatcgctagtttcgccttacaaaaattgtttcctctcctctaatttattatttttatttacaagactttttatttttaaaccaataaagttctggtacttggtcttttatttgcaaatttttctttaagagtattggtggcttaattgttattaaatttatcataatttctaatgtttgcaactgacattacatatccagttactttcctagataggattgtaataaagaaaaaaatagactttgagtgacatcagatcaaaaaatacaaaccttgtgggtaagtatttgtgttgttgctacttgttattaacatccttgtagtttagttgaacttcgcttcatttttcgtgtggtgggaatgtaaaaacgaaaatcaaataaccaagatcatccgacagaccaacagtataacatttctcccaactaaaaagtgtatgtaattcactaatttgtatatttcttcccatgagattttaattatgaaattgcttagttatcataatcatatttaaatatttttgttagaattccactatctcaaatataagcatagaaagaaaactgatgtctcacgttacaaatatctttgacttaacaatatggaatgatacaacaaaggcacatgtgagtagacataaaacaacaaaaactttccatagttttgattctctggaaatatgaaaaaattcccaaatatataatacatatagccaaatcttattcaaggcccaagatgataagaaacgattatatgcgaataacagatactagcttgttgtctatcgaggagatcaagacatatctctatgtcaagtacatctgtcttcttgtcgttctctccaattttctcttaaagaaagtgtcttctttttttcttaattaacctcgcaactaaattaaaataaactttggttggttatcagaaccgatttgtttttttttttttgtttttttaatacaaacaaaacattcagcagacctgatttttaaattaacggacctttcatataatttcaactacaaatctaaaacatagaataatttataaaacgattttgaagaaggcaaaaactcgtctttataaaaataataatgctatagctcagaaagctatgactcggaagtcttcatcttcttttcttgtattcactgatttgacgttaacgtataaattttcagacaatatctccatgttaaaacaaaaatattgcttaggatacttgttatgtgagagtaaactacatatacattgcaacgtctagacaagcttatagacaacgtgcaatgtcttgtaactctcaaaaccatatatatagactctcactaatgtatttcttggttactatactatttagaagaaaacaaatttctgctcccaactcgatcacaaatcatatatattttaaaatatgcatttaacgatctcgacaaaattatgtgaatttttttttaataaaaaacattaaaaaatgtctctattatttccttaattatgggtcttgtcacaagtatgcaacgaatgataaacaacaatacagaaccgtcttccatcaacaagtaccacaagatctcacttagaatatacgtatataagttgttatacatattcacagagtgagatcaaggggacttgccaagaccgaaatctttctctttttgtgatcagtttgatcttctttcctaatggttcggtcgagttttgatgaacctgaagatgataacgaaagagacaaactcttgatatcttgatgatcatcatgttcttttacttcatcttctaacaagcattctccaagattgtcgtgtgtccgaggtaccttaagggacaagcttagatccaaatcttggtctgacttattgcagtcatcagaaaataataacctcttcctcttcaaaacattctctgatccttctgccactccagcattctcccattgataagaatttagcgttgtagcaatatgatcttgtggtattgttgcggtggaggacttaagattggaagagaggctctgtccccatgatttgttaaacgttttcataccttcaagaaaacttctatgaattcttggaacagctccagctactccattgttatcatgaaccccttcatgagaattgattcgaaatgaaatagttttgttcttatcgttaagaatactattgctaactccgtgatatctctcaccaggctgtgagctaaacattgtttgtcttgttcttgtattttctcgtgtcgttaatcctctccaagggctacggtagatctgtcgtctgtggtcagtccacgaaccaccaccatatctattgaatacattccaagttacacacacgtaattttaacttatagtttaaagatagctagctgaagagtttgtaaataccctaaactagaagaaggcctttgatcaaaactttgtagcattggaagttggctaaggttgtaagtgtaaccagctccgtgttcaaacgaaaatccttgatctcctgtagttataagaaaagataaaacacgagagacaagaattagtcaatttctcgtcgaattcaattataagatttatagaagccctaacttaaatcagaaggtagaagaaagctaagtaaactaccttcattaggctcatcggtcttcttgcttctgtacatctaagaagaaaaaaaaatgaagtatgatttcagatgaagatctcaatgatgtatatagatatatactctatgtgtatgtggatatttgcaaaacctgaagatgactcttaacatgggcaatacttagccccttgacgttcatcaattggagaacaagcttcggtgttgctcctgtttcaacaaaatcattgaaagagaccccaaataaatatcaacaagaaaaccctagaaatttagagatcttcacatatgcaatgatcttgatattgattcatatatataattgaaactcaactatctgggccacccaatctctccacagcttgaagaaagcaaatatggagctccggcgtccatcgcagcctcggagtctttgagcggttgtacggcctcacggatcctccattcttcttgttctgatcatggtggtgactcccactctcttcctcatagctattgctagatgggctctgatctccagatctctcttcttcatcctcttcgccttcttcatcatcctcttcatctttatcttcttcattcttggtggttgctttgatgttgttagatagacaagtcttggagttttcagaattttggctgcttgatctcatcttggtctctagctatttggctgtttttgtgttgtttgttttgaggttgaacctttttggtctatcttggagttctctggacaaagatcaaacaaagatcacacactcatacatatgtgttaggaatttaaggtgaagacttttgatggtctatgtgtatgactttttggatgcttgtatccatcattcctttttctccccctctctctccaactcaacatatatgttgaaatatgtatatgatggcaacggatattctaaattctatttaatatatagctttttattacaccaatggttttttctacagttatatacatcttagggaaagatagatctagaattacacctcatgacaaaaatggtacttttaatttcattaaacattagtaacttcagtcataagatgtattttaaaatgagttaataactattaagtcaattagtacaattaatctttgaatctcgttgtgatagggagtgaaaagaaattccaaggagtagattgaatttatctaaataatgatcattttcatggtaaaagatcaaacgttttcatgatatcaacccgtacgtataccaattttatgacataaatcagggttcaatatgacatgtacattaacaattttttttgttctttctttcaaaaccaactgaagatctatgtttttcattggatttggtacgtgtttttgtttcattcgaactagcttttagcaatataggaagaaggcaacattaatgaggcatacacattaattagataaatgaaacttcttccatcgttacaactcatgaattaaattgactagaaaagcaaagcataaaaggggatggttagggggatgggctcgtgacttcaaagccaaagctgtgaaaccagaaaaagaagaaacccaaaagcataattagatagatagacagagaaagagcatagagagaggaatcagacagaagttaaaaggtgcttggctgggctgtcttcactgaaagacacgagaagaaaatattactacttgtttctgtcaccaacgacaatcacgggtttgtctccatctccactactcttacgatttcatattatctataattatctacacatgcgcctctctctatatacatgcaaatagtacatctctttttctatatataacccaaataaatgttaaaaaataaataaataaattaggatacagaatataacaactgaagctaataagtcacatgattatcacagaattgaacttgagaattatatgagtttctgtacgtacacacatgcaaccaattgatttagtttggaattcagttcaggggtgattagttcgttctatatagcgtacgtactattaaaattactagtaaaatactaaacaaaagatatgttctaattaagtatgtcatacttttatttttgtgaaattaaggaagtaggcaaagtaggggatgtcatacttttttaagaacttagaaaggagaaaattaaaatgtataatatatgatttacttattgtcatgaactttgcgcctccaggagagggtcaaggcagaattgtatctatctgtattcctctaacatcagcaggctaatttttcttgtaagcgacatgcaagtactgtgtcaaattttgtgaatggtgaccagataatgtgaaagtcatcggtcaaataaattaggtatatgacatttctttctgttttttttttttttttcaaaatcgtttttggaagcccaatgtccagccgtaatcgtatattttcgtcgtcgttattaattggtaggaagaattaaagctgtcgtatattttggttttaaaagtgtagcaataataatttacgttagaatgacgttcttcatatctaccctataatcctacttccatgctcagacaacccatgatcaattatacgacccaacagataccaaatgctaagtattaatatcaatcacggtattgacaaaaaaagggtatattaactacggtattgatttactaagttatataatccgttgaaattgaccacgacactatgctaattcattttccttgacacatatatgaaatgaaccaatcaaattctaagcgtggaccaaagtcttcgtgttttatgtctctcaacttttaaaatttcggtacctataaggctataacttttttataatatagggtttgaactgaagatctgagattgtagaaactatatacgcagtgtacactagaccgaagaaaattcaagtaatatattatataattgtacttcaaataatgtgcaaccatatgtgaacgtaaatatattaatcggaaagaataaattaggggtgaaccgagaggaatataataataatgagatttgtacgtattatgcatggggttgcatgcatagtcactgcagctaagtaatcaatcagtatggcccaatagtttaggtattgaaaccacaattgcatattatattattcgtagtcacttttatatcgttttttggtctgacattattatattaccatgaggacaaaagtcgtgctcgcaatttttttataataaaaacgaataaagtttggaccagggcaacttcgtggaatgtaggttgcttgtcgaattaaaaattaggaatttcgtttcatatgtgatgcttgaaaattagttattttttactttggggaattcagtgatgacacaaacaaaatgtattcaatcaaacaatgactgtggaataatgtttttgactgaaatttaaaacgttattattgttcttaatcaaaatctctacacacatcattttatttttttttggagcaaaactgcaaacatcacctaaaactctaaattttagtttttcttccttctgtttttttttttttcataagtaaaatgtccttctaaatcgatatttttttagttattaacgatcttctctacaacaaaatccatcacccaattaggccaattggactctactcttcccaaattatctatagaagatgttaattagtgttaaaatcattattgattgattgttgaggattaaaaagagtagaggtctttttacattaaaaataaagtaaaggggtttccgtgcaacaaaagtattacaaacccatcacttattaggtttccgttttctcttggaagtagaagacgactagactattcagcgaaatcacaggaatatgtatgatgtgatgtcggatgaagcgaacttgtggtttcacgaagacgaacctcctctccgtaagcggtagatggaagaagctccaccttcacctgtcaaagacctttatttctccgacgaagaagacatgagtcccgaggaactatttgccaagttattcaagaataaaatatctcttcaaaccatgaaaatatttatgcacacttatattcttaaaagtattttgcaatttctcctcttatcattttgctacaaaataactttgaacaaaagaatgcattcatatagaagaaaacggatataattttcacaagaacttttttccgatatgcacactaatttatcatatacatgtttgtaaatttactaaacttgaagagaacttcaattttgctttaccaatattacgagagataaataaaacagacacttacaaaactcacatcttcaaaatatatacagttttattagtgaaggggtctctcttacgccgtggacaaaacctccaactctgcccaccaaagaggtgacaatttcggtgtagcatcgttcggtgacaatcccgtgatctcccgtaaccatcctgtgacttcttgcattgtaggtctctctttcgggtcagtcctaaggcatgatttgatcacttcacctatattctcaatcttggcatcataagattccagtgttggatctaccattttggctagagtctctcctcttaagaaatcaaccagcgagctatctactgagtcaggtttgttaacggattctatgagtttcccggttatcatttcgaataacagtaaaccaaagctgtaaatgttgtcttctggattcaaggctgagatgtgtgtgtctatgactgtgttgttgttgatgttagtctctgtctcagatgaaccgaaactgaaatctgatactttgacagcataatcctctgtgagctgaagagatgatgagacgagattggtgtgagctataggtggattgagttggtgcatatggtcaaggcaatatgctaatcccattgcaattcttaaccgcattccccaatccaagtgttctgattctttatctgtaacaaaaaaatgattagcttctctttagatcacaaagaaatgaagccaacatggctgattgtgtgacaaaagtactcacaatgtaaatgctcaaagagtgatccatttggagcatactcaaagatcaagatcctggtgaaaggttccttttcttcacaataaccaagaaggtttgcaaaattcttgtggttgatcttcgataacatttcgatctgaaatcgtgaaaacagaacgcgctaagtcgactatatgttgttgttataagaaaacaaaaatggggaaaacaataccttcttcctgaagtgaatttctgtactgtccttccagtctttggcagtagtagtagcaaaagaagcaacagcaatctccactccacttgataatgttcctttgaacaacttcccaatgggacaagatccaatgacattactaaaatcttcacatgcagcttcaatctcagatcttttgagtacaggaatacctgagtatcaaaaaccacacattgatgaaaccaaatgagacaaatttggttactactccaagtaagtgcacttgccaaaacaattcaagaaaggaaattaccagtaacgaatactttctgaagttgtccactaagaccagtacgccaaggattcacagttttcccggccttacttgtgaaaaagtagagaccggtagctacaaggagaagaaaaaaagcaccgcctacgcagccaacaactaaaggaacagaagaatgagagtttcttggaatgggagagtttgcaagtggcgcagatggagaaggtgaaacatcttgtgtagatgatctcttttgtggctctgaaactgttgaagctttagttgaaacatgttttggagcaggttctggggatgatgatggtgttgtagttgcagccacaacacggtttttgcggtcttttcttgaaggcaagtctttgtaagggttacggacaagtgttttcctgtgaaatccaaaagctttcctaagaaaaggtagaagaagaaattaagccattgcacaacatgctctaaatatagcaagtttagaagtgtcggttacaagtaacaacagtttcttctaccatacatacatagagagaatgaagctatgaaatgattagagaaatttgtagatcttgactacatatatgttgttgttataccaaaaaatctttcaaagtcaagatagattgagagtagagaataaaaagtagtaaaatcgaaactttaagagttgttcttaggaaactgagaaattgaatcagcacaagtgacaagagtgtttctaatctaaagacccaatagaaatctcagaaacctgaagctgctacttacaaatacgtggaatcttcatctgacgatagatctttctttaaactatcttcacttttgagaaaatctacagctgaaaacgtaaaagcgaaacagaggatgtgaatcagggaactggattctgtttctacactaccaaagagacaaaaacgagtaagtgaaacggaaaaaaagtctctaccttggtccttgagagaacaacacgaaccgaaccagctcagaaggagcacaaaagccacaaaagaacgcattttgaacaacatcgatcgagtgaatcgagaagaacaataacaacaacaacaacaacagtaagtgttgtgagcagaagatgatgaaatcgagtttactatggattagaattagagataagagatcagagaagcaatcagaaaaagcggaagaagctgaagacgaaaagagacttattagcagacgagtttttgattgaagaaagcgcgtccgccgtgttttgcccgattgaggaaacttgacttttaggagattttattttattttattggtcaagaagaactaaataagtgtgcgtatttttctcaaccaatcaacgtttttctttttgtatttttatgaaaattaaacttttctgcagaaactttttatttgttttttctccaaggattattgtcaaataccaatattgtacgatgttcgaatcatacttgacttattccgaaccacgaatactgtatcattttcttttctttacaagttatccatttagattgatcttattgcatcgtaatttaaagtggtgaggattttctgtaactaaaaaatattatatatatatataaacgttaggtgaaaaaaaaaaatgtgtaatacggcttaatattaactaatatactattatacctggtaaaatgtagttacagaactaaaaggggttcaaaagaaaaggctcaattagacagccagccagccatccaccgttgaaaaagacttgtggcgtagggaatggacgaatggttccaccttcttgattttcttggttatttcttacaatttgtgtcggttataaataaaattcaacgagagccacgatagatttggtgtgatgatatttgaatgattgaggttgaaggaatgattgtcatcttaagtaatgtgagactatttcaaagtggaaggttgcttagctgttgctttcttcgtccccaattctcttcccatgtgggatcctcgtggtctggtcacttgtcatcaaccaaacccctctatgttttagttatcttaattctaattcacattctactatttttattttgtcaacatttccatattcttttgttataggaaccaatgtgacaaaaacaaaatatccttgagaatctttttttttttttttggacaaaaccttgagaatctaagatataagaaacaatttgttttgctcaaaacaatatatgttgttggcaaaagaattattctcgttaactttaatatcttatgtagtctttagtgactcggtttcgttcaattcttcttatggaacaaaatcagaaagtcaaaacaaaacccccttaatgggttatatagtacgctgtgatataatctggttgcgtcattgatagtagtgtacaaatttactttgctagtatgtttatgtctctcgttctgtctatctgagctccggtttagcgggacgccaaaatcccttccgaccaaccaaaaaccggtcctcgtatattttggttgaccaatgaagcgaaccaagtatggattcaagcttcattattgtttccatgttgtcttgtaccacaagatatccacctggtctcactatccgatctatctcagctaccacttgtacaatctcacacctgaaattgacccaaaaaacacatattaaaggttaaccacactattcgcaatatcaaaccgagtttggtatgacaactccgactttggttaagctaaccgtgaaccgaaccaaaacagtgaatgcctactggctactgctaaagaactgaaactctatagatatacaaactcagatctgttgtttacctttgtgtgagatcacctaggaggaaactggaatgtaacagatcgtatgttctagggtaagtgttgacggactcacaccaatcatggtaaactccgatcaagcctcgatcataaacgacggagagagtgtcaggtttatccacagggacaacattcatcacccagagtggtagatttataagtgcagcagcaaaactataccaaaaagaagaaaagaagaaaaacttgtgtcaagtttcagtttgggataaaccggattctggttaaagtttcagagattgtaaatgtacccgccaaaaccagcattcatgtccatcacattccgcacagtcgaccagtttacagctagatgtttgaggtaaacatcagaaacacttgctgaccatttctctgtatctttcttcaatgtttccgctttaactgaaatgctttgcggtttaacactcacaagccgtttaggccatagttcaggccaactctggacatttccactaggtaacttggaaaggcatttagcgagaggaacatacctaaaattaatcagaaggaaatgttacaaaaaatagtggacattacttatatgtgaatgtaaagcatcattttgtgtaatagtttttttaccatgaaccatttgcttcctttttatcacaaagtggtggatcttgtgtgctgcgtttattataacaggattctgatgttggcttttgatagatcacaagtccgattccagaggaatcaaccgtctttgtcacgaccttccagcaaatggatttagtaagagaaaccatttctgcaaaacagaattgtaacagttaaaaccatagagatcaacatcagtgttgaatgatcaaataaaaaaaacatgattgttgcgaaccattccaaattctgctatctctgtcattatctcgatagactggtgttgcagaccatatgaagaaacctcctggcctaagtaccctattgagctccaacaacggtttcccacctaacaaattaaaccataatgatcattggaaccttgaagcaaatgggctaagaggaaaaagaatggaacaaaagaaataccatcagcatcccaatggactctgcaccgtgcacaatgtataagatcaaatgcattgctcggaaacgtgagctgttgtgttccaataacagaaagtgttgcaggtattcctcgttctaacgcaaattgaatctgagcttcatgttcatctttaggagcaaacgacattgtaatgacatctttatctaataaagatccgccaaagctagcaacaccacaaccaacatctaatacaacccttatgtttttcccccatttgatactcggtaacgcctgtgaatatgaaatgatttcaacacaaagatagatgctttctattcaagaaaaacaggggaaacagagctaagaaagtgctgaccttttcgatgaactcaacgtaatgagtaaccccgaatttgaattgagtacctcctccaggaaaaactagaaattcaccctcttttttaacccaattttgttccttcttgtattcaacaagcttgggatgaggaacattgtcataccaaatctgcacattatagagtaaaccacctataatactctaaaaatgtaaactttgaatctatcagactctaaagaacggatctttctcctttactttcacatactaaaatgggtcactaaactaaatcatgtatcttcagatcaagctgatcaagagcagcaaccaaatcttaccaaaaacaaaaacaggaactgtctctcaccatatcccggctcttaggccacggaaccggcggcttataattatcaggcaagggaaggagacatttaggacttggttcagggcaatgacgttctcgatgctccatatgtctccttgatttgagctgcttgatggcagcgtaattatcaagacaaggtatgtaatcaacagattctgcacctttacatagatcccatttcagctctcccacctcgagggaagtgtttagcttcatcttctgtggagtttgatctgaagaaacgtcgacgattcggtgaggaattggagattttgggattggtgtgtagtaatcggtggtggagagagaagggaaagggaatctggcgttatcggaggtgaagaggaagaaggtgatggcgatgaggagagtggagaggagtaaaacgacgacgtgttgtactgatatcgccattggagacgaagatcattagagatcagtgttacgagacgcgtttcaggtaagaggaagaggaaagtgtgagctgagctgagctccaaaagtcgcaactttcacatttcgattttgcagagagagcttaagtaatttttaatgcgccgacagattaaaaaaggatttgtgtccgaaagaatttttcttttctgattagtagtataagacaagatgtttgatcttgtaataaatcattttaattatgaatcaattgcaagttaaccatttatgtatcagacagaggatttttaagaatttcatttttggtaaattttctcaatagaagatcgcagtagtaattgatgaatatctgcatcttcggagacatcagatctgaattaaatctacacacctatcattgccagatccaatcaacctactttcctgaggtttaaactcaaaagtatgatcatattgagccaaagttttcctaagataataatgagtcatgtggtggagcaacatattcttgagcagtagtaacatatgcaaagaatcaaatcttttataaaaccatgaatgtatgattgatatgtaaccaccccctatgggtaaaataaaatgcctcagagtcatcaaaaagcacataaatcctctcggaggtttttctactgccttgtcaaagcttaaaccaaaatactgggactgttgagattgggtagatttaatagaaagaaaaatccggcaatcttactcgatgattccggcacctgcatcgagatccacttcgcccataccagtgtcctcttcttcgtctccgctatcttcatcgccgctcatttcttcattgtcaagacgtagcttagccatgtgttctgtcagcatcttttcatcacgttcactcacctatatttgacatagattataaacattaataggcggttgtgaaccaaattaaacaaaacacaaaagaaaagctcgttcttgtgacatgcaactcgagacggttcatcacttaaaaaaaactaatttaagatactcacagctctagccccctccttaacgacaagcttgcctttgtgtgtctcaattgtctcagtgcatgctgctatggctttgtttagaatttcaatcccttgttcctgtttaatatttgagaaattgagaagataaaatgggacaaaacatagcatttacacatttatggtttaagtgaagacaaatccgcagagctacataattggcaaacaaagttgcaatgtccagtgttttcttaagcatttactttccttgcaactacagtgttttcaaaattctggcaagtagctttagtggatatacaatctaaacagagatcataaacctcttaaagataagtaggggaggatttctataatataccaattaccaaaccaagtaaatcatagtgcaagatagaagattgcctaaccttgtcaagtgtctgagtagtaaggacatacagaggtggagcaaccaatttaatcttaacaggacagtcttcatttccagcggcttcagcatttttcatagcctcctgaaattacaagcatgggtgagaaaatcaaatgaaatcataatgtattcatttcacaagttaaagataatctaataagagatacgaccttaatgtgaacaactccatcaaactgaaaacacttcaattcgatatcagcccggattttcattggttgtggtgtcattctcctcctaatgttcttcacaagtgcatctttcacttcttccgtaacagcaggtacaaccttagtcacctacaaacagaaaacttgtaagattagcaccaaataaagttagtactaaccgctaaaacaatgccagagaacaaagtatatacctcttgcccatcaggcccaacttctttgatctcacgggtgagaggacccaacactgaatcaggatccgtcactaagatcttgaaagcctgaacaaaagaaaattatatatgagaactaaataaccatagagatacacaatgaatctccaattcacaaaattcttacctcaaaagcatgaccatgtcgtcgatacaaaggccaaccaatgttcacatacaagtcctgcaacatgaaagctcaaatcaatttctattcaacgatcacatcactaagctatgatatttgataatatctctaacaagcaaaatccaaatccagtagataatcccagatttgaactacgatattttacctccaaatcaattgaaagagtctcagcaacatggcgcatgatagaatgaacaagtttgctcttgttatacctctcttcacaagtctgaatatcttcctcgctgactctacgtttgctcagatcaatgtaacctttctctttgtcaacacggagaaccatgacaggctcaattcttccgaccttaatcaaactgctaacacttcggatccgacgacgagagagctcggagaaaaggatcatgccttcgatgttgttgtactcgaggagagaaacataagctcccatatcggcaatgttcttcacctggatcatcaccgccatatccacctctgggtatttcgcctcgtacatccgacactcgagattcggtgtttgactcgccatgattggtagatttcgatactgcttgagctcacgcgaattcactcttcgttgaatcgggtaaagctacgaggcggagacacttagggttttagactttttaggcgacggagcaaatcagacaggtttctagagataagaaatgagcaaggaacacaaacggaaaatgagtcgacttgcgtcaaagatgccaagttaaacggcaccgtgtcagttaaacaattaggttttaattgggccacaagatagtttcaaggggttaggggttaaaagcctattcgggtttcagacattttcggcccaacttctttcacaacgtaagtttggattgatttcctttgcttattcatgaattgcgtttaaaccggagcaaactaaactagagctcgaatccacatttggcagtccaaaaacattctgaccgaaccgatgtagaatcgatcaccaggtgggtttgatgaaccttataccagaatataaagttatgtgatcatgtcttttgtctcttacagaaaaagaagtctactacctcacaaaatcgtaaaagctaaagaactaaacataaagtagacacatatagaaacacagtagacacaagagtccctcgaagctgcttacccttccagaagcatctgattgaaatgccatgttcctgaaattacccacaagcattcaaagacatatattaaaaccaagtttgaggcacgacgtaggatgaataagtggattttcttgttcttttataaatttatagattagaacaaaatgtgagagattatttatgtaccgtgtcctttgccaactcgtcgcagttgagccacatattctgagatcaacttgattgcttccacctgagaaatgttttattttatcaaaaattcctattagattctctttgatagcttatatacaacagtagctctttgccactaacatagaacaccaaataaattacctgctctgtcagaaactcgctctcaataaaatctgccaagtggacatcattgttcttcgaagcaacctgttgaagcaaagcattaccaaactgagaacagttcttgccgagtgaagattagatttacttctcaaatacggatttgacatatatagtatgaactcaagaagagatggtctttacactgtgaaggtttaagagcttctcattaactagtttctccagtgacagagcaagctccatgcctgcaacaacaaatcacagaattgtatgttaaaattcctatatccattgagacttgaatctccatatgagagatacattttcataatacttaagaactcagataaaattcagtctttgctagtgaaaatatgcaatctcttcaaaagcttaacaaaatcattggtgtcaatatctaatttcttagaatgtggcagacatatgaaactaaagaagttttttcacttgggattattagtgttagcatttttgagcttaccataaagagcatctcctttgtcaacatgttcaaactctgaaagaggcattacaatggactgtaacttaaccctcccaccacgtttgttctgcaattcatggaaaaaaactaaaacatgttagaaccaaattagctccaataaggtaaacaaatggaaataactttcataagacctgatactccattaacttctcagcatgctctctttcttccaaacttgattccttaaagaacctgattccatgaaaccaacaattaactatggataaacaaaaaaaatccgaaaatatcaacactcttgaataaccggagactcacttggcaagacctttgagcgcgatgttatcccgatcaaagtaagcatacatagcgtgatacacatacgagacattgtattccacactgcaaccaaaatccattgaagaatttcaaattcacaggttcataaacaataagcagaatcaacatgaggttccaagttaccaaatcttatagccaatcaaccagattataataccgaatctaagagactggggtgagaaagaataacctacttgatctgctcgttaatggcggcttcgcactcgtctgagtacttttgtcgagcgagtgagagatgagagctggtagggacgagatcgagctccttttttacttccttaaacggctcgaagacaacgccgcttagcgcgtcggtggttgagcttttagatgcgcgaaaagagaaagttaagtttccagattttccagaagaaactcgaagattcgatgaaatggaaggtaacaaaggagacacatccttcttcacgccatggaaattcaccagcgagagagctgaagaagaagatgaagaaacagtcttgagaagcattttgactcgtttggattgaaacaaagtaggaaagttttcttcgcgagaaaattggagaagacgaatggatttttcgtgaggcgagggagatatatgtaaaagtgagattgtgatgtgttgatgatgaggctgcggatgagagacacgtgtacgtacgagatcgtgggatgggtcatggcgcgtggcaagcttgtggttcaactgcgttgctggaattttttttctttttctttttgtcgttgctggaattttgtttatccgtgacttatttgttttgaagctgtataattttgttttatgtgatgaaaattgaaattgcagcttcaaaatctctttcactaattacttaattaagtaaataatcatttatttaatagaaaatctcttgtaatttgtgattagtgaataaaaaagttaacagaacaactaaaatactaaaattaaatatcccttaaaattggaacaaataagaaagagtgcataaggaaaacaatttggttttatgcaatttaaattaaaacaaacaaaaacaacaagtaattggtaaatatgattggcacattcctcaaattgaagattctgttttagaggagagaacaaaaaaaaaacatatacactcaaaaatcttcataacaagatattattaaccaatcaaaatcattaccactaaaaaaaaaacacaattttagttgttaattagtaaccataatccagttcttctacctgttcattgagagatgctaactctatataagctgataatgtaggctaacacttctcatcatctcttagaacaagtattgataaacaacaattttttttttccatacaccttaaactcaataataagatggcaagcattgcttttgtgtttaaggttttatgtgtatctttcttgttcatatttgttgcaagtcgtcctactatccgaccaaaaacgtttaacgtccaacgtcatggttctaagccggacggaaaaactgataatgccaatgtatgtaaacgagaatttttctaattttttttttaccattaattagttatgagatgaaaatctatgcacattagcacaactataaacatatatgacaaatatacaaaccaaaaagataaatatatatttttaatttattgtattttaacatatatatatcattcttaacacatacaaaatcaggtattcacaagtatatggagtcgtgcatgcaaaagaaaaagtggaagtagtaaaatctatgtaccaaaaggaatattttacctcggtggtgtagagtttgtgggtccatgcaaaaatcctattgaattcgtcattgatggaactttattggctcctgcaaatcctagtgatattaagcaagatacatggatcaactttaggtacatcaacaatctttctatctccggttccggtacacttgacggccaaggaaaacaatcttggccactcaatgactgccacaaaaatctcaattgtcctaaactagctatggtaacatatcttaaactttttcacttatttacatttaaagcgtattacaaaacgtacatgtgatatttatacacaactttattagaatttttggtctttttcatttgagaaattaacaagtcttataataaacttgaatttttttatagactatgggatttgcattcgtgaacaactcaaatatcaaagacataacatcactcaacagcaaaatgggacatttcaacttcttctccgtccatcactttaatattaccggcgtcactataacagcttccggtgatagtcctaacaccgacggtatcaagatgggttcatgtagcaacatgcacatctccaacacaaacatcggtaccggagacgattgtattgccattctctctggaaccactaacctcgatatctctaatgttaaatgtggtcccggacatgggatcagtgttggaagtttagggaagaacaaagacgagaaagacgtgaaaaacttaacagtaagagacgtcattttcaacggtacaagtgatggtattcggatcaagacttgggaatcttcagcttcaaaaatcctcgtttcgaactttgtgtacgagaatattcagatgattgacgttggaaaaccaatcaacatcgatcagaagtattgtcctcatcctccttgtgaacatgagcaaaaggttaacattctattcaaaaaacaagcttcatcattctcttatttcatcaaaagaataagaacaaaaatataaaagacaacttgtgtttatttttcttcagggagagtctcacgttcaaatccaagatcttaagttaaaaaacatatatggaacgtcaaagaacaaagtggcaatgaatcttcaatgtagcaaaagctttccgtgcaagaatattgagctaattgacattaacataaaaagtaatggacttgaaaatagttcttccattgcagtttgcgaaaatgttgatggttctatgagcggtaaaatggttcctcaacattgtctgaattgatttgacgagccatcaaaataataacgatgtgttgtgtatatgatactttcatttatgaataaaccaaattatttgatgtataggataatgtttttttttataaccgaaattccaaattaaaacataaatatgtatataagctttcagataaaataaaaaattaacatccataatctacaagaaattgtattttctgaaaatcgaatagaaacacatgattaaacaattggacgaaagaatttctacataaatctctgaataaattcaataaatccggttcatctgaagaaactaaattgaaccatactctggttcggtttttaaatgggccgtttgagatttgagaaggcccatagttgataacattcaggcttcaaattgcaaatgatatacaaaaataatttatgcggcttattcgtaagaattactaagattaagggtacaattgaaatttcgattgaaccaacggcggatgtgaaatcaacaacagcgacgactgcagccgtgccgagcactcatctcttcttctctctcagtctcgctcgccatctccgtggagatcctcggacatggtcatgagatcgtaagagagaatcttcaaaaaattgaaattggaaatcgataagctaggagctaaggagaaatgtcggggaaactttggatcccgagatttattctcatcactctactgtttattagctcacgagttaactctcaatgtgaattcagtttcactggacgcaacaaggtctttcatttcaacctagcatcttcgattcggaattatcctcacggtgtgctcagcgaagatgggtactttcgcttttccttttgtcccagattccatttcttatatgcttgaagttcgctttcaatttcaaattctgtacatcttatgaaattattatgtagaatgttgcatttggtattgtgatttgtactggatggtgttaagttaaaatgttcgtctatgttacttcatttgtgttgtgcttatactaaatgcaataattggataagcaggttttataaagtggaagcgaacagttccgtgttatggtttcaggttgtcttctacatcaggttacactttgtttctgtatttttctctgttacactgatcataacatctatgatcctgtatcttggatttctcgcgtgcctgtgtaattcatcttgttgtatgtaatttctgataactggtaacaaggaaaaaggaatagataggttaatggaacagtagaggaagaacgatacgttgcttagattaggaaagcatttagagttaaggtggttctgatttgaagatgtataactgcttggtagtcatactgccgtttatgttttacactacgccattgtgatttatgtttgttattttttttgtaaaccgtcttgtggaacagctttgtgacgtgctgattttcaatcatgatccccctcgatgtgttggttgcgaagtaagatatttggctacttttcttgtcttgatctatccttctacagaaaaagtttctattttaactttgagaatctcaatcagtctctgtgactttgcttttcttcacttaggattgtggaggtccatctcactgcggaacgtcatgtagtgcacttgtgtcagaaaatgtaagaggtattaaaatcacactctgacagcatgttatcttaatgtatattatgtagctcagtagagaatgataaggttgcagattgcacaatgcttttgtgctaatgaagagttaaaccatcttaaaaatctaatcatttgcagggtatgatgtatgcacttctctagggcatgcctcaagcacaaaagttgatattattggtaaggtttaagatatgtgaaaattgagactattttcaccctgtgttctaagttgtgaaaaagctaaattgttaatgctgttttctcccaacttcgtttgcaataataatgtaataaatgtgcctcaggatttttgttttgaatatggtagataaagaggatcctggcaaaggcgtcattgttcagatgtcaactggaaataggaaccaaaattgctcgctttcagtttctgttatttgccagaaaactaaagttgatgtaaggatttgtatatcagacatcctacttaagcgtatgaattgaagttgattttaggagtttttaagacgtaaaacctcgttcaccattttcttttctcagggaccactcactttggcgaaatctggtacctgtcagtatgtgagtgttcagtaactcatctatttgctcttttcctgtagctttcaaattaccaagtgtgattgtttcttttgtgaattttatgggttttaagtttgaaaactgagtttttatttgcatctcaatatcttgattcttaagaagtatggactctgggtagttatggtcttgtttcactgacaggctactcagctgcgacatcctgccggttgtgcagcagctatatccggccatagtagtggatggggctggtttagtaccttactaatcatgtgagcaaaccaatctttttaatgtgaggcctattggaatatgtttagatatcgtgggaatcaaaaatgaaatgttcttatctttctcagtatcttgtgcctgtttggagcttatctggtgggtggtgcagtatatcggtatttctcccttggaattcgtggcatagatgtatgtttcactaccttcctttatatatgcaagtttttctcatgtactgattctatcacaattgaaatgtaaacaccctgttttataggtaatcccgaatatggattactgggccactgtacctcacagtatacaggtattgttctgtgtttctatattctcttctggtagattggtgtctaagaattaaatttaatgagcttacgtttcctcttcatcttgcagagctgttttggctcactattttcaagattcggggggtctattcgtggtcagcaaacctcatattctcaggtcaacttctgagcagtctcagcatcttctctgatccatggtctggagacacatccccaaactttccttgactggttcaaccaattgcaaacgccgctagattgttataccctgagtactcttttggccattatatgactgcaagttataaggtgcctctccttttcagcttgttatgtcatggatccctgtagaaacaaaagaatcttgttcattggatagaaacaatgtcaagccattgcaatctgcagcctttcccatttcgtgtgtttgctctttggagattgtttcagtttcttgatgctgattttgagtaatggtaaccgatgtgttgatgttttagcacattttgcatccgcttggcgttggataagtggatatctcttttctttcagtgagttttctgataggcgagtgatcaatgtttaggatagagatgttgcaattgaccaaaaatccacgaaccagattgttcttttagtgatctcggttaaatttgagccgatttagaaactggtctagctgagccaaaccggtcaaactggccggtccagtcgtcataatatacagtagttgccaatgaagcttcttgaaagcatctctttgtacaattttgagtattgtagcatctaaagaaacattggcttagtgttttgttttgttggacgaagagtgtgtacaaagaggaaaagtgagagccaacaacttgagcttgaaagcccaacaatttctcaactaattccactattcatttcatcttgaactctctcctgatagttactatataaaaaaaaaaaattatagaccgataattaagattttgtttgatctcacattgttcagtattaattttaataaatgtcagttttgttctatattgttttctaagtaacatcaaaaatccattggacaaaggtaaagacaacgatgtctcatctttacaaattgatcaactgtacgaaaacacctcaaggacacttagcttagaagccaagtgaatttatattcctcacctccatcaatcatcatctcaaagtttccaatagcctaagaaactaataatttttgttcctttttgacagatattagaagagtattcatagtaaaaaggacaaaggaagccaatgatttaatcataaccatctaggttggatttaatcaaatacaaaacggactagatgtagtccacagtgaactcagtgattgtttttgtcttaaaatcaaggtaaatcacatgattacttaaaaacaaacagagatatacatttttgctgaaaacacgaatgtgtatataaatggattaaatcttacgaaaaagcattagttagtagacaaccactctgttgcgtcaacatttacctactcatcactcttaagtatacttcctttgctaattcacaaaaatttcatcacctaatataatcataaccatattataaatagtttaatcattgtacaattcacatctttagtatttcttgaagcaattccaaaataaagttcttttggcttcctcctcccacattcttatttggttgaggagaatgagatcatcaagaacacaaagtgttcatttcttaattttatctcctcttttcctaataatataaaatttgaaatcacatttgtaacactaattctcaaatcctaaacatgaaaccttcatcaccaatttcactcactagttcttcaattgctagaaaagctcgtttttctccttacctcttcacactcttagccttcattcttttcgtctctgtcctctatggtgaagattttatgtgcatctttggacagctcgagcctaacttcgtcctcccgccttctcgaacacccggtaatattttgtttattcactaaacttgtggtttgaatacgcgttgacaatgaggaattgagtttgtgttttggttttcaatttcttggattcttaagaaaagaataagaaatcggagaagcttgcgtttgctattggtaaaacagaggaaagctgtgacgttttcagcgggaaatgggtgagagatgaagtctcccgaccactgtatgaggaatgggagtgtccgtacattcaacctcagcttacatgtcaagaacacggccgtcccgacaaagactaccagttttggcggtggcagcctaatcactgcgatcttccctcgtaagctcactctaaacgctctgttttctctgtttcatgggttactctgttttctctgtttcatgtgttgctctgttttctctgtttcataggttcaacgcgtcactgatgctggagacattaagagggaagaggatgatgtatgtaggagactcgttaaaccgtggaatgtttgtatcaatgatttgtcttcttcatcgtcttattcctgaagatcagaaatcaattaaaaccaatggttccctcactgtcttcactgccaaggtaaacctatctacttaaacttattcaaaattctcaccttttattagagcttattatatctttgtgcaggagtataacgcgacgatagagttctattgggcaccgtttcttctagaatcgaattcagacgatgcaattgtccatagaatatcggatagggttgtgagaaaaggatcaattaacaaacatggtcgtcactggaaaggagtcgatataatcatcttcaacacttatctgtggtggatgactggattgaagatgaacatcttgtaatcattttgaaacttaaaatcgtaacaattcatataactatacttatcaatcatattagagaggtttctgatattgggggtatatataggcaaggatcgtttgatgataaagagaagaatatcgtagaggtttcgactgaagatgcgtaccggatgggtatgaagagtatgttgagatgggtgaagaacaacatggatcgtaagaaaactagggtcttcttcactagcatgtctccaacgcatgccaagttagtgactttgaccctttttatcgagcaatttagcccatagttagatacatattgacaccataaacagattaaactttacttactatattggcaaactgattgttactttcttggcaagaaacttactggttaagggttttgttgattttgttttgttcttgttctatgactgtttcagggggatagattggggaggtgaaccgggtcagaattgctataatcagacaacacttatagaagatccaagctactggggatcagattgtaggaaaagcataatgaaagtgattggagaagtgtttggaagatcgaaaacaccgataacgttactgaacataacgcaaatgtcgaattacaggaaagatgcacatacgtcgatatacaagaagcagtggagtccacttacagcggagcagctggagaatccaacgagctatgcggattgtgtacattggtgcttgcctggccttcaagatacttggaatgagcttctctttgctaaacttttctatacttgagataagagaaaacatttttttcctttgaagacgacagcgctttttgagtttggaaagagatcttgtggagaaattgtaaaatttagtcattgaattgatattgtcttttttggttgtgagataaaaaggtttgacaaatcgagaatgataagtagcctctaaacagtctaactaatgtaatgtagcaaaaagaacaaaaagtggtctctactgtaatcttctaatttataagtgctgattcgccaaacctaactgacaaaactcgtgttccggtgttccgatgggcctttattgggcttaattgttttatgttgttttctatattggacacacataaaaagtattaacacacaagtttaattgtcttagaccgaacatgaatggaagtaagaaaattcaaatcataacaaaaaaaatctaatcttacataaaataaagatagacaataaatcaataatatcaaattcaggttataaacacacactcacaaatataaaatcaaacaatttcgttaatataattttgttaaacttgtgaaattaagatgatttttataatatgaaggtaatgaaaatattattttgaagcgaatgaactgtgaactcatatattcagaattttatatttttggtagcaaaccatgtatataaacctaataaacaaatagtaaatcgacgttttcattaattttaaaatcgtatttgataattttcaattactatatagaagatttttatccgcgttgatgttttcaacattacacaccactcacaccgaaatgcttccaaacctaaaatcgtagaagttaaaatcatggacgaaaatatctatccccaataaactttaaggaaggaggcggtgttcttcacgttacattgaatttggtttgcctttttcagacacactcatatgtatatattggataaatcatctatttacattttatagcaaactttatatcttattctaattagttaaagtgttagatagcccagctaaagactatatgaaaatacgaactatctccgttgctttttaaaagtaatgcatattatatcacagctatgtacgttatcacaatcttttatgcatgtttatttggatttgaattattaagaaactagttaaatagtagtagtttatatgcaacatgccacattggaatatacaaaccccataaatcgtatctctctggattggtcagaattttcatttttttgacacgggaatacatatgttttcatatgtaaataaaagggaaaaaaatttcttatgggtttataaaattaaaaaaaatgtgaaataaaatataagtaatataataatagtgatcagaaataggaagacagaaaagaaaataagaaaggtgggtgggtttaaatgtcattatacaaacgaccaaaagagggaaaacattaatagcctccttgccaacttgcatatcaacttgcaattccttccttccacgacaatgtttacatatatatttcgtactcattatgataataaattaataatcatttatgtaatcaatttgatttttctttaaccttttttttatttatggaatattttttaaaggtgtcaaagaatagtagcgacttttttttttttcctttgcaacttgcatgctttgttttttttctataacaagttggattttattacaccccaacttgcattttacgtacgatcatatacatgaatgtctatatatgtattcaattttgaatttggttcacaagtctcgaaatcttactacttaattataaagtaactaaacacattttgcttttgcaaactttgaatgtcttttcatcttgttcattggattctttatatttatataactagataaagttatttgatttttcaaatgtacatttttattcatgaactaatatataggacaaggaaatccgaaaaagtaataattttgacatttgaattattgaaacggttcacgcatcccaaaactataaaaggaactaagaaattttatcattttggtatgtaaataattttgatttatttttttggtgagtaaaaacaaaacatttacgtatttatgtaaagtttgttgatgaaatgacaaataatttgaaaattttacgtttccaaattagggaattaaagatataatgctgtattacctgacaccatttattttggcctagcattatatatgccataaagaaaattcttaagattatatcacataactcaatacatgcattacgccttggttcaagtttaattatcactaattgatattattccatctttgcttttaggattgaacgctttgattatatagctggtgagcaaattcatttaaaacaccaagtagtattctactgtttatacatttcaataaaattcaaatgatgtatagttttactttgttcttctcttaacataaaggaaaacgaatcatctcaatcagcacatgtatgggttttctgattgcccacaattgttcagatctcttcatatatagtagatatgccaatgattatattaatcaaattgtttgtgtaatacattattatgtaggttatcaaaattaatgaaattagacataataatatcggaaatatcgtaacaatataccccatgcattatagctgaatcactatatagtctatattgtttcatgattaactaaattaaaagacaaataataaatatgtaaaatacggcgcaagaagaagattatgaaaataactaaacaatcaatgtttatataataaagctacgagagctgtacaagaagaaatggttttaagggtaaaaccaaagtatcgttgagacatacatttaacagaccctaaaaaccctaacttcgaaaaaccaaaaccatcttgtttgatataattcttgttttttgttttagtttcgaaaaatccccgacgatagttaaatacttaaatcttaaaatccaaaaccacctcgagaatcccaaaaataaaagataaattttgaaagagagaaatatagaaaataaaataaaaataaaaagattgaaaaaatgtaattacgagaatttagaagtgttctcggcgagtttagccagcgattgcaagttgcaccgtactatagtatcagcaaagctacaagtctcttccttatcgttacccgccggtacgtcaacgacgtatgactcaacgacacgtgtcctcttcttgccgtcggagtcctcctccgactcatgcaccgtcgtcaccgacttgtagttcatgagtctgtggtccccaccaacgacgctgaaactgatgacgtggcgatcatcgtccatgatctcaagccgctctaagctaaacgccgcggggagaccagagacgactctgacctctctcaccgacccaacctctcgaccgtctccgataaccacgtggcagcttttcacgaagtgtttgtacgcttgagggtgttcgaagcggcttaggatcgaccagactgtggaaaccggagcctccacgtcttgtaccacgacggagaagcactgagaaggaccaaccacgtgcgtgtgggaaagctccacgtgctccggcacatcagccatcccgcgcgtgaggctcactttttgaacctgtttctgatggtggtggggatagtttcttacggtggcgttggctgcttctgcggcggtggaggatctctgaaactgtatcgacgttggcattattaaagcaaatcttttctctatatctcttttaatattcttggctctctctaagaaaacaaatggttttcttcgtgaggttgtattaatgagagatatttacatgtaatatacagaactatataaggacagagtgtttatatataaaaatgcaagtatgtggattaggaaagagagttagtttgtgtgggttcttcggttgtccacttgggatttgtttggagtttgtgtactgcttcagttaagaaacgtctctctctttctttatatcaaggaccggcccggtttcccatgaaattctacggactggttctcgatatttaatataaccggttattaaattttaattttgtttttccttgctttgttactgaggctgtctatttgtcaatggtgctatatatttcaccagtttattacaatgaatgagcatgttgtcgtaaccacacaagcattactataattagaatggacgtttttatgttttaaccaaaaacactcttgaatgaaagttgagaaaatgaaatcaatatcatttaagataccgagaaaaaaattctgaactcatctctatctcaccgattatatcaatattcagaatataaaaacattgaacattatctttgaggttttgcatagatatttcaatcttctactgtctcgaggctatatatatagctaactctaaaacgttattaaagattataagaacatgatcactatgtgtcgagttggttaagctatatatattggttaagagctatacttaatttatgcataggtttgaaaaaattcttgaaacaaattggttgggaggaccgacctttgtctttgtgattgccgatctattttcagttggtactattcttggatgcgtttttggtggatttttaattttgttggaaccttctgactaaggtaaaaatttcaaaaataactccataggactttcaatgttccaagttggtgaagatatcatgtcatgggtccatcataataatctttcctcatcttgtaatcaacttgagcctttcgacgatactaaaaaaagtattaatcaaattccttttcaacaaagaaaagaacagaatattaataagacgaattagaagaaaatcaaactaagcagtttgctaaaagtaaccaacgtaaagtcagggaaatttacgaattggacaatatttcttgggtgtgttttcttccacaaacgtatattcaaatcatatgaatatattggactcttggatttgagtggtgggcataataacaaaacacaattgggaaaaataataaagggttatctaatgcattagtttttccaacaactatacatattcccaagtagccctagttgttaagattaatacgaataagcgagcaatttgcagtactaattatatctgacattttatagaataagaaggacaaaaagttacaatttgctattttttgcaccatcctcgatataaagattgctcatcttataagctttcgggttaggtgacataatcactcaccaatatattactgaacacaaatagattacaagttgatgtggaaaatgtattaatattacggtgatacatttttgggttcaaagagtcaatctcaaatcaatgcatcagacgtattttgttacaacaacataatttgtgccaacttttttttttgtcaaaacatgtattatatatccaagatttaaattccaatggtgagatagtgacaaacattagtataaacaactcgactccatgtcattattatttttgtgcaaaagccggttgtttgtttgtttgtgaatatttctcgagaaataaatctccaatatgcataaaatattattccacctaaaattattaaatccccaactatgattataaacaaaatgcacttaaaatttcaaaaataagtatcgaaaaaatcaaagataagcttaaatttcgatagatatttgaatgaatcagattacaacgtgatattaagagaagattatcgatcaaaaagtaattaaaaggagaaattgtccaaaatagttgcatctcattcttgcggagaagaggacacattgtcaaagggaacttgtggaggtgcaatacccaccaattcattggatttaattaattaacagtttgccaacttgatttcttcatttttctaaaggcttagaagatcttcaagattcgagcaagaaaaacgattttggagaccagaatggaatagttaaagccttttaaataatatacaactatgtcccatttgcactttcaaatacccaatttgccttttgtagaaaatacagatagataactctctaatgataactttattattcatacctcattgcttatgtaatctcagacaacctgaggaaagtctgcagaccaaaaaactccactactggatatttccattaaactaagccaagtttcttgaataatcaaaacttgccaagtcaataaaaccactacgcaacatcgcattattccatctccattcttaaggatgaaaattagatgtgagagtatccaaagttcaaagatcaaaactttatagcttatatgcatccgaagttcaaaactttgatatgtaccgaatgttataaactttttctaaacccaacgtttgaacttcttcatatgtcatatgtattcacaagaaaaagaaagaaggaatcatatttgaacttgtcctacattacctaactacatgtactacgtctcacaaccattaatatcagaaagtatcagtagcttcaaagaagggcagcttctagctagtaacagctacaccgtctcggagcagaatcacaaacttaggccagtcaaacgaaatttgaaatcttatgtagatccatgaacatctttgtctcctccaaaatccaagtcctgtatgtcaagatcattgaacctgcgatggtctaaatcaataccatagttctccatatcactgggctgcacataaggacatccataatcaactcctggttgagcaatctccatagggttgaggctcccgagcaagttagaatttggaaactgcgtttggtaactgaaatttgggtgtctatccacttgatactgcattgtctcttgaccagacacattgttgtcgtttaatatacccaatagctcattaatatcaaacgtttcatccacaccaaactccaatggttcttgttcattgccatttcccatcaaccaagcatccaaagtctcccttttcgagtcctgtccaattccaaaaccaacagccaagttatgttcttccctcacttcctcttttcctttcagctcctctttaatacactgagaactatctaagagaacatattcatcgctacaatcctctagtttcacctgaccaaaacctgaacttgcatttgtatcctcacgtgcacaaacttcagattcatcagaaaatgcagtaaccgagcctgacacagtggcagtggcagcagtcgaagaagagcgatttgtgatctcgggaagattgagtctggcagactgaccatatatagctttggccgcctcgtcataagccaatgcagcttcatatgaactggagaaagtaccgagccacaacctagcacctccgtctggctcacggatctcagcaacccatttaccccatctcctctgtctaactcctctatagtcacaaatcccgttttcaggtccacctttacctttcatacaacccttcctcgaaccttttggaggaggctttcggattgattttggaccaccaccatcgatacaagattctgcctcaatctgctcattgtactctctccattgccttagaatctcagctacatctcgtgttccacgagacttccttttcctggtagaatcaaaggggatagaagcaagattagcaacatgctcgagaactccaattttctctcttcacaaaatttcaagcaacaggttcaactatacttcggatcaaagcacctttcaaagaaacaatttttaaccacctgaacgtaattacaccgaagtagctacaagaagaagttttcataatctgcagcatcacagcgagcaagaaagaaactccatcacgaacagattaagaaactagaacagagcaaactcagaaacagagaatcacctaaagattcaacatagaatccataatctaacttctgtatcaggaaaggtaccacctttaacgattattttagctaaaaatcctctaatttccaagtctcttaaccacacacgaactagaatccacaaatcgcacagaactcaatccaaaagagacaaattgtgccccaaattaacaaatttcagtcaacaaaaaaccccaaaaaccctaaaattgaaaaacctttcagcttccacctattacacaaacaaaggaacttggaggatatacacacaaaacaacaaaaatcgataaaaagaaaatcttaaaccctaacaatgaacaatcacatttagcaaacatacagaagagaggaaaaaaaacggagaaaaatcgaaaaatgtaacaaacaaacctgtcaacaatctccgacggcatgtaagaaagcactcgaacaaagtagcagctgaagaagaagaacacaaaggattcaatgtaataatagtagtagtagtagtagcaaagacgatagcttttgttttctcgttagcagagaagagaaaggtttgggattgtgaaaggagaagcctttatatatagacaagtcttaattagatatttcagatatttaggtgatgacgtggcgttcgaacttaccagattctgatttgcggctggatccagagtcctttcctttttgctttgggcctaagttatttctgattatgctttttgactattttaccctcaaagcttctttgtaatttccgcttatgatcccttttactatagctgaatacgtcatttactcattttcgttgactagtcaaaaatcaagtcttcttccacacgaagctatgggctaagtatggattattgttttatattttttgtaaactttattattgatatgaataaatttagagaaaaatattaatgttttatatgtgttttggtttcgtggattacccttaagagcctattatgcttcttttcgcgagtatataacacattgtgttagacaagttcaaattgtgaatgagactatgagtgaatttgtcgttaaataaaggagaccagccttcgtggagaatttctatttttcctacgaagtgacaatccattttctctttgtctagtcaaggatccatcattcattgtaatatgaacgttaagaaactgtcacatacatatggaatcaaatccatatttggatttaagccgactagtaacgccccaacttaaccaatgcagttattggacttaacattttggaaatgcgagaagttagagatctcaacaaataaaggcgatcattacaaaacttaaacctagaaagaggataattttggagtgatggtgacgtagaggatgatcgccagtttcttatcatttcaaatgcttgatagaatacatctcctcatagattgagagatagagaatataatattttgtagtggtggtgatgaggaggaggaggattgagtgttatgagagtttcagaccactcttggtgacaatctaaagatcttcctttgtttactttcttgcatttcaataaagctccatatgagctatctcattttcaatctacaacttaagacctcacaatagtcaactacgattaacaatacactagaactatctaggagaacatattcatcaatacaatcctctagtctgacctgaccaaaaccagatcttgcatttgtatcctcacgtgcacaaacttcagattcatcagaaaatgcagtaaccgagcctgacacagtggcagcagtggaagattgagtcgggcagactgaccgtaaatagctttggaagcctcatcataagccaatgcagcttcatatgaactagagaaagtaccgagccataacttagcacctcggcctggctcacggatctcagcaacccatttaccccatgtcctctgtctaactcctgtatagtcacaaatcccattttcaggtccacctttacctttcatacaacccttcctcgaacgttttggaggagcctttcggattggttttgaaccaccaccatcgatgcaagaatctgcctcggtctgctcattgtactctctccatttccttagaatctcagctacatctcgtgttccacgagacttccgtttcctgggcatagaagcaagattagcaacatgctcgtgaactattgggcacagaagcaagtcccattttttctcttaacaagatttaaagcaacatgttcaactatacttgggatcaaagcaccttcaaagaaacaatttttaagcatcacagaatctaccaacaccgaagtagctacaagaatttttcacaatctgcagcatcacagcgaataaaaagaaaccccatcacgaccacaattagaacagagcaaactcaggaaaggtaccacatttaacgtttattccagctaaagatcctctaatttccaagtctcttaaccccacacgaactcgaagccacaaatcgcacagaacgtaatccaaaagagacaaattgtgcccaaaattaacaaatttctgtctacgaaaaaccccaaaaaccctaaagtgaaaaccttctagctttcaactactaaacaaacaaaagaagttactttaaggaacttgataccactcaaaaacaacaacaatcctgtaaaaacaaaatctttaacaatgaacaattagcacacatacacaagcgggaaaacaaaaacaaaaaaaacggacaaacaaacctgtcaacaatctccgacgctgacggcatgtcagcaatcactcgaacaaagtagcagctgaagaagaagaagaacccaaacgattcagtgtaatagtagattagtagtagcaaagaagatggcttttttcgttagcagagaaaaaaaaaggtttgggatttgtgaaagaagaagcctttattagatatttcagatatttcggtgatgacgtggcgcttgtgagtgaacgttaaaaaactatcaaatcaacatttgggtttaaggacttgccacaacttaaccaacgctgccaaataaatcgatacaataagattttggactttaccattttggaagtgctacaagttagaaatctcaataataaatccagtataacaaaattgtacgatacaatatttgagtaaaggtggtgaatacaacaaagaagaaaagagatgaaaattgtcaaaatatggtttgcgaccaatctagtggcaatagagtttgataatagagtcagcgcctgcagtgaatagccatggttgtctcggatgaaacttgcagtccaagactcctgcagtcataaaaaataatcaaaacacattaatataaacgatcttacaagttaatatgcgatagtgtattcttgtaagaatcaaatacactgtaaaaactgacctccttttgaagaatgacctcttagaatctccaatggcacaatcagaggattctggttcagatcattatacaccattccatggaaaacataagctgttgaatcctccgagcacgaagcaaataacggatatgatcgatgaactgccacatttgtaatgtctttaggatgattcttgagagtcttgtatggtttcgaagatagatccatgtcaaaccaacacatcttcccttctttgcttcctactatcagattatcaccaccaggatgaatcgccattgatgagatttctctcaatcctgtctcaagctttttggtggcctcgcctggcttcaaaagattgtaaacacgcacgtcctttcttgtcgcaacgaagaagtaagaaaggctgggatgaaaaagtgtacagactggaagtccacgaatcttaaatgggagcctttgtgttttctgttttgacagttggtgcaataccactccccgtgtttccccggatgccatcactgttgagagatagtctcctttacgatgccagtcaatagacgatatgctctgaaagtaaacaaaccagtttaagattttccttatgtaataactgttaaaaggagaatcttttgcaaaagtgtaccttaaaatgtcttatcttaatccctccatataactcatcaggtagccaggttacaattgctgcaactatgaagtcgtgcaaaacataccaaccaaaaagatttaatcatttggaatttcatcacaattacatacgagatgatggcagttattccaagccacttaccagatgcgtctggttctgggatgtttcctgagtgaagcctctctttagtaatttcctgttcctcatcagtcccaagttcagtgttcagaaaaaacaaatctcgtcccctgcaatgtgagatgagaaggtttcacaacagacaattataataaattcaaaagcatattcacaagatcctcactcacatggcaacggctaaaactggaagcctggaaagaggattccaagccacacacatgatagcttcgtcaaactgccagaccttaaggcatctaccagtctccacttcccacatacggacagatccatcagttgaacctttgaaggaaaaaagaatacaagattagcatcttgaaaacaaaagagacctcattgaaaaaaaaaaaaaataatgaaatacctgaggctatccactcgccagaactatcagtggatattgaagtaacagcccctgtatggcctttatattcaagataacaggagttaggataaggtctaagatccttcctactaggtagcttaggcttcaaagattcagggtcgatgtttatctggagaaaagaaacataatgtaagaaaaaatacgggaaaaacaaagaagaaaccaaaaactgagatgataagtactcactctcttctttcgaactcttggacataggtatagatccaaacaacgctcaaaagactccttcagtgcattctcatacgcagggatgcttctcaaagatgtaaacctatgcgcagatatatttactgaaacgctcagcggacaaataccaaagaaactacattagagtagaataagcgaaactgttacataccttgtaggaatgaattttggacgatcttcctcaaacatcaactcatatgaggctttctcctcctctgttggaatatattccaaagaaggattgtatgattcatcgtgtcctggaaagccaaatagtacaaattaaaagtttgaaaacggaattcccaagagaggaagagaaacaacagaaagtcagcgaaaagttttcacctggcaatttaagcttgggtggaggaatataagttaaatgcttgctcttttgatcagatgtcgaatcatcaccccataaaaggtatacattgggctcttcttcaggcttatcaaacttgatccaccccttacgtattgctctaacaatcttaacaacctttttggcctcccattttgaagggatgaatcttcgcttgggctctggtgcacttgagagtggatgtattgcatcatcatgtttgaaccactcaacataaggctggtcccaagagaatcaatcaaaaggtcacaaattgaagagatttgcataacattagtagaaaacggctacacataaaacagatacgtactgcatatggatcaaagtccgcatgtggagcttcccctttgagtattctctgaacgatcttgctctcctctttagtcagctcaacgtcctcgtcattatattcatcataaattttgcgcctaaatccccaaaaactttcatcagcattatgacaccaactaaccacataccaacaaacagaaaagtcttcatactgaccaagtcttagagtcatctatagttgcaagaaaagagtcgagtttatcttgtttttctttcttagtaatcttcttcccagtgaggtcataaccaatatgtttctcatcttcataccactttaagggaacattcccaactgtatttctagatggaacctacagattaaagatacaaaaatatctataacttcatctggaaatggagaaagatagattcaagaccaatatgagatagagaaaagcatcaaacctcatcttctgaggaatcgctctcttcaaccgcttcacctcgctcagaatcttcatcactcccatgttcctcattattgtcactacctacatgttcacttccatcatcatcctcgttatcaattgacccatcatgctctgcaccaacatatcctaacatagttaatctctcttacttgaatttactttcccatgttaaagctagaaactttattcccccattataaactcccgcaagtattttctaacacactataattagcttcttcaattcaaaagcataaacactaaaaatttaagatttgagctaatttagacgaaaagcagagtaagaaaagtaccaagcacgtcgtcgtcatcggaaaattctacatctccatcttctgttccttcatgtgttccatcatcctctgaatcggaaaaatcggagtcgaaatcgtcggaattcaaagaaccaggcaaactctaaaaatcacccaaaaaaaaaaaaccagaataaatcaaatgcagaataaagatgttacaaaagagaagaggagcaagaagaatacatctccgtcgtaatcagaatcagttccggatgcttgtagaaggtcttcctcttttaagctttctgcttctactggtttcttctgtttctgagattttccagaaacgtttttgcttttggtttctatcagcttatcttcgttagctcctttgctcctcttcgtcatcggagcttccagaggcgagttttggcctgagaagaaatttgttttaagaaggcaaggggatgcgtaacaagagatttagggttttaggttgaagtcgtaactctctaatgggcctgagaataattttttattgaacaaggcatgggaatgcgtaacaagagatttagggttttagataatggacctatatactaatgggcctttcgtgaagacgataaaagaaaaaatttaaaacctttgtggtggtgtttgatgaatggtgaaaagtgaaaacgacaaatagactttttggttgtgattaaaacttttttattcttcttggttgatccaattctaaagtgtctgataatagttatatatcatgattttcgccaatataaattaacaattattaaaatttgtataatagatattatctggttagtgaattttaaaatatatatgttaggttttaagatgacaaatgagtttagtttgctatttattttagtatttaattggtttgcaaatgccttaaaaatttatgaatatctatcatgtaaaagatcaattattcttttatatattttgcgtgtttatagctaagctcacactcgcgacctaagttttattttctacggtaagatttagtttggattttcacctttttgtatggattaaatcaaatatgacaatcggagttcttacaaattattacacgttaatttcttgtctactctaatatttcggtagattagtggcaacatgcatgtgtaagaattatattattattatcatttgttacatttgttataaaattagccctctgagtactcaaaaatataacaaagtcatgacaacttttgtttcttctagtaatgtcgatgttatgattaatccgcgtcggaaatcactttgccccaaacttttctgctcaactaatttggaatttcaggccactttttcttgatgtcatattcacttattctttttcaattaatttcgttatcatcttctcaagttcaaattcaataatgttacgtaaaagaataatactcatcaattcatagcaatgcgttttaaaacaaaatggaattaggataagtttctttctttataacttcaacattcaatattgactcagcaaatattacgccaacaaattatgttgtttattatgatcgcaaaagttctaagctgattatggaaataagtaggaatttagctcaacaaccattcattctaattctaacatatcaaattcatgctcttagtcatacacaaatcgagtgaatgaaaccttttaacaaaaaaaaagaaatcgaagtaatgggtcaattaagcataaagaaaaacgaaaaaaataaactttcatgatacgtatgcttaggctcttagcacttgatttggtactataatgtcaaaagaatacatcaataatcgagaaaacttaatctgaagggtccgggccaactcaggagtatgacccggtttacgtctataaccaacaaaaaacaattgaatagaagaacatgaaaaactataatgtggttttatgttacaaagttcttgaactcctaacaaacgggcaaatcatgaggaggctgttctattgtctgcaaaactccatttccattctcaaccaaaaaagccatggctagtccccacgatatgtgtgcatctagatgacaatgcattatccagacccctgttttcaatcatttttacacgtatttagtttagggactagtctcgatatatatataataaattaacgaatcatgtaaattttatagctaaactgaaaagcgaagaaatttggataaaaataagtaacacttgtaatgaatgataactagtagtatttttatactaatagtttagcttaccagggttgtctgcgatgaatctgatgacggcccaaccattaacaggtacaccgacagtatttctgagaggcgggtcttcaagattgaatttcgcggtatctttcttgggattgaagttaccgaaaccctcggcgataatgtagaaatcgtagccgtgtagatgaatgggatggttttcgggagttactatacctgtgtcttgaagaacaatctgaacccttgatccatacttgagtttgtatagcttagtccctctatcaggttggtagagagatcggcttatgttgttaccagtgtaatcaaatttcaccggaggcttcgccggaaaatcggttgtgaagactccggggatcccatggtggtgagcttgaaggagtgagtagttacttggaagagcaaatgaaacgttgttcatcgatgcagtgaaacgtgtgccgttaggaccttgacatcttcttgatctgaagttcttaggacagttgttgagaccgagtccgatggttacgaagagattctcgtcgatttctgtcggaacctcagctcgtctaagtgaccggaagctttggctgaaacgtgtgacggtgtttgtgtcgttgtaggcagggaggataggcatgatcggtttgaaggaattacccttcttggttccacttccgccgcctacaccgcaacaaggggcggatttgtattgaaggattgctgttgtggttgtgtttccaaacggtgcgttttgggcgctttggtaagctcttgcggccatgtagtagcgatttggtggttggtcaccggttatgaggacatctgtggtttgtcccgggccaagaactatcacgttagtggtgaagggttttaggtatgacgcgtcagctccgaccaccgtgagtttgtgattagccaccgtgaagaataacggttggtttaatgctgagtttattactcgtagtagtatagtctcaccaacatttattggtactactgtcgtatctgtaaccaaaagattataaaaaagtctagttaatatacttatttgagtcttttgggctgatgtgttttattttgactaaaagataccaaagtcagttatgacagttgggagaaaacagggtaaaatatatgggacaagtttttggacagttgataaaattaaaattaatttgaagaaaaagagtaaaaccttgagaagagcatttatagagatcgccaggttgaccattgatggtgtaagcgtctgagttattcggagctcctccggttcgtatagattctctcaacacatcaaccggatttgcgtcccaccattcaccttaaagaatcataaattatcagaatcaaaatcacctatttattaactatgatcacactgaatttgttaattatgattttttagtataattttaccaagaaggagagggacgttgcggtggggttttgtgaatgggtaagacgaaccagcaggaggaaagacgagaagtgaaccgtagacagttgctctaagccacgaactatgagcatgccaccaaagtgtaccttcctgtccttgaattgtaaaccggtacgtgtaacttgatcccggtctgattgggcattgggtcacaaattccggtccgtcagcccaaccggttcgcatctgcctcacaccgtgcctatagatgatagccacaccaaaccgttcaatacagtaaagaaacgggcccattaatcactaaaagcacgagagtgtggtttaaatcgtgtattaccagtggattgtgatgttgtaccgggcccggttgataactttgacgacgagagtgtcaccgttgttgactacaagcattggaccgggaaacattccattgactgtaatactgttgtgtgtttcacatagtctcttcacctttgtcgcttgtatctgcatgcataaacattatatgtaagcatacatcttcttttacattttgattaacattttgataaaaaacgttcatattattgaaacgcggtcgtactatgaactcgtggtggtgtgctttgttggcttctgccacggaggagaagagaagaaaggcgacgaaagagatgaagcagaggaggctcttggtgacatccattgatgtgatttctgtaagcttctgttcgagccggagggttttagatgaagtgtggaaaaagagagaaaaatgttttgttgggaagtttcaagaaaagagatggagtttatatagagagacatacaatacattttcaaaaacttggtgaatatatttgtgtagtttatttttattgttttgttttgcatatgttattttcatgaatgttgtttaattatgcggttggaggattaggttttgatttaattgaaggccaaaacttggttcaacactagaagagtagttgcacccactggggcctataagaaaaacaaaaaaaatcaccgagttaacaaataaaattggaaaggtgattacgtctcttgaattcttggttaacacgctttttctattgacttttgatgtaatattccataattgccataaacatagtacatataaattatacactaatataagattttgttttggaccctccattaaatggatcaaaatagtatctggagatgtgtacactgggttgccaacaaaatttaagtacgcaatgttgtgtgatctctatctaaataaatatcaaatgctcatgtaattgacctgcatgcacggatgcacaacatgtaaatattccccaagattggacactataattctctaagattggacagctttaattgacatttaatacataaggcttgagataagatcgttttgataatggctaatcaataattatgctagtcgctttcgttattaattggatcttgatcctgcttggactgttcggtcttggtataagaactgtgtttttctacggtctttagccctcctaattttaccgatgctgaatttgtaacatttgcatgcaaccgttgttattttgttgttaactttagtcgggctggagacatatgcccctaaaaaacattggtatgcgtaaaaaccaaagaaggaaaacgtgtataatataattttcgtagtagtatttctttatttatatgtggtcacctacattcaacagtataatacctaaagaaagacgaattgagcgcatgtctaagtcataactgtattttactcttttttgtcatttcaaaatgtttatcattcgttttattaaaaaaacttatttaaatagatttaatataactgccagctgattaaatcgatgaaatattttactatattagatttaaggtcgagtttaaggttatgtttgttgagaagtttatagataaagtccaacatatcaaataaaatctgaaacttcaagtcacgaaatgaaaaatatagaattggatgttttctttcttcttgtctttatcaatttggttaactaacaaaaaaaaacaatttgctatggctatcctcaaaatgcatgatcaattcatgataagtctaagtttagtggatattctagtaactgaatcaacttttttgttttaagttttgaattacacaaaattaaaatgtcaaaacctatacatcaacactatatactgttctgcagtgagtttggcgttaatagcaggtgaacgattttttctttttgcaaatagattcctcatctttagaaacttttggaatatataagttagacttaaaaaatatatttcgcagtctgttaacgacaacttgtgtttgtgatcgtccaaatacaaacttgcataatatgttgattgaacgaaaaaaagaagccagaaacgattattctctttatgtttaattattactagtattatttttcttagaaaaggaaaccaatttacgaggaagaatggtccattttagggtttatgtggcttgtccgtaacactaatttacgaggaagaatggtccattttagggtttatgtggcttgtccgtaacacttttgaccacctcccatctgaatttgcaaaatctcaatgttgttttcatacttaatacaaataaaaatatgagacataacataaggtcaacttttaatataaggaaaaaaaaaccgtaaggtcaactttccataccatatgcttcatacaaacccgtatatgaaagaaacttatgaatcaactgtaacatcattgcgtagaaagattaatattattatcatcataacgaaaactctgtggtttaaaattggtacaataagattggcttcaagcttaagtaaaaatgatcattgttttgttagtgttgaaaaaagtaaaaatgagttgaggtaaacaagatgattcgtctaaccgcctaaatcacaacttttttcaacccctatattcttgtcttaacaataacacctttaattttctttaaccgaatctagctacctctacacctatatgtcgtaaattgtttcctttatgttttggtttttgccaatatgtattgaaacgtcaaaactgtgtaccccttacgtaaatatacggaagaactttttttaactaaaactttttttcctaaaagattaagttaatacttttggaaaggagagaccatgtaatccgttacgtaaatatctttaacaataaccatccgaaaggtaataaagttgggaaaaaatgttaacatcatgttgttaagaaagaagaagtacatgagaagaatattggggacatggattggtgaacaagaaattagtaattatgtttggtggaattagttagtgtcttcttctttggtatctttaacctctctatgtgctaaatctctgataatgacaatctcatgtttagaaattagccgtacctttttgtatatagcaaagtgacattgaccccgcatctacaattatgttcatagtcaacaacatgctttacttgtctagattttgtgtgttgttctctaattataccactttcctattaactttaaaaataatttctattatttcaactggaaaattataatctagtcattcagttttacaattagaagtatagatgttttcacatgagaccttctggtaatatatatattttcagtacataagatatatatttttcctcacaaaatatcttcactagctatatgaatttaagctttcgtttaattatccttccgagaagaaatcatggtctttgaaatgacatgagaaatgacgatatcttgaactgctacttatgaaatttcttgattaattattagtagcatgggaattatattggtttactctatttctttggtttcctttgtatcttaattccattagtcaaaagtgggtacgaaccctaactaggttcacatttttgttgtcgatttgtcaaaccttctcgttacaagtgggataatcttctttacacaagaggatttgtctatttatcttcatgtttaatggttagtaacttagtacctaagtgttgtttttatctcacattctcaccaataattagaatccaggaaaagatttcacaagacattcttaacattaaaaccaaagaaaaaagatttcacaagacacaactcattccacgaaaatatatctcatgttatgaagattaaaaacaggtcacctatattatatctaagaaagaagcaactcagtgagactttgaccgaaaaagacaattcaggtgaccgaatcttcagtttgtttttggcagccgagtttttaagacaaaatccccaaactaaacgtgtgtcgtttttgtcaaattggccaaacatgtaaatccagtgggaaactttcccatgatataaccctcttactatcagcaaattcgtacacagtattggctgttcgctttcgagatagaggaaacttgtggaagaataaaatagttggtagctagagagacatagacataactagttacaagatttacatctaccacgtatgttgttaaactacatgttgtttgtttaatccttaatactttggtcaaactataatcttcactggtttagtctaaatctaactcaaacatatggtgatgaaggcaaagagtatcaaattgatttaaggtaaatgagatcttacaatacttgagaaggatcagctccaaattttctaaattgtgacgaaattgaagaatacaacacaacaatgcatctttagatctaacacttacagatcttcatcgaatctatactcaaaacataactaaaaaccctgagaatccaggtttcgtttgttctctaggatcagaatcatcaaattcgagcttctcaaactcgtcctgcaacaacagaagcagcagcagaagtagcagcagaattaccaatgaacgagagtaaaccagcattagcaggctcttgttcatccaagaacaaatcatcaggaaccctaaacgcaccatgtaagcaaacaatcgcgattccaatcgttaacgccgatgttaacaaagatccaacactcgtcataaacacaaccacaatcgtagtcaaaacaagaccaagcaaagtctcacgatctgagaaactacgaccaaagagaaccaaaggctgatctgaagatcggaagaggtagagaaacatccaggagcctaagagagagaggaggacgagaagcgagaatggatgcgagaggagggagaaagcaaggactaacgagacaattgcggagtaattgactttgaagtaagcgagattcttacggatccgggagaaggaatcggtgagagagtcaggtctagcgaaggagctccgatctacgagttctagccatggacggcgttgagagaggctttcgcggagagaggacgagaggcgtgagaggaaagtacggaaggcgtgagaattgattggaggttgagattgagtggctgcttgctggttggtgacgggaagaatcgccggagaagaagacattattggtggtgtcggtgagtctgtgcgcggcggagagagtgtgaatttgttgttccgattttagtggaaactgaagttgcggcaaaaccgtgttagatattctaaaggcctaaattttatgggcctataatgttttggaataggcccaatatattaagttggagttaatagcaatttttagatgggtctataatgttggaagaggcccaatatattccactattggttcataaaaccattttttttttttcaacaaacaaacaatcttactggttcagtggtttgtatctatatgatgttacaaggataacacaacacaaactagtaaattagtgtagttaataatattctaattttatttgcagataaattacgacttcctacaattgtttatatgatcatttcaataattatcatctcatttcccaccctatgagtgttctcgttgaacaaatgaaacaatcatatgatcaattgatcatgaatgataaaggtttactaaatatatctataaactgtgaaattaaattatatacaaattatgtacacttgaagctaaacaaattatgaattatatacaaatacaaattatatacataaataaatatgaattatgagttatatatgaattatggtgtcttgagacaccaggaacttggggcaaagacaactggagggaactcgagagcatttttaaagacgcctatgcaaccggtggtggagactacatgaagaagggggtgcaagcgataaaagatgagtttgacatgattgggacaatcaaaatgagataatgaaaacaaatggaggtttgcggaacttgttcatgttgagatgaccgagataaatgaggttgacgagaataacaagaaggtaaaggtaacatgtagttactttctcaaattcgtggatggaaacaataagatattctcactcagcctaggcaatgttgaactcaaacgttgcactatcaattagtgaactccaaatctacactatcaataatgtgttcttgttttgcttcgtctagccaatttatttggcataaacacttggtgttttaatttggtttttctaaaattctactgttgctttatctaaaactctacttgagttttgttttgtttggtgtttgcgtttgctttttggagtgttttcttttgaacttttgctcaagtgattgattgctttttggagtgtttatcatcgagtcgttagttatgtagccactattaattagtcgtttgaaaagtagatgaaaattaagacttgaggaaatcaaacacaatccataatttgaattcaccccgaagataatgatcagctgctattgtaatcgtcaggcttcaagtgtatataatttatatttgtatataattcataattcgtatttatttatttatgtataattatttgaacacactccataattcgtattcgtatttatgtatatacaaacacactccataattcgtatttatttatgtatcaaacatataattagtaaactaaataaagacgaagaaacattattgagtagaatagaggcatcgaataacaatattcgtcggcctaatcaagaatatttcttggaaattcgggttgaaatccacatatggaagaatcttgaatagcacgtactttatcaatttaattacatccctcttaacggtctagctactctaattatcatctaaacctttttccttgtacgttatctcataatttgcaggactcttaatcattatcacatttcaaattttcaatattttactaaagagacgtctcgtgttcgtgcgtagctctatattttctggtttacgtaaaatagttcatgattttgtttagcttaccttttgaaaaaaataagcgaatctttcttcctttacttttcttccactcattaaaatgttctctctatatataaatgataaatctagtcttctaatcatatactctctataccacacatatctagaacaacaactagatattcaatattagctctaatggcttcttgtgacacacctgatgcgtttgcttggcttcaaactcttcctcctctttctctatggaaaggaaatttaatgtccatgtgtatttgctctccaaattcatcacacccatctttgaacttcactcttactcgtacccctcaatctccaaactttttcaccttctcgatagtagccaatttcaagactcctattactctctttatttcaaaaactttcagaaccattagcactaattcaactactttcctcaatgaaaacgtcatatctactctattgatgggttttgtcgacgttgttctcaactataacgtcaagagaaccacttgttcaatccaactccaaaacctaggctccacttctaacctcaaagacgttttcaacctcgctttcttcactttcgtgttcctcatctgcatctacgaggcgccaacgagcctgagaacaacttgtctcaaaacggtgaaagatcagctggtaacttgtaggtcaaggcagggctctaagttgctcatggtgcaactaggctctaaccttgaagaacaatggatgagatcgctgaaccttgcaataaccaactggatcatcgagatcaaagcgtttcagcatctcaagtctccttctcctttgttttcatatgctttctcgactcaaggtctatggaaagttcatatgtattgtcctgtggtagcaatggaaatggagagcgtaaatagttctctaaacgacgagagattgttcttctcgctaaactatcatcaacttgaaggtgtaatccaattgaaccacaggatttacgttcgtgaaaagtggtttaacgtcgcagtaaatattgacaacgtcaggtatcgtaaaattgtgtgtaatcaagcatacataagtaatttgttcatattaatttctcttaactatagatattgtttataactaggtgcgacataataaggcttgtgaacgagaaactattatcggaacgtggcatgggaacagaggaaaaacatttcccctcaagaatatcattgcaactaacaccaacgaatcaatcaaacatcttaatggtatccgtacaaaaatcttcagaaaacccattgacagaattcgaagtagagaaaggcatagaagcaacaatagatccaccaaacacattctttggactaaaagtctcagccaacgagaccacaacaaaaagcatgaagccatggaagttcgaggaatgggttcatggttatagcgccaatctcacttggtttctccatgatcttgacgatggaagagaagtttcgtcctctaaaccatcgaaagtctcgatgatgaaccctcgagcttggttcaagaaccggtactcgagcgcgtttagaccgttcacgaagcaaggaggagttgtgtttgcaggagatagttatgggcaaagcgttttgtggaaagttgataaaacggctattgggaaagtaatggagtttgaggttaaaggttgcgtttggttgacttattggcctaacaagcatcatactttttatagtgatactagaaagttggaatttaaggagatgctttacctcaatcttccttagatatttcttttcttactttcaccctaagcaaaatattcccctagtttgttgcttttttcagtaaagtttgtaaaataatacttatgatggaattattgaatttagaaaatacagtattgtgcttttctaatgacttcaccgacataaagaaaaaaagttttgtatatatgaatatcaaagtcgtatatagtccatagtttttttccgttgttgttatccataaatttatttttcaacattattatacgtataatttggtggatctaacataaataaaatcatgtagtagaagtttttttttatttttgaaaattggagaaccacacaagagatggcaataaaataaaatgaaaagtctctatttgtagatctagagcaatgcaaaaagctgacgtgtaccaatgaagcccacgaccaatggtgggctcttggcttctcaatcatcttcctccttctcgtttccgagattccgcggccaacttccgattatcttctcagccaataataatcagaagaagaagaatcttccaaatccaaacgtcgtcactctttgtctccactctcattccaatgtctcctcctctcaaatcgccgtcactcgccgcgcaattctcgtcgcaccaccgctcctcgccgccgccgcttcgttgtttctctctatttcctcagctgcctctgctgagacttctgcggaatcagtagctcttcctcctgttgctactgctcctcctcctccgcctgtggagaaggaagaggcgataacttctagaatctatgacgcgtctgtgcttggtgagccgatggctgttgggaaagataagaagagagtgtgggagaagctattgaatgcgaggattgtctatctcggagaagcagaacaagtgcctacaagagacgacaaggttctcgagctcgaaatcgtgaggaatttgaggaagcgatgtattgagagcgatcgtcagttatctttagcattggaagcatttcctcttgatttgcaggaacagttaaaccaatacatggacaagaggtttgcttctactcgcttctctgcatattcgttaattgcaatgtgtttttgattccaattgttcttggattggttgcaggatggatggagaggtattgaagtcgtatgtatcacattggccagtccaacgttggcaagagtatgagcctctcttaagttactgccgcgataacggagttaaactcattgcttgtggcactccgctcaaggtagagtcttatactactatattgtcatgaaatcttgagccttttgatcctgcagcttgatctgaaacctttctgattgaagattatgcatttttttaattgttagtctgatgagaattagctgcgcactgcttaatttgatgcaggttttaagaactgtccaagctgagggtatccgtggtctatcagagtctgagcgtaaattatacactcctcctgcgggttcagggtttatctcagggtttacttccttctcacgtagttcttcactcaatatgaatccactcacacagattgttccatttggaccgagttcttatttgtcggcacaagctagagttgttgaagaccatacaatgtctcaagttattgtacaagcagttgcagatggaggtggaactggtatgctggtagtggtgacaggggcaaaccatgttgagtatgggtcaaggggaacaggattgccggcaaggatctctaggaagattccgaagaaaagtcaacttgttgtgttacttgatcctgaaagacagtttttgcggaaagagggtgaatctccagttgctgatttcttgtggtattctgcggccagaccctgcagcagaaactgctttgaccgagcagaaatcgctcgggtaatgaatgcggctggtaggagacgagatgcccttccccaagtatgttttctatgatttcgtttatgagactgactctctgtttgattgttacttactgtatctggcgttcttatgcttacagtaaaaatgaactctaaacctgatctccattattagtattagtacagttgtactttattcagcactcagtttattctgccctattttttttgctgtttagagttgactgtggagttgagttttactttcttttgctcactttgcttttatgtcttagtatgctgatagatttttttccattgttccaggacattcaaaaaggattagaccttggtctggtgtcacctgagattctgcagaatttctttgatttggagcaatatcctcttatttcagagcttacacaacggttccaggtatatccattccggaagatattcctctagtgaatctttttcttcgaatatgcttttcactaaataatgtgttatagccttcatatccttccactgtacattaacttttcctgtatttatcttctctagccagagttaatgatagcttcaactagtaagtaaaccatacttatgatgatcttttgtgttacagggattccgagaaaggttgttggcagatcccaaattcttgaatagattagctattgaagaagctatatcaataacaacaacacttgtagctcaatatgagaagcggaaagaaaatttctttgaagaactcgactatgtgatcactgatagcgtaagagcatcagttgttgattttttcacagtttggctccctgcaccaaccttgtcttttatctcatatgctgatgagacaattgggccaaacagcatagatgccttaagaggcctcctagggtccatacctgacaatgcatttcaaaaaagtctaggtggacaagagtggactctgagtcttaggattgcttcagttattatcggtggcttgaagcttgctggtgttggagttgtttccagttttgcagctgtgggatcttcaaatgctttgtatgcaatacgaaaattcattaaaccagagttgggtgttggtgagcaagcaaagaggtctcctatgctgaagacggcccttgtgtatggaggttatctgggaacatcttcgaatatccgttatcaggtatggtgatgcgcggtgctttacatgttgactcaatgaatgagggatattaatgaaaagtagttaaagttgcttaatgaccacagcaatatattatgcttttgcatcttagccaaggaaggccttttgatgaagaacagtatgctttgaatttatgcctctaaaatcatattactttcaattgcagataattgctgggttaatagagcatcgcatttctgacgagctttcttctcaacctctacttgtaaacatgatttcatttgttgttcgagtagctaactcctactttggaactcaggtcagaattaggcctgtactatgatctcttcttgaattctttgtctcctttttccttattattatttttggttaattcttgatataccgtttaacttcattccaacttttttcataaaaacgcagcaatggattgatcttgcgcgctctacgggtctgcaaactcagaaaagtgtcacaacttccaaccaaatccccgaggttgcgagccaatccacagtggaatacagtacaactgaagaggcaagtatggatgatcttaagaatcaatgagatttatgcggctatgtgactaggtaccaattgtatatgtttataaaagcttttgatcgtattggagggaaagatatattcatttgagttgtatttttgtatcttagcttacgggaaacaatgattcgtgaataaaatttcttcaattagtcatgttggtttgccatatttgcacatggtggtggatgcacgagttttttttttctcttattgcccttcccaaatatgacatcatttatcatgtactgtacagtcatgaattgcttatagttgtagcttatcaattcgaaaattgttgagaataatgggaaatggtttcagatggcatacataagggtttttttgtttttgttttaacaagatcgtttttaatgacaactaacgatattttgtcttcatcgtatcaaactgtgctcaggcatcaaataaattccatgcatgggtgtgattcgctaccatcacttttcactttctctgccagactgacacaacaatctttttgtcatataaaacacaagcttgtcaaagccacagcgagaaccaaaaaactgttgagtaactgagtattgcgcggccatacaaacacccaaggaggaacttcttatgttatcctaattggttatttgtgctccaacaatggatagtttccttacttttggacttcggtgtttgtatggaccacctacaattgtgatttatttaacaaagagaattgtaaaaaaaaaattgttgccttattcttaattattctcccaacttattttttcttctccttttaaattaaatcatttttatttatttattgaaaagttaattacagataagagtaagtgtttgagagttgactcctttgtccttcctctttaggattctcctctgggctctggtaaggtattagaaagatcaaaactttttggattccctgaaattgggtgaaagatgggtaacgctcttacgtttctctacggaaaatgctgcaaacccacaacaaccgatgactctcttggtcctcacggcgtctccgccgccaccgtcggtgtttcagctctcgctcacgatctcttcaacttcgagatcacttcccaggtcttaattttctcactgaaacttctaaccgtcctttgatctacttattctgctgctttcatttgtgctccagtgatctttaagctaattcagctgttggaaggtctctttacttgatttggttcaaaagttgattttgatgatgagtttacctgtaggttcctgaagggcttgggaggtatgttcagtcatctagaaaagctcaagcaaactggtaaaataacacaagattgctttacatgtttcgtgtaggataaagatgtgaactttgttgtgtaatcaatctgtttgtcatgtattttaacattgtgaaaggtatagaaaaatacttgaggcatggaagcaagcaaaacctccaccgcagacagctgaggaagcttctaggcttgtcactgatatcttaaaaaggaatcagaaagctgatgttgaggtatgattagcaagaacagatgttttaaaacatttatgagaattggaagagatttatgtgattgtgttgtttatgaaacaggggcttttgtctttctatggactccctttgtctcatactctagttgaagtcactgttgaagctcctgtgtctttgcctgaagggattcttttcgaatttcaaacacttccggttagaatgacttcagtacaaatcaaaaagaacaacaactcggtttttgggatttgataatgttgctgactaagcttgtgtaatggaaaacaaggtggatccaaaagctgtggcagatggagacaccatcacagtgtatgtcagtacttcagagccggttgtgtcatcttctgttccaagggaagtcaatcttgcagctgttcaaagagcaaaagcacgtgagaagagaaattatccaaaagctgacgaacttcaccaaaagatcattgattctggttacagggtactaaatattgagaatgaggaagttcttgctcggaagttcagaattagactaaggtaaagatcactcttttcctttaagaaaagctcaactagttctaccatggattattttgtttagtgaagctgtttggtgatgggaaaggaaataggggaatagatgcaccagagagccaaatgccgtttgggaaagaggcacaagaagggctcttaaagattgttgggcggaaaagcttgaaggtgttagtttatggagaagatcaatatgggcgatgcgtaggtgatttatactgcaatgggatctttgtccaggtaatagaagtacttgcccttccgttgtaataaaaactttgtttaatcggttattggtttcttatctaggaggcaatgttaaagaaagggcttgcttggcattacttagcttatgacaagcgcccggttctcgcaaaggcaagactagtagagtttgttttgtatatactacaagtacgaagtctctttagtttgttgacatagtatcttttgtgtatttactgttcattttatgtgaaatcattcagtgggaaaaggaggcaaggcagaagcgtattggcttgtgggcttcttcaaatccagagaagccatgggactggagaaagaataataggcgggaatagtcaaccgactttgtttgggcaaaatcacaaaccaagtaatcagcgtttaagacaattgagatttgtgattgttgagggtttttgtttaaatcctcagccctattctgtgtgtaaatggtttgtgcactcaccctatctttgatgagacatatcgagatattatagagttagcaaattgatcaaaatcagtaatgtggtgtagtgctattaaccaaatctttctctaagaagtcaccagtgagaagacagtcagagacgattggtacaatgatattcagacaaacctttacggtaacctctaaaactcaagccaatatcagagacatactctgaaaccaaaatcccacctaaatctgttgtgaaacaaaacctttattttgtttgggagcgatttaattttatttttccggtttgttgtataatggaacacatgattattattgactgctgtcgtgttatctatatgagttttttttttatgactacttttttatgaaaaaagtctatgattactatatttaaaatataaaatattagcttaatcaaataaaaaacattatagactattctgattctttcgatcacatcaacctactagttcgtgatactgtctgacttaaataaaaaatataaaaataattacgaaaaaatactttataaatcaaatatcacaaattttatgttttaaaacaatctttttaagtttagtagaattactaagttaattaagatctttccccccccccttttttagacaaagatattgtttttaagaaatttctgttaaaaatatatatatatatatatataaattttttgagtaaacttatttgtaattatgcgacagtggacatatatatagtactgcagttaggggtgtcaaaatgggtcaaaattcatgggtcaactcaactcaactcaactcatgaaccctaatgagttgaaaattttgactcaaatgagttgatgggtcaaatgggttgatgagtcaattggtttgatgagtaaaatgagttgggttgtaatggttaatggtttcaatggtttacccaattaacccatcaaattttgtaaaattgaattaaaccaactaaaatctctaaaccaatgccaatttaagtttaaccaacacatctaaaccaatttaataaaattaatatttttccaaatttcttaaatatacaagcgatgcaattgagaaaaaataaactcgtaatttttccaccaaaaaacataaacccgtgatttttccgccaaaaacgtaaacccgtgattttcccgccaaaaacgtaaatccataattttcccgccaaaaacgtaaacccgtaattttcccgccaaaaatgtaaccccgtgattttcccgccaaaaacgtaaacccgtaatttttccgccaaaaacgcaaacccgtgattttcccgccaaaaacgtaaacccgtgattttcccgccaaaaacgtaaacccgagattttcccgccaaaaacgtaaacccgtgattttcccgccaaaaacgtaaacccgagattttcccgccaaaaacgtaaatccgttattttttcgcccaaaacgtaaacccatcattttccggccaaaaacgtaaaaacctataattttcccgccaaaaacgtaaatccgtgattttcggtaccaaaaacgtaaacctgtaaaaagtggaatccgtaaatatcttaagtttgatgataatgaattaataatgataattatttattatttttttataataataattaattaaattattacttaaatgggttaacccatttaacgactcaacccatcaaattaaatgagttatgggttgactcaacccatttagcaaaatgagttgggtcaacccataactcatttaattctaaactcatttgattatgagttgagttgagttgggttacccattttgacacccctaactgcagtatatgattacgatgccacgtaatattgacgtcgttaattatctattcttctctcacaaatcaatcatcaattttcagttttcattaccatttcctcttcaccggggaaaattctgttagtttctttctccggtagttgaaagaaaatgtctcctgcgatcaaagcaccgctcttaccaaaccaagagccttcatcatcatcatcggagaaccatggatcattcgccggagctgtgtttaacatctcgacaagcatcgtcggagctggaattatggcgattccggcggctttcaaagtcctaggtgtaatcccatctctatcgataatcgtaatcatagcttggctctccaatgtatcagctgggtttttaatgaaatccagtctcgccggagaatcaacaacttacgccggcgtgatgaaggaatcgttcggaaaatctggtgccgttgctgttacggttgttacaatggttgtgacttttgggtctatgattattttctcgattatcattggtaaaatttgattttgtctcaaaaataaaaatctgaactttttcacaaacctttgaattgattcagtgattgtttgtttctcttaggtgatgttatttcgggtaatgagaaagatggaatcatacatttaggtcttcttcaagaatggtttggttctcattggtggaatacgagattctttggtttgttgttcatctttgtcttcctcttccttcctttagtcttatgcagacgtgtaggtaacgtttcttatactaaatacttagtctttgcttgaatcgatcaatgcatattggttttgatgattttgtctgtttatgttttgtgtagaaagattggcatttagttctgcaatttcgtttctgcttgcgttactctttgttgtcataagctcggtgttagcgattattgctctcgtgcaagggaagacaaagcctccgagactcttccctgaactcaatgatggtggattatcgtttttcagtctcttcactgcttcccctgtcattgtaacagccttcacctttcatttcaatggtaagaaaccaagaaccaagaactgttctcttactccaaatcatacactgttctcttttgctgatttttgaagttatggttattgcagtccatccagtagcattcgaactcaaagatccattaaatgtgctttcagcaacaaggatctctgtgattctgtgtgctacgatctactcagctactggtctcttttgttaccttctgtttggggattccactatgacagatgttctaatgaactttgatcaaagcaccagttcttcggttggttcattactaaatgatattgttagactcagctacgcgattcacctcatgctcgtgtttcctctgctcaacttctcgcttagagccaacctcgacgaactcttgttccctatgaagctttctttagtggaagacaacaaaagattcttcgcactcacttttccattactgatatcttgtttcttgggtgcaattgccataccagacatttggtacttctttcagttcttgggatcaacttctacagtctctatagcattcatctttccagctgcaattgtcctacggtatgttaccctttttggttaatccctctcatgtaattctgaatgaataaagtttaaatcttatccattgttttggtgtttttggaaactggcaggaatgtaaatggtttctcgactttaagagagaagattgtagcttcagtaatgcttgttcttgctgttgccacaagtatcatcgctatttcgacaaatatatacactttcacagcaacagaagaaacatgaaacgctttctggagtcctttctcttcaaggatttgttagatggtagagcttgtgttgcatttattcatgtctattgtatgtaaaataggtttgtaagaagtgtattataatagcaacttcaggaaaaatgtgtgtataagattgaagcagagttttaacttttaagcaccaacactcactatgctttatgtctcgtaaaatgacatttaagtacaaaatttaactttttgttattcaaaaggatctttccttcaccagtctttagctgattcacgggcaacgaactaaaatacttcatatagagattaagcagaaagattggtagcaaaatcttttgtatttttttcataaactcaaaatttgacaacagtaaaacaaactttatgttaaaacacaagatatatgagtcgattgagacagtctttgttgttgttttcttccaaaagcttttctcaaacaagctgcagacagtgagaagagttcctaaaacctgcacaaatcatgatcatagtaagaactcagtatattcttacgttatttcactctatgagtcattgccgtaaaaaactaaccttctaatctgttttgagggaacaagtattcctcgcttctcgaggctcttgaatcgatctcttgcaagagtgcaacatgccttttaaataaaaaggatgacatcttcagttttttagctaccaagaaattcacaaggaccaaaaacgttggtttcagggaacagggagtcataccttcagcttacgaagtgacccagtcatctcttctgtcaagaggacttgaactggaggagcctcaaatctgaaacaaacaacagtcaatatcccaaaaatccaattttcagaactacaaatataattgatcagaatgagtacactagtaagcttgaaaatataacagaaatgtatagatgtaaagaaggatttagtttcatacttgtactttcccaaccgaggaggacgtatcttcagcacttcctgcttggcgatgacccttcgtaaatgtttattctgtttatcctcatcttctttggctatttcttctaagatgttgggcaagctataaaggcaaaaacaggaacgaaataattaaaacaagattttgtctaggcgtgattttataagtaatcagacatcatcaagatatattaaaatcacaagatacctgtcaatttcgtttaatatcttctctttagccttttcctttgtctctttttttcgcagtgccttttgcctacatcgcttatttaattccacacgggtaaccctctttgttttccttgagacactgcagtacaataatttcaaaaacatgagtatccaactttttgctgagggagtaagttaacaaattacaattttatcttagacgattttatgttgatatgtaaataagagagcttcttacttgttcccagcctctgacacttcaatcttaacatctttattatcttcaccttcaccaacattgcccacttcaagaaagtacttcaggtcttctgcaagtaatttgttttgtaacggaaatgttaattcatgacatagaaaaagataagattacgaagaaactaaaaagtggaataattgactaagcaaacctttaatatcatcacccaacaagtccaccattacagaatcgtcaccaacactctgcaaagaagggagaaatcatatgaagataatctcccaaggaaaaagttcgagacaaaacatctcatacatgtaaaaaaacatatcatcaaattactcactttttgagcttgtctaggtgttttgtcttctattttcttcaagtttgtatttgaagatggctttaactggacaaatgggttctcctttaatctgcagtataagaatttcaaaaaacatgaaatccaactctttgctgatggagtaagtcaacaaattataattttctcttggacaaatttatgttaacatgtaaataagagagcttcttacttaattccagcctctgacacttcattctcaacgttttcattatcttcgccttcactaaaattgtccacatcaagaaagtacctctgagatggtaaatacaacagccatatggattaaactatcaaattcaatgctcatctttccatcgattatattataacatacaagcaaaagactcacctcatcttcactgagtgtatccccttcaatagtcaaaggaacaggtgcaggccctaactcagttttgtaaactttctgcatttcttgagcgacggcttcagccaacatatcctgcaatacagaaaagaggtgtgaatgcaagattcacacacaagactaggatgataaaacaagctcaaatctgtgagacttagttcataataaattattacctggtgactctcagttgtagggttgtatgagcatcctggatgttcaatttctactgctgaaataatcgaaggatttttgaaaatctgtacaccagacaaaagttcttagccaactgagtaactgtctaacaccaactaacattttcaatacagaaacaacaaaagcaaacaacttaagtacagaagacacattacctttctaggattgctctcatgttctcctgcaagtaaatattttgcaaacggaaacgttaattcatgacatagataagaagaaaaaaaactaaaaagcagaataattgactaagcaaacctttactatcatcaccccacaagtcggccattacagaatcgtcaccaacactctgcaaagaaaggagaaatcatatgaaatcagatccctgaaatatcttatagatgtaagaaatcatatcatcaaatgactcactttttgaacttgtttaggtgctttgtcttctataacgattgtcttcttacttttcttcaactttggctttgaagatggcactaactggacaaatggattcttctttaagatactgtcaacacggagcactctctctctatgtttctcaatctttcgcttcaccggaaggtctgataagcaaaatcaaatcaatatcaaattcacaaagccttctttcaaacattaataatactcttttacttcctgaataccaatcacatcataaacattctcataactcccatcaaatcttaacaagcagctaaataactaatcttcatcaaatcttactctgctgatgctaatgtatcgaaaaattgaaactttgcagctgaaaaagagagagagaagtaagaacaaaccatgggatttatcgacgtggaacaagtcttcgctgggagcagcggagagattgccaccggagagagcatctctggtagttttctcgaagaaatcttcaatgtcctcggagctaatgttagccctccatgcttttttccctttccttgatgttttcgacctcttccccattttttctcgttatctctcggcggcgcgaaggttgctgcttcggtatcgaaaagatgatgattgaagaagaggacacacactaggggtagggcttagagagaaacataatgggccttacgtttctccatttcctcttaatgggcccatatactttttaattcctacgacgtacgtacattcattttcctttccacatatatttagttttgtttttttttcttggttatatactactttttttcattttgcaacaataacactttttcatactcacagaaaaaccatcaaagtatttagtaaataaaaaataaaaaaaatcaagtacataaaactaaaattttatcataaaaagattaacacagtataaaatgttatcatgtcttacatgttagtgaaataaaaaaattgaagtgataacattgatcattacggaaaatcggacatcgtctgattctaatgtaaataaacaacattgatcaatatgttaaacttgagcatatattttgttaacgtgagttctctcccatttttgtgggattccaacaaataagttttggttataactagtttataattaggcatgcaaacgtcacgcatatatatgtacatgtaagcatatgtagtcataaccttaatgataaacgcgtttttttttttgtctcagcagtattctattttgatatatatgaggatgtaaatgattgaacaatgtctattatttgatcaaatactatacaaaaaatatcgagagataagaaaaaaaacaagtgatgtttgatagcataaagccgcccccgtgacctaattctcatttgattcttttgtcacattcaagaggagagtggggtagatcaaattgctaaaccctgactacaacatattattgtaaattcttcttaagatatgttcaatattattttgtccttttggtctcttctaaatcccacgtatggtccatccgatatgttatatcttggagtttaattaatgagtcgtccttaacattgatgtgccaacatggagaagaaacaacgagagagaaatatacgtgttataatgatgatgatcgtaatgaaaatcctcttttttttttttttttggacattcaaacatgagaattatgataataaaatggatatgattgtattcatacaccatattgtcttgagtcttgacaaacatgaattatgtaacttatgatactttcgacggattttaaggttcttgcgttttctaatttttgtttttgtaaaaaccgtgtttatatttctaaacattttacttctgcatacgtatttacgattccataggaccatcatattttttagttttatttttatttttatttttttcatttgtgattttgtttaaatatatataattgtaatgaattttaaaatgacgaaacatatgtgtatataagtacatatgcttttgtattgttctggatgtccaaatttataacaaaatataatatattcaaatacgaacttaaaaaaaaaaaattgtgtgtgtataaatgtaatgtttgtagagaacaatcaaatgttagtttgatgatgacatcactttttctcaaaaacaaggtataaattccgttttttggtagtaataactaatactatattttcgaagaaaaacaaaccttactaatttaatgctacatataaaagatcaattttcgtttttaacaaaactatgctactacaaagtttttttgggtcaaattcttatattaagaaaaatcaaattgctaaaattcataaccatttagaaaatttatgccatatttatactaaaactaggactagggataatgggtcgagtgaccactctaagttattgtatacttaactatttatgttagccttaaatttacaagtacaatcagaatcctttcctaatatgtaggaaacaaaccaatgaccgttttgcaagtggaactactgattatgagtgtacgaatattggatattttttttaaattttgcttataacatgattttatgtgcatattgtaaaaaccaaaatgatactaatctcaatttgtctcgggtaaatatataattacggggggggaggggggggggaagacaaaggagatatagctgtcacaaacacgagactcttttacgatttctttttaaatatatatttacataatgacataaattaaatgaatagataatatgataggaaaatacttgtctttctaaaatggtcatttctaagccaaaacttttagaagcgaaacgatgacaaggtaactccttgtagccattagaattcagatgtcgatagcgaccctttctctatagtgtaactcatttattccacgtatattttaatttccaatcaaatgtttgtaagaagaaaacaatagtatcacggtttgtgaacatagataatccaactacattaattatgtatatgttaattaatcagtgttgataaagcttatggaaaatttctagcacatatataaagttataaacccatcatgtataattctaatcatcagcttaaaacttcggttacaacatataccaactcttatgtataaacattttacaaaatgtaaaaaccgatcaacaatatgtatagactcagcaattatgtaaattggatttggaaccctgatgatgtggtttctggtccaagtcagtcaacaacaaacatcaattgtgattatgtgactcacatttatcatatatatggtgacttattagtgatcatttgttataatatagatatctatcgaaccatacacatatatggatcatgtagtagacgagaggtggaaacaatcaagggttttgcaccaaaccctaaattaaagaaaagaaaagaaacagatcgtataggaggaggaagatgagatgaaatagtaaaataaaatcaaatgaatgaagctagagacgtgaaagaaaaggggtttgatgaagcaacgggacttgtgtgtgagtgttgttgtgttgtgatgattaattggcacacatgtgaaatggtgggtacgtttatttgtccgtctccaatatatacaatcttctatatcctataccattgctaatctatccaaagttatatacttctacatatatctatacgcttaaatatacaaatttattcgtatatgcatacatatataagtttgacgagtaactcgatctaaatagatatgttttttagattgatccatcaaatcattcaatatgtaatgtgaaggcaaattgttaggcatcaacctttatatgtgttttgaaagatgtgactttacattggtgtttgttcaaaaatgggatttatgttgctaatgcatagatccacatatacgcgttgtatacggcgttgcaaatacatatacatatagagagagaacgaaagagagcgcgatagagaggacaaggagagatgaggaataggtgaagagagagaggaggatatatgtgtgggtatttgttcataaagatccccgtgaggagtgtttggaggcattccaaaatcacaactaacattcttttgtttgcttttatcctcaccttcacttctttcgatgctcccaaattttattttcatttcacaaatattaattagtcccccatatatcacgagctcatcattccctttctcgtcccattttatttttacttttactatctatacacttatcatatattaacattatgtaagtggcccatatatatacatatagagtatgtatatatttaaccgtcacctagtcatcccaagttcaaatgatttgttcttcttgttacaatcataacgagttggtaatggtacttgcatatgttttaactcgcggttgaatagaaattgcatatccaaaaaagagatggcgatgtcattttgctagttattctatttaatttagatatatgtatagattaaaataaaattactttcatatagaatttatagttcaatgactagctatagctaatatgtattctttttaactctattagtatatatacatacatgataaagtccttttgtatgatccacatacacatactttttacatgaatttgaagagtacaatcatatcaatatgagtcgataaatggatttttgtaatcatatacgttttcatccgtttccaaaaattcaaagctggcgactgttgttatcaattatcgtgatttttcttggaggcgttagaacagtattaagacaaagaggaaactaaaatcacatcagtaaatttaaagtaaataaaatggtggtatttcatcgactatacacatcgattataaaaacatagcgattaatctacattttacaagattcaagttggtaggtaagggtacgtatttttatgatataaatactgtataaatataagatagtatatttcatataagaaaacaaaataaaaattgtgtggaatattaaatagaatatcgtctattgagacatagaggcaagcaagtaattcacgagatacaaatcggagttgtccgtatattatattttgtagcgatcaagagagactaaggcagacatgtgagaggggagaggatcctataaacaatttaaatctaagatctctgcttcctccttctcatatatatattgcatatttacacatagttcctctatacagaaactgatcgagaaaactcacgaaacaagaggctaatcaaaagcatagaagaagaatggtttcaagggaacagaagagaggttctttgcaagagaagtttcaattgcttcgttcaatcactaattcacatgctgtaattattacatcactctctctttctttctatttttattacctccaacggagattaacgcaatcatatatctacatatataaatcttgttattcacacacacacacatgatctcacacatacaatcgtaatcaatatacatatagattattattattattcactctgtcacgatttcgatcgttccctttggatcattttctatcacagcttaggtatttgaatcccttttgctcttctatattccagtttgctttttttatttagttatttaggtaatcacttgatcctcttctaagcatatatagaagcatatgttattacaaacaagatatataggcctttgaagttgaattctcttctcggctaaatttataattctagattttgagatgtcgtatatgctactaatatatgtgtgggggcacacgtgttttgatgacaggaaaacgatacatcgatcataatggatgcatcaaaatatatccaaaagcttaagcagaaagtcgaaagattcaaccaagaccctactgcagagcaatcttcaagcgagcccacggatccaaaaacaccaatggtacaaacaatcgaaaacatataaatattccttaggatccatcatatatatttaagtacgaatgtgattaatgtgtaaatgagagattcattaagagctttttgtttgggaaattttataggtaacagtggaaaccctagacaagggttttatgataaacgtgttctcaggaaagaatcagccagggatgcttgtttcggtattagaagccttcgaggatattgggcttaacgttcttgaagctagggcttcatgtaccgactcttttagcttgcatgccatgggactcgaggtaattaactaatcatcacactagtgtttatatgagctaggttcttgatacaaatgagctgagttttttacaatggtgtcatcatatatgtttacgaaatcttatgtggttacacttactttattacaaatatattcaaattcatgctggtgaaaatttaaaaatcattttgtaaaattataataaaaagtgggcaatctcaacacaaacacacacacgaatacaaaatataaacatgtgtagtctatgtcgatatgtgtgtgttggcatgtataattattttaatgattacgtcactgttaataatacaaatgtagaatgaagatggagaaaatatggatgctgaagcagtgaaacaggcagtgactgatgcaatcaggagctggggtgaaatcaatgatccacagaactagattgacccacttttcattttttttttatatataatttatttcttattatacaaaatataaggaaataacacagtttctatagtatttctgcttcttcttttttctttttcttctgtccattttgtagtccagaatttccccgtgaaaagggataatgaagaaaaatcaattgtatgtttatttatttcacgtaagcaatagaaaatacgttcttaaggtacatcacctaacatatcaagttatcaactgagatagttataattttgttcattttaaattagatcagaaataaataaaaaagctgagtttagcagagaactaaaacttattactattttggatttgatcagaagatattagagaaaattgttttctacaacagaagaagacaagcatttttgttcacgtgagcaaaataactccagaaacccgggaaagtaaaacgtacaaatacatccgttctacacattcgtcccacgattgatactttacttaagcacaactaagtgtacgtgatcatctgattttacatggcataagattatgattattaacaagacttttagagagaaaaaattagggtttataaagccaaactggattcttctaacaacatttcttcaatatgtgttgtcataaagtcagagacagcatctttaggattttatcctagagaatatctgcaagctcgaggacattgaatgcatttgatgaattcatggaggcaatgagctggttactgcagagttcttggaggtacggaatcttgtatttgtctgcagctatgtagtgtacgggcgtgcttcaacagttttgaatccgaaaggtaacctttgtacatgaactcagtaaaggtatatatagctcatcgtgagtcatctctgaaaaagtgattggatcacttgctgatgaagttgaatcaatcatctgcttaagcacctccgatgatgcagcctttgtaaaacacaatccattaacagtttagctgaatctagctagcaagtttttttttttgttatagaaaattttgaaaagagaaaaagaacataccaagatgattttgtgagcagggataggatctgtttggtcccctgctttaagcagtacatcgactccaactttctctttccagtatttcgcaaatgaatcaatgaattcaatcttgtttgccattttctgtgaatcaaaatataatgttataagcaaaattcatccactagaacattgtaaaattccattttacaaatccctaaatgcgaatctcgtttttgcacttaataaaactcagaataaatctcaaaacgctctacaatcctaatatatagttgacactcgaaaaattgtgagcaaatcaaactaatgaccaaattggcagtggttgaatctaattactcataagtctaattgtgcatttggattgaatatggtagtcattactccaaacagttagcaatttagcaaattgatcggctccttttttaggagactagttccctaaccagcaatagaaaagtatttccctgcttcatcgcttctaaatatttattaacttaatatatactaattcatctttagagttgtttcgtttaaaaaaatgattgtgctgatttaataataataataaaaataaaaaaaatctctaacaacatgtctttgagaatgtatccaactccagtaaaaaatcataagattatgagaatttggtgaaaaatttagttaaaaatgaagaaagaaaaattatgtattagttatattagtacttgtatttaatcatttatttaattacggaattattttatttaagaaaaaattggaaaggctcgtaatctcaacttcgcattaagcgaagtcttggaaccctgggaacctcggtgcttagcactgacaacagcgaccacatctactacagattctagcactcgtcgtacaagttaaagccttcagtatctccactgtaagatttggatgattgttggcgaataccttgaactcaacagaagtagaaatcgcacctaaattagttatgatattagtgaaagcggaatcatgaaaccacttataggtgggccagtggtaggaaggatttcgggctgagggtgaaattcccaataatcccgggttcgaatccccacggctgcaaacaccttaagtggccaccgcagacaatttaaaatcgggctatgcggcctccaggaactactcttgccgctttcgggacgcacgcagtgggctagtctgagcccattgggcttgggatacctgggttatccaaaaaaaaaaaaaaaaaaaaaaaagaaagcggaatcatgaagggctttgtcaaaagggatttgggcgagctcaaggatgtcaagagcatttgaagatttaagagatgatataagctcgattctgcataggtctcgtagatgcggaatctcgtatttgtcccccgcaatatagagtgacctaacgtgttgcttctcttttgcagaaagcatagagccgtcgctgtatatgaattcaatgaaagcctctaattcttcgtgtttcatctcacagagagtgattgtctctagttgagccgaagccttgatctcgtctgactccaacatcttcttaaacacctctgatcttgcagactattaattatatcaagaaaagagcattaattaacaatgaaaatcagttcaagtaagagcatttggatgaatttctttatgaaattagatgatgatttaaaaggagaaacgaagtagagagaccagaacaagcttatgggcagaagtagaagcaccctcatcaccactgtcccctgccttaagccgtacatcgacttgacgttgttctttcaaaatctttgcaaatccacccacgaaaagctctttgttggtttctgttgccatgtttttaaagtatatatcgtggatatgatttagttaacgattgtgggttattatatatagaacctaggcggtcaaaattactattttgctttcttttcccaagacttttggatttggtcaaggagacattaatacattagaactcggaatttaatttgcactcattaataggagactttatcagacgaatacagaattttaagttttgtgttatggtttgtttacctcttcttactgtctcttgcacttctgtgtatggcacactaaacaagaatctaaaagactctagctaagattttataaaataggaaccttacttatagtcaggaaagaatgataggaatgcactaaaaaagcttgcgacgaaaaaaaaaaaaaaaaaagcttgctcaaattgagctttaaactttttaacaatctctctgtttatttccttttggacataagaagaactaagagatcaaacaaatcaaaacttagtgtcaagattgattatttgctttttttcttttcttatcccaatgctcattaatctttctgagaggcggcacaatttagacacaaattggcaaactatggatactatgcaaatggtgatatccgcgaagtcgatattgtgacaattatgtcaaatcacttgaaaatgataaaaccatttatcaaaaagagatgaaacaatttaacaaagaaaaaatgagaaaggaaacaacaaaagcaacgctatggttcttttagtagtagcgattacagtaaccacagatttttctgctagtacttagtctagttatagaagccttcattatatccacggcaagatttgggtgattggcgacaaacagcttgaactcatcaccactagcaatcgtacttatattggttatgatagtagtgaaggcgggatcattgagggctttgtcaaaagggatttgggcgagctcaaggatgctaagagcattcgacgaattcaaagatgatataagctcgtttctgcataggtctcttagatgcggaatctcatatttgtcggctgcatgaaagagtgaacgagcatgtttcttgagactagcagaacaaatggagccatcaaccctatagatgaactccacaaaagcctccaattcttcgtgtttcatctccgagagggtgactgtctccatctgtttagatgaagccttgaactcgtctgattccaatatcttcttaaacacctctgatcttgccacctattcaatattccattcatgtcaacaatgaaaaacatcccaagtaagagacactctcaaaaacattgctacacaataagtaacttttccctataattggatgatgataaataaaagagaagaggaagtagagaaaccaagacaagctt

SEQ ID NO: 356 - DNA, 84675 bp, Arabidopsis thaliana
aagcttataggtaaatgatacggtttcataatcattaaccatcacgacgcgcgtgctactcatgtcccacttacgacgacgtcgttttaaactctctctctgtgctcttccagtctctatcgatcgccttctgaattttccggcggaaaagcaaatgtccgttaacgacagtatcgatcctcggttcgtattccacgttgaagatgaatctttgcgtttccgtgtgggagattcaggtactaagatccgggagctcgaaaccgtcggcgatcgccatttcagaacccagcaaggtttctgcggaaatagaattgagaaagatgaaaccatgtattccgatggagatgatgaagagtacgacgtttctatccgaagacgaactgctctgattcagcctggtattgattccggtaacaattatgattctgctgcagctgaagaaaccaacagagaaagtaaaaatccaggtataataatactctacattacttctttcacgactaccggagattccaagattgttgaagctaacgaaaaattctttggttttacttaagctcagttggttgggaactggttgtgagagaagatggggaaggtaattcaacgattgatcgacatgaaatggagtttaaggtgaggatcactaaaccagatggtaacgtatctaattcccaccgtaacacgcaacaaaagcgagattttgcttctgtggagaaggagagagtcactactactagtgtcagctcttgggagtctctcaaggccatcctctctgatcctgtcacgtaagtttgttaagtctgcttgtcaatggtcagggaatttgataactaagatcagtttaatttttgaatctgagtcaatgtcaatgtaaccttgatgattattgttgtgtgatggaaagtgtatcgtctagaaggctaattcttgttaacattcatagagatgatttttcttttctgttactttggtttggatagcggagccttgatgaatgatgctaccatactgccttgtggacattcttttggcgccgggggattaaaagaagttaaaaaaatggtatatgactgactcttaaccagtccatttaataagggtcttcttgcttttgtctcatgtgaatcttaataatctgagttttggtaatttttgttgttagaaagcatgtttcacatgttcccaacctactttagaaggatcagaaaagccaaatctctgtgagtttcacggcattactagtttcagagaaagacttctattcttcttcctgatcaagtttattggcttgttcagctctcagaattgtagttcatgctttccgccaagaagaagattcagatcatattcacacgctgaaaagaaggaaagaaaggtcggatcaggtttgtttttccaatacacagtaatcatgtgagattacattaacagtgagaaatcagataagcagagtttctttcttatgaatcttgctgcagaagagaagtttctgtatcccaaacatcactgaaactcctaagagtagccgaggcatacagtttcctttctccattggagatcatattatcatagaggtctgagatattcatgcataccaatgttacttcatacattctagggaatactactttcatgttttaacagacaaaaagttccttatggcttagggaaacaaaaggacgcctccaaggtttgtcggacgcatagctgttataatgacacaatgcttaaatggatggttaagtctcgttgcctcatttcatccatagatgctgaagctcttataacaaaattggatatatgttcccaggtacgttgtgaagacagtggacaattcagagtctatcaagttacaacattgctcacttgccaagatttcagacaattcatctacgaaggtaacagtagctgaaatgccaccgtcttggctctaactcgtagaaagcaaatatctgtggctgcagaaatcagcatctgtaattttttcattcagagaaagtagttactacgtttcattatgtaatataggaacgagacaacaattttctgtactaaatccagtgttttcattcatacaaggaaactttgctcatctaaaaggacatgcgtattgaaacaaatgccaactttgtagctttgatataaaaagaaaaaaggtcgcttctaatgttacatacacgaatgacaaactgatcaatcgcctgttatttacactaaagataataaccatcaaaaaagtgctaacataaagacaacatataggcggtgtgattagtcagaaattcggttaaccaaaaaaaaaaaaaaaacaagattaagaaccggtaggcggcggcttcatcattgacagaagaaaactgcaggttgaaaaaatagaagctgcagccgcctgaaccgccatactagtctcctgattaccgtctttcccaaaactgcaagtgtattgtacaacaagaaaatcatttagaccagtctttttctatgcttctatggactgcttcgtctataccttgaatcggatgattgggaactaaaaggcgagtactcttccatttgtcgtagaccatggttacatcgtgactgcatttccttcacttggtttagcgaacgttcctgcaaatttcaaatccatagtatcaaacatcagaccctaagcttaaaagaccatgtcgctataatcattttaactcaaaggcagtggatatttacgcaccaaatctctctgttcatcatacagagctttatttatctgatcaaattttgcagtccacctcttctgatgtgtctcggttgctgctttatcggacgaagcatcaccagaggtattcgtagtcaccatctcaagagaatttgcttggttagaagaagattcccttgatgaagcgagaagcggtaactcagtagtcaaaatattttgaactctattcctactatcctgcacagctgcaaggcataagatctcactcaaatctctataactcaattaacccgagaagcctctctgcggtatcttcttcaagtaagtaaaatgcgcacctgaaagtcgtccgctgaggtcttgttgaagaaactccaaccattgggaagctacggtagcagctaaaaagcaaagaaacattttccttttaagcatttctttccgtttccacttctgcatatgaattaatcattatgcacaaaaaaagaaatacctaacatttatatttctatcacttctagacttactttaatcagaaaccctaaatcgttaattgacacagaagtcttcatttttacgccataagacttgccacttattacttcagacacatactcagaagatccaagaaacagttaactaaaggtaatctgaaacaagataaaaggcactgaccttcaacagcaagagatgtggcttgttcaggatttgtaatggaaatggcattatcagacaccccggtggatggtaacttaaaggctaatgctctatcttctctgattgcgtctgaaattccaaggtaaacagagtgagcaaaaacattgattgtgaaagttctcgtctctggtctgaattggctaacttgacatcttaatgaggtaattaagaatgatagatagatacctcttacattgaaatcgccatgtctttccctcgtggtagcatcatcattactacttcgaatcaaagcttcaataattgagcagacctgtttcttagtcctgacatggttaatgattcccgggttcaattccgtcagcaatccacttggagcagtaacattggcgaacctatctaccagctgttgttccttcttagggacatcgtttttcttcttgagagactcaccacctctccgcttattcttctgttgctttggcgcaggtacttcaacaggcgtagtcactactgtagaagttggtgctgcaactccacccaaagggcctgatagaaaaccattccgcttcatttccctccatcgccgcatcgaatctgactcacctaatgagccatctgcactactacacatctgaaaaggacttactttatcgccaacaggaactgaaaccgaaggctctgctgctccacgttgacttacaacagattcagtagtctccctcggtttcaagaggctaatattcttaacaacacgacacttactatcatctgtttttacagtatgattctcaagcaaagcctgttttccagaattaacaacgcgtctattatcatctgtagaaattgacttggccttaggcaagtatgttctcgtctcaacagttgaggaaggttttatatctttagacaaaacatcattttctctaactactcttcttataccttcagcatcaggagccacaagcactttagatactttcgacaacttctcactactaagatttggttgctgaacactattactgtttccatgagattgcaaactactggttttcgcatctgtaacataattataaaaaaagtaggaaacttttaacaaatcatccgaaaattcagtgataaagatcatttctaacaatcgaattcgaccattctaagtaaaagaaaactcgagaattaccagaagccagatctgggactttcacacgtttagaccctaattcatctttctcatctaatccatttccgttacgcttctcgccagaaatctacaaaattgggataaccccagagacgaagaacacaaacccataaacaaattgataaaatttgatgaagaaccgagaaagtcatcgggaaagccaaaagaagcaacaaaccacagaattcgatgcaggttccgacacaacaccagaggaaattcctctctgttcctccatttacacaccagaaagatctctcttttccaaaaacccagatgtcgaatccacccagaaagagtccacacacaaacgaaaacgcaacagtttcttctaaacgggtacacacataaggggattcgagagcaagctttgaataactaagattaggtttagataaattgtgtagaggagtgaggtgaggacgaagaagaaagtatatttggggataaatcgatgagagacagaagagaaaagggattttgaattcaaatggtgaagtgttgaggttttgttataaaggagagagcttcctcgttttttcggccgctaacctttgagccttttatattctcgaaatatcatcaagtagggctctttcgtcaatttcactaattctctaattactaatgtctttttcacttttactcccaccaaaactcacttgttcatattttaccccacacatttacaaattattatttagagaaattacatatgtatatcaatcactatataagattttagtatttactaaaaatgccaagaacaaaaaacttcattcattttataagattttagtctttaaatagatgtgaaatacaacaaatctaagtttttttctgtcgtttacggtgaatttaattatttagatttttgattatattattgatataaaaatctactaagcattttatatgtaacgataacgacaaaatagtaaaatacatattagtctaaattttgtgtgtgtatatatattgatattgattgaatcggttttaaaattggttaagctagtttttggatgtagaatggttttggaaagtagttttagaagcaaatgtgtttggatcgtattatgtttcctaaagttcgtatatattaaaaaagttataaaggcttatttactattttttgtgaaatgtctaaaataacaaaaagtttaatgtatttccttttatttattgaatccaaatcttcaaacgttttttttccaatgttctacacatatgataagatgccgttggtaacgaacttttcgctccaaattttcaaaaagttttctaactatattttcacataaacccgcgataaaacattactaaaattaactttgaaatttaagtaaacattctaatttggatctatcaatattttttataaatagctaaaatgaaaataatattaagctttatacacaatattttatgcgattattttgttttagtaaaagatatttaatgaaaaacaaaaatattgttgaacaaggaattgtaatttatatgtttctatgtatatgtgaataagatcaaatgtaaaaagagaagtatatgatttgtgtgatcaaaagacagcttgaaagtttggatagacgaaaacaagggttaaaaagataaaagatctcacaaacgacgctgttttggagcctgttccgtgtttttttgtggccatcatcatcaccttcggacacaacgtgatatctgaatctctccctctctctctctctctctttcgctgtccgattccgacagatagacagagggcgcgaaacagagagaaaataagaagaagaaggacgatccagatatggaggatccttctaacccacaaccaaaccagagcaatctctcgcaatgcccgcctttagccacagctccgacacctgcgccagttcgtggtccgtaccaccggagagcacattcggaggtccaattccgtctccctgaagatctggatctctctgaaccattcggaggattcgatgagcttggatccgaagatgatctcttttgctcatacatggacattgagaaacttggatccggatccggatccgcatccgattcggctggtccttctgctcctaggtctgataacccgttttccgctgagaatggaggtgcggaggctgggaattcgagacctcgacacaggcatagcctctccgttgatggctcttcgactttggagtcaattgaggctaagaaagctatggctcctgataagctcgctgagctttgggtcgtcgaccctaaaagagctaaaaggtttcatctttaatccccaaacgtcgagaattttgtttgatatgattgaaatctagttccttgttttatgcttttgtttacaattcgtggggaagaaaggcagtttctttatgaccttttattgatgaatatgtaatcttttgatgttgatgtgatgcattagtcattaggtgttcttttggagatctttttgtttttcttggttacgtgagtacatcaccttttctttttgactatgatctcgaatctcaacgataactgatttttaactgaaattttagttatagcttctactatgctgcttttttattttaggtctttcctgctgagagagagagaccatgagggacccataagtttgcttttttgtctaaattccaagttgaattctgtgagaatgtgtctctttcatgatgattttatggcccccaactaatttttttttgtactagcttttgcttgattggtctgttcaattcctgtttggttagagatcatatttgatgatgtttttttgtgtggtatggctttcaagatgatcccttttttacattcacttttagtagtcaactgtttggaattggaaattatagtttcaagtgactttggttcaaattgtttgggaattagctttgtgtgagatctgatctgtgtcaatagggttaagggtgatctaatgtaatctctcggatgattctttggtgatggtcactattaattgcatgactgttcttgtgacttttattaattgatgctccaaagtgtctaatcctgtctcatgcactctgtgcaggataattgctaatcgacagtctgctgctcgttcgaaagagaggaaggctcggtatatcttggagctcgagaggaaagttcagaccttgcaaactgaagctactaccctttcagcacagttgtctttgttccaggtttcttatacattctccttctttgcacatttttcagttactgcaataacattcagtttctcatctacggcctaataacttgcttcttacagagagacacaactggtttgtcatctgagaatacagagctcaagcttcgtttacaggtcatggaacaacaagctaagttgcgagatggtatggattaatctctcaatccctcactttatatgattatttggggtttaaggtcgtttactaatgagttccctcggcagcactgaacgagcaactgaaaaaggaagttgagaggctgaaattcgccacgggagaagtctcacccgcggatgcttataacctcggaatggcacacatgcaatatcagcaacaaccacaacaatccttctttcaacatcatcatcagcaacaaaccgatgctcaaaacctgcaacaaatgactcatcagtttcatctcttccagcctaacaacaaccagaaccaatcttctcgcacaaaccctcccaccgctcatcagcttatgcatcacgctacttctaatgccccggctcaatctcattcctattcagaggcaatgcatgaagaccatcttggccggttacaggggcttgacattagcagctgtggcagaggctcaaactttggtaggtctgacaccgtcagtgaaagcagcagcactatgtgaggctgcctttcccagattcccctttgtcgataaacctattctttcgccctcccttgaaatctttagctaaaaagtaacatcttcgtgacagtcggattcattttttattctgtaaaactggttttttggggggttttggggtttcaactttagagaccacagttgttttaacttgtctgatttctcatttcctgattcatcttgttctcctggggagctactgaattataaacagatcatatttctgtttctttatgttgtcatgattccctagttgctttcgtcaatcatccctatgatagatggttgaatttggatttggctttggcttgaaccagatcagaaagtgttttgttttgcaggtctcctagctacatcactttgtgttattttcatttccagtaaattggatttgtaggaaaatttctattcgttgggcatggaattggctacttttatagttccacatgtacttttgcttcaagcacaaggttctcaagataattcccattagaaccctaacgtccgcactacaaagcacaaaccaaacgtagtttcgttggaacatatggagattttgaaaaacccacttaagctaattagaaactagaggagggttacgtgttaaaccgggtcaagacacaaattacatgaaccaaactagccatgttgaagccacttataaggtgccctaactaccaaacaacaaaattaaatactcacatgagaatctctcaactatatcttgagaaaagctcaagaacaattgaagtttatttatcttggtgtcggctcttagaagttgggtcattgaaatgacgttctctctttggacataaccatttttcaggcacgtagttatggagagtcccaatagttttggggcaacaaatagacaaaaaccttgtgatggttacttaaagtatggtccctttagtttggttcatctttggatagacctcacgtgacctttttgtggatacaattcaacagtttttttgcatcaattgattcttgctcttatccagcttcaaaaaatagatgagtgtctcattggcaatgaatgtagtcgaaaattttattaacaaagaaactaaactatttaaaatctttcgattaatttcatagtagatgtgtacactgatagtaaacctttacctattaaattaagattcaaccaaccactaaaagattctatgtcaagaaatcttaccaaaaagaagacggtagttttcaaaactaaaactagtcccactgtcgatctaaaatagtatatatatcatagtattcttcttcttggtggatttttttaaaaaattatatcaacatagtgaatattgctctctttaataaaacctatatatgatggtactttatgtgttgtgtgacttactgtatgagtttacctaatttttttttttttgaatttaatgttaaattagattcaaaaagagaactgaacgtttttacaacaagtgcaacaattttttaaagaagctttgaaaattttaaatagaaactcttaatcacttttctcaatgtatcctccttgatgcaaaccaaagttggagtccattgttgtatctctgatcgccactgattttgagagccgaaagttgattgcgaatgtgtatatcaatccatttgataagacgactagatgggttgggtcgtgtaccatgtttacgctcattgcgttctctccaaatggtatgtatcgatgcttgcaacacatatctagcaagtaagcgctgcaactctgtcccgccactgtaaacctaattttacctaattaataaactttaataaacttttgcctaatttacctaattttgctctctttaataaactttttccgacgagaaaaaagataatagtaaacctttcccaaaaataacaaacatatacagtagtagttttcttacaaaaatccttgtttgttttctgccaaaatcaaaatacatttcttaatttgtagggacttacgaagtaacctatatatgggtaatcatttcataatcggttatcacttcattgattctgaaagtttcaccgcttttgttgatgtcgatagactgattgggtttcgcttccatgtttttattctttttttccatgggaccaaactttaggacttactttgtataattctaaacatttttcatttttctaatgaaatatttaccttcttagcaaaaaacctatatatgggtaatatggctgttttagttgatcacgtttaggcacttaagcatacaatagatatatagaagagtaactaaggaataggatgtataaaggattaaaggggacacaagaaaatgacgtatcaaagaaatgcatgagagcgttaaaacgtcgaagcggcctttgcatgtgcttgtaacatggtagggctatctactgacccacttactaatattttttaatgtattagtggcctgtctagtcaatccaggtaatttaaataactaagcatatacataattcgtatttaaaccctaacaattttggaaaattttgtcttaaaacttgattacatgaaaatcgcaaatttctgaaattcagagctaatcaaccactaaactgatatgttgccataaaaatttaagtgatcataatatatcattcaataaatataaaatgtactgacgacttacaaaaaaaataaaagctagttccacatgaagtatatctatatatgcctacacgaaatatacaataagaaatgagcacgatgtatgaaagaactagttgttgtcatatgcatagtatcaattcatcattggcatgctaacaagatcaattaaaatattctaaagaaccatgactattaagctcattttcaacaaaggaacaaaaaaacaaaatctgtagtagttgtttatcgaatatctatatactataaagtcgaaagcatcatatgaattaacacaccaattgttgatttggtgaatatctttatatagtcaacacccgctagttcgtaagattaaatctttgatatggttccaatttccaaaattttaaggtgatccgaacaaaaatagaagtgatacgaaagtctaaattctagactgtgcgttattcccgcttattattttagaaagtaaaatccggaaactatactaacaaggattgcagctgataaaaattacttccaaattccaatgtgctcatatttcaaaacaatgtgtacgcccttattttaaattctaatgtgctcataattaagctcatgtttgaatatgttcacttaaaccgttattttgtcatctgtaattcgactcctccacccacaaaatatttggataggctcccgacatggaggccatcactacgtaaatgcaacagtgacaaaataaagtataagaaaaacttgattatcatcctatgtaaatatttatatatctaagaggaaccgtgataagattcttaaactgatctaagtttttcaaagtaaattgcccgttgaacatgatgatgcattgattacaagtcttttgttgtataacttttaacacacaaaaatagtattttatcaacaacaaaaaaaaaaccttcaacaaaaatgtgaggtatgatcttatgagttatgaccaacgtaaaatgaagtaaaagacaaattaataaatacttaagtgtattgaagcatgtgcaagtatgggccacttgattaggaatcgaagttggtctaaccgcaacatttgcatgtggccacaaccttcaaagtcccttgatcttattatatcattaatgatccattcacatttttttcttttctaactgtttaattttgttgtccacaaacatattttacaatacatatataaatctggccgcaacaaaaaataaaataaatatatcttactctgctcaaggttaacggtggcatacattgttgactttgcttctagttatccacacaagtcacccatttggccatttctaaatttgatgttccatttcgttggagaaaaaaacccctatgtgtgtattaatgtatgaaagaataccaaaagataataaggatattcattgggatttaacgagaaataaaaggcacaattctctcgcaaattggtcaaaaatacgaataaataaatcaactaaatacccaaaaaggtgaaagaattagagacaccccaatgtacttcatatagtaaacatttaaatatgattatcgcttggcacaattattcactcgagtacccctatatatacccattccttccatttgtagattccatattattcacgattctcatcaaatcatctccgatactcacaaccgaaataactaacccctcctcaacaaaaaacaacaaaacatgtacactccatcatacttaaaatattcaataatctcaattatatccgtattattcctccaaggaactcatggagacgacggaggttggcaaggtggtcacgccacgttttacggcggcgaagatgcttccggcaccatgggtacgtatgaccaatcccaatatctaaaaatgcataagttagctaaattgtctctttatccacgtgtaagttagctaacaagtggcatgcacaaatcaggcggagcttgtggctatggaaatttgtatggccaaggttacgggacgaacacggcggctttaagtacggctctattcaacaacggactcacgtgtggcgcgtgctatgagatgaagtgtaacgatgacccgaggtggtgtctcgggtcaaccatcaccgtcacagctacaaacttttgcccacctaaccctggcctctccaacgataatggaggttggtgcaatcctcctcttcagcatttcgacctcgccgagccagcttttcttcagatcgctcagtatcgtgccggcattgttcctgtctctttccgaaggtccgtttacttttctttaaacttgggacgctaagtgataagattgcgaaaagacaattaactgacagtttttaacatgtagtcccaatccatatatagtagtgtttactattaacaaattttcaaaacattaaaattgtaggtttatttgggaaaagaaaaacacacttttttttaacaaaaccaacctttaccttataaatttactagtccgaaactaatagacaagtcttttgtagctagtagctaccatagttaaaacttaatacccaacaaagaatttgttcctaattaatctctatttaatgagcttatcttaactaaatagtatatgttttttgggtcttaaatgggatatagcatttttctgataatgtttaacactaaaaccacactattaagcaatagcctatgcaagatcttgtatgtataagtccatgtttcttaaataatggcttaattttgtcggtgtttttacgtgattattgcagagtaccatgtatgaagaaaggaggaataaggtttacgatcaacggacactcatacttcaacctcgttctgatctccaacgtaggaggagcaggagacgtacacgccgtctcaatcaaaggctcaaaaacacagtcgtggcaagcgatgtctagaaactggggacaaaactggcagagcaattcatacatgaacgaccaaagcctttccttccaggtaacgaccagcgatggtcgcacactcgttagcaacgacgtggctccttctaattggcagttcggacaaacctaccaaggtggtcagttctgatccaaaccatcatccacatctctctgttttgggtgctgacgtggctgcatattgctgaggtggctcgtaagcacccgcttaattagcttagccttttttttctcttatttacgaattattgcttcaatggttgtattttcattgtgcctacaaaaaagcaaggtttttttacatgtttattggatttttttcttctctttataagccaatatcgacgcccaaaagaatgaaattacacatgaattgatttaataatttcgaattttatttaatcaactacaaaggtttttttttttttccttacacaaagtgtttatatacacgattataaactatccggacaaaccggttcaccaaacgaaaatcaaatgtgtaaaccacattatcatctctaatagcaaccccgccaaaaataagccattgtatcttgtagtaaacttgtatgattgtatccatcacatcacaatttgatgtttatgaaatctttgagtgctttctcatctaatcaggcccataagtaggccattatcatcactattagtaatgggccaaaaccccgtgaatttggtcacgcacgactcaaatgagacgacaatggttgacctctggactctcgagtctccctggattactacactcgagctcgacgatccttagaccaacttcgtcttcttcctcgagagcttctctgatctccttcgccgttaataatttccacacgatcgcttcttcttcgtctactctctcttctcgcttgacaactgtatcatcgtccatggcttctggtgacgaaggagctgttttcaatttgtctgattctagccttcttaagatccttaaaggagacatcaccaagtggtctgttgattcttcctccgatgctattgtaaagtctctctctttctcaatcaattcaaaattctagggctggttttcccacaattgatatatttctaaaattagatggaaacttgagcgttggtgatgaaaatggtttgataggatcttgaattgtataattaggtctctcgaattttgctgcatgattagtttgacttaggaagtctgtttcgtcaggtcaatccagcaaatgagcgtatgttaggtggtggtggtgctgatggaggtatgttttaggatcctttgtcctgttcaatccaatgccattgtgtgattgtgctggtgtaatctgaaatctgattatgtatgtgacagcaatacatagagctgctgggccacaactcagagctgcatgctatgaggttcctgaagttcgtcctggagtccgttgtccaactggagaagcaagaattactccgtgagattaccctttttttaactcgtgtataaatgtagattgaggtagtttgaaattggtattgttgagtgatggaaaccagttggattgaaaaattggaacaggggttttaacttgcctgcatcgcgtgtgattcacactgttggacctatctatgactcagatgtcaaccctcaagaatctctcaccaattcgtacaagtaagcgtaaacactgtttctctcgtttactatacttgacatgtttgtttcctctggtaccaacaattcatcttttttcttgctacagaaatagtctgagagttgcaaaggaaaacaatatcaaatacattgcatttcctgccatatcttgtgggatttacgggtaaagttgtcacaaccagagacctaagttgttcatattgttttcctatttagtttttttgctcttagagtgagtatgatttgctactagaccaatccatctaattttttacctttagtgattgacaactcttggaaagtttgtgcaaggtgaaagtgaaaccttatgttcgaaatcaattgtttttgttagatatccttttgatgaagctgctgcgataggtatttcaaccatcaaacaattctctactgactttaaagaggtaaagataagtttctcttgtctagattgttgcacttcccgctaagtgactgacacttttttgatctcgtattcttattcttatcaaggtgcattttgttttgttcgcggacgacatattcagcgtatgggtaaacaaagcaaaggaggtgctacaaaaagcctaaagtccaatcaatggccgaagatacacaaaaatattccccaatccttcgcacaaacaaatcatttgctatttgtgttgcgttatgaatgccttgtgattattcgttacatttagatttggtaataaagaaaattcttgcatctaaaagaaaaggtttatcacttgactcccttattatgtcttcccatatgactagttatctccaagaccctgccaagtgaaaccgaaaaacctaaataggattctctcgaaaggtaagaagtgtgtaaaataagctgcttgcatttcttcttggtcttcctgagttcggagctgaggccatcactatgtttggaaagagcaaatgtaaacgcgagaaacacaaacagaagaaaacgttttatcatagaaacagaaaaaacaaaaggttaatcacttgaccactgaagattgcccgtgctcagcaaccatctctgagtgaggaacgaaaagtcactgccagtgtttattttaaaacaagagaaaataaagcctaagcccactatgtaaaagcccatcgtaatttaaggcccaataagtaacaataaagatcatctcctctatcgatgagaagcgagtaaaccctagcagcggacacacacttaagtccatcgacatctggagagtgagaagagaggaatagccaaagatggtactctcattcatcggttgcttatctttgaattacaataaagatagagaattgatgatcttccattgttgtttgtgttgcagactttcaagcgaaggaacggtgggaggaacaagcacaacagaggacacgtcaacccaatcagatgctccaactgcggcaaatgctgccctaaggtactctcttcctccttctcttctccaatcaatcaatctccagtaactcctatgtggattttgattagatcttgtggtggtaatataaatttggataggacaaggccattaagaggttcattgtgaggaacattgtggagcaggctgctattagagatgttcaggaagctagcgtctatgagggtatcatttcattcctctcttttatgtttctttgacctttgttataattctacattataaagtttggatttttagactattggcattagatttccagcttgattgaatcatgtaattgacaggatacacattgccgaagctatatgcaaagacgcaatactgtgtctcctgtgctatccactctcacgtcgttagagtccgttcccgcaccaaccgtagggttcgtactcctcctccacgtttcaccagacgcaaggtaatctctctctcattctcaactaaatgataatagttttaagttccatttctctatctttagttaagcgtacttcgttttgtgttaagataataaaggtgcaacttgtttctattatatactaatatctctgtgaaatactaaggaagttttaagtatatctggttactaagacctttacaaagtgtagttgaatcttgcataaccatattttgcagatgtgtgtagatcatttcctgttaccatttgaactataatagttgtttcaaaatagactttcgaggtagattaagcaaaccagtaccttcacttaatcgacctcgaaagtctattttgttttcaatgagactcttctgttttttttcttttgttgttgaaatgattcactcttctgagattttactgaattgttttcgacattatcatcatcaggaggatactcccaagcctggacagccaggacaggcccctcgtccagctgggcctggagctgcagctgcaccgcgtgtctgaagcctgcaatcagcttaaattgtagtttcatttttcaagatttttgtttttcttatgttggcttcagattttgtttccttgtgaatctccttatgttttttttttttttcaaataaatgtctcgactttgttattattatatataaacctcatagttttgcaatttgcttaagttacatggtaatgtccttcacatacgaaaatttgagattatttgtgaaaaatagttttgagtccgagaattgagaattagaagagaaattgcatgcagtaggcgtttagtttcggttcataatttctgtcttcattttcttgtcaccagagcaagccttgaggctttggaatcagttcttcttgtctaacattcaatttttcattgacattccttcttacgaaagaaggaacccttaagaaagaaagaagcaatggaagtttttcagcagcaaaaggatggtctaagagctcatccacggtggcccgattcgaagggcgccatgccaagcaccgcctaacaaagtctgtggcctccggagagatatcttcgtacagcctccatgtgttagagcctctcacctcaacaggaatacccccaaacatcctaagaacaatacgtcctagagaccatatatcacgggctggtccgatcagtttgtccttcccaacaaacctgtcccgctcaatggcctcaggcgacatgtactcctcaagggttccaggaaacaacaagctagagtccatagtaggctctttggataaaccgaaaccagcaagcttgagatcccatggctctccacgtgtgttggaagggaagacaagtacatttgatggcttgaggtcgcagtggacaaaaccttcagagtgaagagccttgagtccttgtaggatcatacgagtggcacgtctgacactatcttcagacaatctccctccggcatcagagatcatcttgttgagattccctaaggaagcatactccatgtagatgtaacacaaactcatgcttttggtgttagtcgcaaagtgaagatgatcgcttgaagctcggactatgaagggattgttgtggaaacgaagcatgatcctgagctccttctcgagattcttggactgttcgagagtacttgtcttcttgacgtatgatttccctaagtttgaatcactctggagagacacaaagccgaaggtacctaatttgccaagaacactgacagtctccaatgaagactcttttagatcttcgataatctccatagtgatgatgagactaggttgcctagaacacagactgtctccaatgaagacttcttttggttagcaaaacttgttctgtatttttttggttagaactctgtttcagattttgtggggttaattgttttgatcataaatatatattgttaattttagtataaacgtgttttataatattttggtaaaattactgtgtactttaacgatattaacacatatatgctgttcaatcatctaactaggaaaacttagttattaaaaaagtgcatagttaacaaatgtaatcaagatgatttaatgtattcttagaactcatttgttttttggttaattttgatataaagcatataaatgtgttaaatagtattttttaaaaaaattaataatatgttggtaaattactttgtgtgtttaaagatagataaatgttgttcaatctaaatatttagttaatataaactaaacaaatctaaccatgaatatttaatgatttatgcctattatggattaatgatacatatgatgttgtaggaaaaacaagtataatgaagtttgtacagatttcagcaaaattttgcaaatcagtgaatttttttttctttcctagccacacacacacaccaaaaaggttaaccaactaaaaagcttgagcgctacatggaggatttttctacttcactcgtctgaattttcgcggtgagacgagagaaaaccaaaaacttgctttagattgcctctagatggtcgagcattcaccgcgtatttgcatataaatattagcatccgtcgcatatccatttttgttatactcttctcttcaaaggattttccaccatcaaaggcccctgcaaaatgattcataattcatatatctcagcatcatgttacaatcataaaccaatagatccaagtgttttagttttatgtgttataaggttaaagacaccattatggttccgaaaaagtagtacaaaacatcaccttcttcattgaataatgacatcaagatggccaagcaaacacatatactgatatcttcccctatcattaacaattacaatatggatcagacctacataagagttacaaactacaaactatgctttaacaaacttaccatcttgacaacaaaccaagactttcttccctgaactcatcttgagcttagcaaaattaaccgcgggaggaagatttcttgatatagaaaatctatcaaattttgaaccctggtgattggtgaacatatatacatttaatgaatatttgttagaggaaaacattgtgtgtcatacaagagtttggtttgtcttaaaggtacataccttcatgggtagatgcaaatgctcttcaagatatgatacagggactgagataggattttgatcacaatttaatatgcagtcaattgatgtctccttacaagctgcaacacaaaaggataagaagatttgatgagaggccaaagcaacaacatttgtagtaagaaagagacaaatgttgagaatctgaagattttcctagttaatggaaaagaaagagactacaattgtagtaagaaacttaaactcacctacttgtgatgcaccaacagcaagattcgttgatgacaaccaaaatactaatctttcttcatcaactttcggtatttgtgcactaagacataagatttcatcactcttagcgtgattgactccaccattagattttgagcatttgacaacaacctgaggagcttcttgacctctatgcgctcgatacactctatcgttttcaacaatctctgcaactttctggttacacaagtcaggccctgagtgaatcaaatcatcaacatgtgtccaaaaaacatttggggataaacctctagcccaactctcttcatcatcaccagcccctggaatataattccaactaaactctgaactagttctgttttgaagttcaccagaagcagaagctgagacaaggataagaggtgtgaaatcccatgaatcatgctcaggtacttcattcaaccatataacagttttctgtgaaacccaaagaggacgcaaaggttttctcaaacatgaagctagagaagctatatcagctccactctcatctaactctcttgtccactcatccaatctagcttcaatagaagccctctcagtatttgaaacccatagtggtagatgtaacgaacaatcccatttatctaacaatttcctgatgttatcaccatcatcatcactagtcaaaccctactcaaaaaacagaatgttaatacaagaacacttcctcaaaaaagacaacaagagttatgatctacattgtaactcactgcatcaatgttacataatctgttccaatgattaaatattgaacggttcactacacaagaccacataggtatcgttttcgacatgctatccggaaaacgctttcctttacgagtagaatcaataatgatgcatcctcctttttctcctatccatggcaatcacacacaacacaacgatgaacaatgcataaagatatatgctttagaaactaaagatatatacttcattaatctaataatggtgggaagaaggatgaattgatgataccagcgagaagaggaagatggagattgagacgagaagtgttaaaggacaaattattggtatgaccatcggtggatttgaagtagcaagtggcgtcgaacttttcagagtaccagagaccacaacgaaggtttgcaacgagaggaagtttaggccaaagcagagagatctcgtggacgaagatggagtcttggtagatagatcgaagagcgttgtagagactgttgtctcgtcgttttatattccttgcagctctgtatatactatctcttgttgtcatcatcggctcttctgattttgcacccattgtttgatcaccttggatactatttctcacttagtctcaagattatggacgattctaactcggagatttttcttcgtttgatttttttgaatttgggttttaagagagaaggtttataaagaaataaataaaaacagaattgaagaagaagaagaagaagaaagagcagagggagatcggcggagcaagaagatggaacagaggagggctacgagagagagagagaaggatagggctccactatgtttttcacccttttttaacggctggtgggtttattattattttattcagagttgatttttgtctacacgaaagattatttagccggtacaaaaatactaaattgacattaggaaaaattggccaaaatcttttattttcttaaaacaaatactaaatattccaaattgtccccaaatcttaaatattaacaaagtaatcttataacctttaaaaatccattataatcttcaatttgtcttttaacataatcctacttcgtaatcttttatccgtttgataggaaatttaaataaaaattaacaattgatatcattaagctatcataattaaaataatacgaaaaaggaaacttaatttggtgaatattggattattggttatttggtttcatttaaataaaattttaagaaatcaatttatcagtcttcctttagtcttatgggaaaaaagtaatatcaagtgaaaaaaataacatatatatcgaatttaattgttgaaagtttttattttcctaccccatatatatataaacacatatatctttttacttcacttttgcataattgttttaacaactaatattattgactcaaaatatattcgaatagaaaatatatcatatatcaacaataattgatgatgtatttactaaaaaaatctactcgattccaatgaatctaggattacaattacttttctttctaaaagtaaaatttaaaataatacgaaaaatcactaatcataaaatgaaaaaatattaaaattaatagaaagttttgtttatttatttcagtttctttttatatttaggaatatttaagatcaatatgtgctttttaatattcatatattattgtgctaacaaattatgttacttttaatttgtctatatttattggttggttatatttcttgtatacacattttgaataaataatagtgtaaatcttttaacatttagaatttgtaatttataataaattttcatttttagcattaaataatataaatattaaataagttgaggatatagtttaactaaagcgtgtatacgatatttcagattcttaattggaaaaggaaaatctgtcctagctccaactgaaaaaacgaaccacgcaccgacctacagaaaatatatatatataggtatagagagactgatgaaaacctaaagacaatcgaatacgtaaaagcttcactatgatgatggaacaaatttgcagagatgatgattggattgtggacgagtcttcgttgacgaagctctcttctcttggccgagggaacttcggttacgtctctctcgagaaggactccaactcccgactttacgcaaagaagtcatcgccgatgcatctcaaaaagattctcgagaaggagctcaggatcatgcatcgtttccgtgatcatcctcgcatcgtccaagcctcaaacaagcttcacttacaaatccaaccctacgaatattgctacatctatatggagtacgcctccaaaggtaatctccataggtttatatatggtttccgtcggaaagaagagccgatacctgagtctttggtcagtcgcacggctcgtatgatcctagaaggactcgaggctcttcactcccatggttacgtttactgcgacctcaagccatccaacgttctcctcttcccttccacaactcctggagagccgtgggatctcaagcttgctgatttcggttcatccaaagagcctgacaccgatcatgatcctacgtcccttggtactgttgagtacatgcccccggactcttttgtaccaaacggactgatcgatccgggacatatcgatccagcccttgatatatattctctagggtgtgtggttaatgagatgtttggagctatacctatccaggagtactttgacgaattttacgtatggcatttgcgtgacgttatctctccgcaggctcaagatttcttaaggcgatgcgatgacatgcgttcacgcaggcccaccgcgactgagctcttgaaacatccttttattacacaaggacttccatcgccaacaacagaagacaacaaggagatatctaggtcgttgattccaagtttctcgaagcttcttttgacctaatcctctctctatctctcttgtgtacatatgtataaaaaaaagaaaaaaaaaactggatagtgaatttgctatggcaaagcctagccgagatgtaccaaggatcggtttgaccttgggaactcgttaaattgtgtgtgtctttgttctttctattcatacaaacgagagtcgtacgtgagagatatgcaatcgagaccaaagtcttcttccgtgataagattatcagatcgatatatctctataccaagacttccatctggtgatttcaatttacatacgggggagaagaaatttctttattttatagaagagtatactttagtaaggtcgattggttgagtttgtttcttacttgcatcacaagaaaataatcttctagtcagtttatctatttggtactttttaaagtagaggtgtcacagtgtgcatgtgctttattcagtatttaccatgtcagatcaacgatgaaaattaaccggaatgggtttgaagtctccaagttttcttctttctcaaacattttccattaccagtcaatagctcaaaagttgaaccttaataaatagataggaaatgaaacgatatggttcttcttactcagataacttagtgaaaattacaatatccaaatagtctcgaaaccataatacatcttgttcgttacggtggttttacttgagcctctcctttctaagtctttctagttccaacaccatttgccagtgctctagtgaaagcgtagtctcaccataactcacagacatcatacgagccattgtcaacaatctgtggaaccaaacaacataattgtaagttttgcacatatttgacaaggataaaccctaaggagggcttttgtacctgctcaagtcttggctgcctaaactacgatctgtttgtctagctgcaaccaaatcattctccaccacctgcaacaaaaatttgcagaaaatattagtcaaaagtctgaaaacaatggatttctttagaagtaccagattggcagattctaacattaatgcaatagatatatacatacctgttgcaactcttgcccaatggagtgtgataatgatttgcaagtagctaagtagcacctccaagtttcagctgtttctggtgtgatgacttccaatgaattcacttgagaaggttgaagaggtagaaccaaatcggcgggcattatgttcgactttccctcggagaatatgagcatttgaacatcagtggccatttccattttgtaatattggaaatcatactcaacctgaaatagcagcagattccatattcatatttgaatctgattaaaagtgaataatgacgttgccctaccttctgacattccaagaggtttttaagcagatttgcattctcaactccaacagagttcaaggtgcctggttgcaactctgtttcatccaatatcaagtgcgtaccatcagcaatttgtagaactccaggcatcaatctgagtcataaaaacaatataattgcaggtctttcaagagaagaatgattcaaaaccattgttaagatttcgtagaactggattcttacctgttgattccatagtctttcttgggaccgaacgaggcagtgttcagatactcaatagtaagtggtatagattgtgtgaacggtaggaggcttttgagggcaccactgagctgggtaccgaagatagacatgctttctttattaaggtgtatgagattaagagaaagcttcccaacagcaacattatctactcttccatgcacctgtaaaggagaaaaaaaacatatgaatatagaaggccgtagcagtaatagctgagaataaaaacaagtgatcctttttcaactaattacctttgacaggagatgcaataataggaactgtgcggcaatgtgatcattcccaagtagaccggtaaggtacttcatcaaactctctcttatctctttgaatatttggggggattttggctgctaaatggaaagtaacaagagatttaaaacaaatttcaaaacacgaataggtatgagaggtatattttctaaatcgatgatacttgcctctggtaataacgaagaaccatgcaggaaatgctgtgtttcaagctttctatggataagacaatggaggcgtgggacctttccagagggcatctgaacagattcagcttcagaaagagcatcagagttttcatcaagtgtatctgtatccatcataacaattggatcgaaggtcaacactccaagaaattcaaccacatcatttagcttcaaatctgactctggagaatcatagatctgcgtggccgcataagaatcttgtcaacagactagtctttgctgcttttgtatacacatgttaacaggtaatataaagaacaatgtaaacatatatttaccttgacaagacaaggcagagaatctgcacttgtagcaggcggaataccagaagtttgtggaacctgagattctgaagctgatgaagtagcttcccccactttctgatgaacataaaaaacagtattaatcagaaattcttcatcagccaaaatctcaatgtctcatgattcttcccagtaacagtaaagaaaagtttataatatatggttttttccacaactttgtagcttatagtgttagactcataaagactttgaagaaagacttaagagactagagatccttaccattttcttaaaaggagaaccattacgcccagcttctaaagtctgcaatggtggctaaaataagttattgacaaacaacaccaatagatgttgctacaacaaaatcagtttcatataaagcaaacatgagaacctaagttgcttacactggagtccatggaatcagtcatttcttcatccaccctcacacgcttttccctgttttggccagttagatccaaaaaccggttttttagctcttgtgaagaacattcagtccactggttttttcccggaacctaaacattgcaatcaagtgttattatgtttaaacatatatgagagaccaacaacaaaaaagaaagatccgcatgagacaaaacatactggaacacagtaaagcaagcgacgctcccaaacttgaatttcagtggaagaaccctcaggaaactgtgaaacatcactgtacttgtttgttctccatgttgaatcatcctaaacagaacgtaaaaacagaaacagttactgatagataaagattgaattcttctttagtagaaaccatcaaaagtcatattcctaccttgtaagcaccagcatagaattcattcccaagcatgtcctgtatcattccacgaaaccgaacaagagtcttgggttgcacccacttaatacttgacgaatcaagaattggaacctagtagacaaaagaaaacactatcggttaattaagaaaaatatctcaaaacagatccttgaaaaaacccaaattaaccaatctatggatagactaaaacctaaagtaagctgatttacttagaaacagagccaaagtacacgaaaaaatcaacctattatgctaattgggtagtaattaatcaaaacatactcaattgccctaaacccaaaaaaaaatagaaacagagtaaaggttttagggcaaacctgggagatagcagattcgtcggagaagtagtgacggaacaaatcaacgacaccccagtcttttccgacagacgaagccggatcgtagcctgaagacagagcatttacgaaggagaatcggacggctcctaaagggttggtcagacaatcgtaagctggtcctcccatatctcaaaaccaacctttgatttcactctttaccaaagtactatgtagcgagaatcgccaagaatctagagatgaaagattgagtctttgctcaaacacgaattaagggcaatgtcaagtgtgtatagttgggcctttcccgccatatctcctaggttattcccgccattatccatgcccattctccaacttccaacgcaccgttttggacccctctccatacgatgtcgtttcatgtgtataataaactaattcatttggcatatatgatcctctgaccatcttggtcttaagatttgttaaaagtcaaaccccagactcacaaacacagaaacagagatctatgaagctaaacatgacgaatttacaacagaggaattaggttttcatatatttagttttttcataagtcaaacaacataaaccatgccgacttctaaaagagaaacaggtggaaccttaagagccacgtcaggtcctctacagttccttctcaagaaattataaccgaaattaactgctaatctcttcatcaccgatgatccttgtttcgctttcacatgtgaatgtcccaatataaacgcagttcctgcttcttgcgctgccagcaaatccctcagctcgcttctcagttccgcatctgcttctgctgacgatgttgatccttcgtcctcgtaactgttttcctcaaccgcaaacctcacccgtcttatggtggcggttggggctggttcggccatttgtatgacgtcttccatgctttcgactgtggagaatccgatggagacactctctggttggagattgtcttcgatctcgtaagctactgttccgatcacggctagtcttgactcgcttgaggattcgttggactggacagaacgagcgttgtcgtcttcttgttgtgttcttttgtgccaatcgtaacggatgaaatccgccagcttgcttacgagctctgtttcgaatgagtccacgtcttgatggacgtcacggtatccataccgaacgatgcatctgtaagagcggtggtcaacgggaccaacacgacccacgaggtatctctcagcaggtggaacgaacgggacagggacagatttcacgcagacaaagacaagaacacggtggaaggcagggaggttggtgacgaaccgggagaaattggcggggattccagaggttaaatccgtgaagactaaaccgatacctggaactcgagaaattccgaggcttggacccaatgcaagaagccattcaagcgagactttattctggagatcaaactcgtatttcttaatggtggtgtagtgccaaacgaacatgatgatcatgaatattagagataagaggatcggaagccaagcgccttcacgaaatttggtgagtgaggccgagaagtagagaagttctattgaaccgaaaaagagaaggaacgctagcgctagaattggaggcttgtgccagcaaagaacaatgactaatgaggtaagacatgttgtcactagcataaccgccattacagccaaacctgcaaccaaccacaaaggaatataatctcaaagtcgaagaatccaaaattcttgagttgataaaagaatctcatacctgatgcatttcccaggtgtttgacatctctaaacccgatagtaacagcgatgcagagaatcatgagcatccagttaatctccggtatgtaaatctgaccatgcatcttatcggacgtgtgaatgactttgactcgagggaagcatccgagagactggctctggtttatgattgagaaagtcccactgatgatcgcttggcttcccacaacagaagcaagaattgctacagcaagcacaggccagtgcaaacattctgttcaaaaccatggagttatataaacaaaagatcagattacgttttcaatgatcaacaccaaaaaaaaattgagttcttgaagtaaggcaaattactgacttggtacagagacgtaaaacccaattgcatgagcagaatggtgatgccgggataagtaagcagcttgccccatgtatgccaatataagagccggataaaccaggaaggtaaacgcaatctacagcaaacaaaacaaagatttattgaaacctgtggcgatataacaataagtaaatcatccaagctaaagtagaaactaacctgaattgctgcgtaattgaagtgaccaagatcagcaaacatggcctcagcacctaaaacaaagactcaacgagttagattactgacattatttatggcgacattaacaatatcgatttcttatatatctcaccagttatgcacaacaagatcccgcctagagacatccatccgcttactctcgtctttctcaagaacatgaacatgtatgtaggagaaagagctttgtatatatgaggattccactgtattatattgtacaagccaataccacttatacagagcagccaagtgaggacaataggcgcgaaaacaaacccaacacgatgtgtcccaaaatgctgaagcgagaaaaggcagactagtatgaagcaggtaataggaattactgcatctgcacgtttgaacaacaaaggaagccatcattcatcagaactcaagtagcaaaaactaacactacccagtctttgtgtacttacattggtgatgttctttagacatattcagctcaagacctgacacagcagagaaaactacatacaagaaaaagaaaagattagaaaactcttttaactagcaattggacactggaatatctgtctacaaacacagaagcatacataccggagatagctggagtgagaagtccatctccaataaccatacaagtcccaagaagaacaagaagcagcaaagcagtgtgtaaccacttgtgtttctccagatatcttttcacacacgagtcatggttcttctccggtggatgctccagcttataagtggacagtgcctcatcagagacttgtcggtttgggaggaggctaactttgacatgacggcagatcaatgagtacaaagcaaaagttccacctgaaaacaaatgtaacaaaccttcataagcaaagcaaataaagtttctcgatgattttctgctctgaaagtgtctcttcccctcaccttctccgttatcatcagctcggaggacaatgaagacatacttaagcaaaggaaccaaagttaaagtccagaaaacaaaagacataacaccgtagatctcttcattggtctctgaatgttgaatgtcctcagcaaaagtgctcttaaagacataaagcggagagatactcaagtctccatagacaacaccaagactctggtaagcaagaagcaaaaccgacctccatgattccttctgcataattgtcaaagttccaatctttattcagctcaaaattccaaaattgagcaaatctaaaagaaaatggacaacaaaccttagaagaacgagaaccacagcattttccgagattgagatccatggttcttaaatgttcagcctaacacgctaaagctgaacaaccaaagaaagaagaagatagatttatgaatctgaagcaattgaaaagtaatgtcgaaaagagtgaaacctacaaagtaacaataaataggacaaccaaactctgttcccaaattagaaggaagaaaacaaagtaggccacattcacgcacatgccattctcatatccacgaatttagataaaacccagaaaaagaagaacaatcaaaaaccctaaatctctaaaattgaacaacaattacccagaaaatgaaaagacttgaaaagtgtagagcctagtgttaggcttttagccataaatggagataaatcaattattagcttttgcccattttgccaactgtgttttttccacttacagaatttttaattgaagtatgaatttttctgggtggatgacgtgaatcgatgtgtaggagtgaagaaagagatgatctgcttatcattgaattaaagatattgaagacaaagaacgacgatacaagataagaacccatagcctccacatgctatagccaaattaaaaaaacgtctttgtctttgcgttttctcggggaaaaaaagaaagagagcaaacgtggcgagaatatttacaggtgaagagacagaaacacgtgagtgctctcccgacagttacatgacatctaaaggaaaaagcttttcttttttttcttatacttaccaacagaatttgcgccattgattttgcaagctttgtactattgataagcctcaaaatctggtcatcaccaacctcactcactctcttttctctctattttccgaaactttttgttgcaataacaaaaatcgaaactgtttttttttttatttctctctgtatcagtcaacaacaataatatattttgttaaaaggtatatataacgcgtaattaatatatacttatattagtatttgttactatctattgatagtcactagtattaaatttttaatactaccttattatttctcttttataatttgtgaatttctttaacttggcagattgtaagaaagaaaaaaattgatatgaaatgtatttaagattttgtccctattatggattatggtgaacaactagatgatatttaataaatgaatagcaacatataaaataattaataacaaatctatatatacagttataaacttttagaatggttttatggcattttaaaggttttttttaaaaaatttggttgcatctacttttttatatctcatttttttacaaataattattattatttaacacatgtctttatttgtacacatctctgaattgttttagtgtgtaaaaattagttgtttagctaatgaatcatagatttacaaatttattctataaaagtttgttgatttttagtaatctataaatttaaaaatttgtttcgaaataattgaatttgaagtcattgattggtgctctatttctattcctttctttttatgcttctttctctttcactcctcttttatgtgtttcttcctctacctttttgtttttggggtgttttctttctctcccttttgttaggtgttgcgcaatttcaacctttatacattattttcttgctatcccatttgacattattgtagtcgaacaattataaaaccagatcggaatccaattctccaaatcgattcagcttgctcttcacaacaatcttttctattattatataattcaaactttcaaagcatatagtagacttggtcggtggattcaatgcatgtataaagagacttattaccaaatcaaataataaattaatattatatgcatgcgttgcatgacgacaaatcacactaacatttgatatttcaaagcaaagaacaaaatgtattttatatgatttaagattctatacgtgatttggggaatgctgtcttttcagtttggtgtatgatgtatcagtcaaatgtgaacgatatttgttttttgctagtcaaaaacttatacactgttgatatgtgaagctcactagagagacgattgttttctggagtctcttatatcatcaagattttgcttggaacactctttttctggagtctgttttagtgaagattaggttcgccatgggttttttgcaagttattttcttgattgccaaaagcaggttttaggatatactaatgattcttaagaatagaacttattatttatacttatatatatatatatatatatatattgggcacaaatatagaccaatcattttccgaagttttaagattaaaaagttcaaaattgggcgatttaattaatgattatgaaattacaaatcatattttaggattgctgaatccctctttcattataataatgtgactgttacagtaattagtgtacaagaaaatgtttgtcgtctactatcaactcttattaatttttgcaattttgccaaaataaaaatgaattcgaattgatcttacacgaaaccattttgtttttacttattagagtttcttaaccaattgaccattttcttcttctttttattgtttacccgcaaacacaatctaggaatgaaaatcttgtttttcttggcaatcggcggcatatatattatgggaaagaaacttttcgttttttcttggtaaaatgggtaacaagtgatgatagattggtgatggtaagtaaaatttacttgggagataattgagtttcttagttggcgatatgggatgctgtgatttagtgtttactcattaacgtacatttataagccaatgtaattccaaatctggaaagattttaggcagtaaaaaacagagaacgataaatactttttttatgctttgttaacgggccagtaagccaaaatatgcatagttttcgatgttaatttataaacaacttgctttggtgaatggttaaagactgtataaccgacagaatgttccttttgtcaccaactgacagaatgtttttgtgttttctttcccatatttttatttcatttatgtttttgataacataaaactagataaatataccacaagattcttggatataagttaaaacacacacctgaaaagagagagagagttatatatccacatatttatcaaaagaaaattcttggattaatccctgcctgttttatattattgtgggtaaattactctcttttagtgttatagaaaaatattccattttaataacaaaaaaaaagagttttacaactgacaaatacagtttttttattatgagttgtattacatacatgaatacatgaactcccatcaacacgaggaaatgagacaattcaagaggaagggcacaattatattttatgaactaaaaagacaaaatgaaataagatcaaaatataaaaaaatgaaggaaaagagcaaaataaaactgatcatacggagacgacctccaaggacaaaaacattataaacaacatgtatgtataaatatatttaacacaaaatgtctatatgtgtgtgtatatacgcatgacatgtatggatcagtggccaataccagggcttgggacatcaccttgccttctataaatatcatcataatcaggcactggaggtgatggtgatgttgttgatgatgatgatcctccatcataatagtcactcgaataatcaacttccatgtttggtgccatcaacttcctcatcttcattgccgggaatttaccgccgtgaaaggcttccggctccgatctagtagtgcctctcacacttgtactcaacccaagattcgaaggaattccggagataattagtaagaaggagagtaatataacgtcaaacttaatcttcgttgcatccattcaatataaaggtgaaaaaatataagagaatttatatgaattttttctttcttcttgttttctttaggttcaagaagagattgtagcgttgtggttataatagagatcatacatatatatgagtaactatataagaaaagtagcattgcattattaaatttggagggccaactttgttgaaattggcaaacaaaggtcatgatggatttataacatggcaatttcttactttttcttttctttgatttatctatgttatctttttatttctatcgtaatgatctctcattgcatgccttgttctaggacaagtcgtatatttgttggaaaattgttaagacaatataaatattatgagatttttaaaaactagtgattaaatcaaaaatttaagtaataaactttccaaaagcattgaccacaaagttcattgttggggacaaattagagacgttggatttttttctcatttaactgttatttttatttaaaattttggaaaactagtattttaacccaagtcccttttttgttcatcttttactaaagagggagctaggacttaggagatacaatcattccgagattataacacttccaagagattcacgcaattgagtttggacttgtaaccggagtgagatattggaatactatatactctaaagcatctaaaccaagttgtgaggtagtttcatgaagggtttaagcataaacgccttagaggaacttatatgggtttaagcataaacgccttagaggaacttatatgcactggtttaattaaaaaattctatcatcgtcttgtaatcaaaagagcaacgtaagcatatgggggtcacgtgctaccattggtcaatgccgactgaagaggtatgccgaatagcagaaaactcattattccctttttaataaaagcatggggttatcaaacctaagtgtataattaatatactatgttttataattaaagtatttagtgacaataattaacgacacagcattctggcacagaagaagtgaataattgcgttttcttatcttttaatgatcatgtctcgcttagaaatgcattacgagttaataaacatgttactgactgtcgaaagtagccacgtatgtatcattgggatccgatcagtgaggaattagaggaataatttagataatattctatatctataatctacaattaattatgctacttagctttaatacgccaacaaaccgatatcaatatatcatcgtcataactcataatgtttcaagttttgatttgatcttgctaagatctccataatcaacctaattattgatgtaactatataaaactattcggaaaatcttgcagaattactctataatgcatatgttcgtatgaagatgataacaattttaagatatgtgagatatgacgtaatgctttggaagtatatcgtcatatcatacataggaataggatacatatcaaatatggataattgtcataaaaagatccctggctgggccctaaactccactaacaagtgacagcaacttctctatcagatcaaactaaagtttcttataaaacagcttcatggcaatgtaataattctaacaacttagataagtttcatgtttttttttgggatttttgactaaaatgaccatcaagaatttataaagagcaaatcatctttcttctgtcaaccttaataaaagagacctttgaatgaataaaggttcaaacagaattacaatcctaatgaagcatctgctgcaacctttgcaacttccaatacaccaccaatagaagaagaagaagaagaagaagaagaagaaaaagaaaaactctttgtcattgtttaatgttggtaagaatgcgagacgataaaccctaaggttattaggcaaaaggttttagcctaagagaccaaccaattcaaggattctttttggactcttgagtctcagatgctgaaggtaatgacttcaccgtgctcggtttgctgctactgcacccagcggtgttagattgtttactctgcaaaagaaaccgatggatcaatacattttgaaaaacaacttcttttccaaaataggaatatgagtgaaagagtaaacggtgaatgtaccattccaggaatgtaagtgcctgttccgtttgatctccgattgtttggtgactgtttgatatttggcatggatgttggtccctcctgattcctcccattgaaaccattccttaccctgctcatatagaagctgatatttgcccaggaagttgtgtctagactcggagggagccagttatgcaggctctcaccgtgaaaccacttcccgtatataagattattgcggtatctgtcaaaatctcctttaagttgagagtagtctgctgctccagtgccaaacgcgacgacaggctcctctacgtcttgtctttgtcccttaccgttcctctccagtgaaacattaaagaacttctccagtttccaacccacgttctctccaggcagtgtaagcacatctctgagtttctgaactcccagcataaaacaatttcttaaacgtaccatatttcctagcaagattacacaaaagatagaaaatattacttgagataccaataatcatgcttagaaatctctggttaatatagtaccttttgtcacactacgtccaaggttgttactgtgtttcagaggatccagtatgttgtaatattttacaggaaaatatttcctgctggcttcaacaactccagtttccccagaatataactccatgcattctctgaagaacttctcatctaggaacacttcatgatttccggtttctgaagggaacaacaaatgaagttttcaaatttagaggaaacaacaaatgaagttttcgattatctcagcgtccttaccagtaatatctggaagagatgatatcgggaccggaccagtgaccgtgacacagtaattcttccaatcaaatgatccatagtaatttatgaacttatacagaacctgttgatgatagagatttaatatgttaatcttggaagcaatttccaaataagctcagatttaaaaatgcttacagctaaagggccagacagtgatgaataagacatgttgacgatgttcaagacgagtatagccaatgcatatgtcgaaatcaatccagagttggcaccgagaatacggctttcataaaaacaccaggccttaaccaaaatgatgctttttttgaacagatggtctctaccaaaagctttgtcaacctaataaagcaacaaaaatatcatcagttgagagaatagacgatggaaacaagtatatattatactatcatcaagtattttacctgctccagaaaacataaagcgcctagtcccgccaattgattgaaggagatatcgaaagcaacgtccctgatagagcactttatgactttgacctaccatcaaaaacatcatttgagcgggaaacagcataagcatggaatatgagtttttattgaacacacatatttaaaaacaaacaaggaaccaagcaaacctttgcttggacatactgaacaccagttacttggagatctgaatttcccatttcagcttcaagcacacaacacactgctctagcacagtcctcctccgaagcatgatgagttagaactgtcagatcaatatctccatctgggagataggtttttaatggcattgaaccaaataaatacacctggtaatatacaacaccgcattaaaactacattttgatcaagttagaaaactttagcattcctaatacgttggagactgaaggaaagttcatccaacaaaagcaagaaagttctaacctcaattccaagacgttcccacagaagagtctggagattactgatgatcttattcctacttctttctgcaagatagttaggttggatggcacatagtatctcctgagcccttgcctcagcaatcaaccacacttccgcctctattggcgttgtttttggagacagagacaacgatgaagaggatgcagataaagagactggaacctttcctttatgatcagccatttgaacaaaaaacaaagagaatcaccccaacgagtgcaagatctacaagtacaaaccatagaacaaagagaaaaaatcatggcttcattaaaagaaaaacatgacatcaaataaggaaaacaacttccaaccaaagaaatgaagccatacaaattgaatcaccacagaacagaacagagcaagaacaaaatcttgcttcaaaacaatacaagcaagacaagaaaatcaaaacagagtgataaatgaatagtaaatgcaaatgttaggtatccctatacagtctttagcttcctcaaagccaaacccaaaccaaagaataaaaaaaaaacaagactttggaaaatacccaaaaaaagaattgacaaaaagaattctgatccactcgcttttcccccagcttacacggcaatgattgcgacaacaactaaaaactaaagctttctaaaactcaagcaaataaaaaaagcctcgtcaacctcgtaaatggagaaaatatttttagagttgtgaggagtatcggaaaagtacctatgcttttagtccaagtgtcgtcgtcaaagaagcttcctttgaacaaatccgtcagaacccaagtggctttaactcaccctgcaacatagaaacccataaaaatcaaaactttcgatgatgaacaaaagatcaacacttgttaacaagtttagggttctaggattgtaatcaatatgcatttgtaagaaaaagttgaaatttaacgcgtaaagaaaaagcttttgcctttggattatcaaacgcaaactcatcaaaaaaactcacaagaaatgaaagagttaaagaccaaaatggaacagagaaagcgaaaggagcataagcagaatcgttttcaccaaatcttaattagtttaagagtgaagagctaaagaggataaagaactttactctggcggagaaaatggcagcttagcgtctaaacatgagaaggagaataaataaacaagataatgtaaatgataatgaaacgactaccggtaaaaaaatgtgaaaaaaaaaagtcaatgaaatttttatggaagtttcataagtcatagaaattaaataataatgaccccaaaatttaataaatcagcatctttctttcttttgtattaaaaatcgtttcacataaccccaataaaattgttcatttttcctaacaacgtcgtcgtcttcctcatgagttcaaagagagaagacaagaaaatcaaaggaaaaagaaaaaaaagttaaaaaagtaaaatgaaataaaagactaaaagagaggaaatgacaaaatagatatctacgatgtacagatactcttacaaacattggctaatgagatttagtgtttggatacgtttatattacttttctttttttttcttccaagtcaaatgtattttagaaaatgttatgaggtccaaatttgtgtttaaaagtgattttcttttcaaaaataatattattttattttataatgatattattttcaaattttagttagagaaacaacggtttagtttatactcacgctatcgagaaaacggtcactaaattaacgactttttgaaataataaaataattttgaacttttaagttagcaaattaatttggtaagctaacattgatttgattaccctttttctagttagagaaataacggttagtttgctttctacttgtaccatcgagggaacgatcactaaattaacgacttttgaatatattaatttttttttgaacttttaagttagcaactttttgtctaagttaacattaacttaatgaccgtttttttttaattagagaaataacggtaatttactttgggtatatgcactagatgactatgaaaccgaaaataattgagtaactaactatggacaacagtatcttgtcggaaatgtatatagaattacttgaatatcctttttatcattttctctctcatcttctccctagttttctttttctctattttctttttgcaggattttctttctccctggatctatgtcgtcaacttcttttccctttatagatattctctaccaccatttactctgtaataatatcacgatgaccataaccaaataccaaattgttttcgttatttttgtttgattcatgtcacttcttaaattttcatgggtttttttctaaattttatgtaattttttatgatatactggtatctttccgtttaacatactatagttttggtttacatgtgattttttaatatgccatgctattgtttattttgacatgctattgttaaaaatacataagattttgtataaataccaaattatttcttttgttatttttatttgattcatgttatttttaaaaattacatgatttgtttttttaatcttttgccagatgactctctttctagactacttactctgtaataatatcacgatgattatgaattccacctctgagtctcttttctttttctcactgaaccttatggagtctctaccaccataaagaaatgtatcattgtaaaaactataagtttacaagattaattggtcttttcctcacccctaccccaccacaaaaagagtcatttaccaaaaaaactgacacatagttagtttctttattatgctgtcaaatttggtcatcccttaatattatccatttactttatacatgtaccatacaaacggttattatgttaacgacttttttaatatagtaaaatattttttaacttttaagtgagcaatttaatcctcaaagttaacattgatctaatcactggttttttagttagagaaataacggttagtttactgtatacacgagctatataaacggtcattatgttaacgactttttctaatatagtaaaatatttttaaaatttttaagttagtaaattaatttccaaaattgaaattagaaaattcagacgctaatgttaaaaaagaaatcaatatttgtatgtgttatcctctctaaatttaaatcgaggacgaaaagacgaaaattcctatatgaaaaactcaagttcccagctaataatctatagtatgtttctaggtgttcctcatgatgatctttatgctgttcacatgccgtgtgaaagattaaacccaaacactaatacggttttagttttcaaattcggattatctgactccagcgttgaagctattttatttttctttgccgtgtgagcccaccatcgttaagcccatttttggacataatatatattttgtaagaaaaaggaaaaaaggttgccaggcaatttttcatgatacaacattaaatttatagattttccaataacttttatatgtttttcctataaatagcaaaaggatagatagtagaaatagaataatatcttaaatattaatatttgttacaatatacagctaatttaccttttaaaatagggatttacctaaacagtctcaggataatatgcagcgaacgtcctaacatttttacaagtgatccaattcgttttacttagattgtagcggatcaggtccgtgccgaatatccaattatccaatatccaatcaaacctcatttacatgtatgtaatccaaatcgttttattagcggattacgtcggggctgggcttagccttaaaacgagaaagaggatttttctgaactgaacaatgaacattcagctttcaccacgaatatttaaattcagcatctgctagttttaagatgttgaatgaagcatttagttaactaagacatcagactgcaaaactggatagaggaacaaaaaaaaaacaagttgaatcaactattgaaatagtttgacagaattcaagatccacatggcaaaactatgttaaacagagacaaacatccttaaagacgtaacaagaacataggaaaacaagacagaaagctctgcttgaaggcttcagacacgcggtgcagctgcagctgcagctccaggtccagcaggacgaggtgcctgtcctggttgcccaggcttgggagtatcctcctgattatctcagaagagtaagtcattcatgcaataaaagatagaacaaaacagtctcactgaaagtagttttgttaggaatgaagtgaaggtactggtttgcttaatccaccaagaaagtctacttattgaagtcgtaaagactatatattgaaacaactattatagttcagaaggtaatcaaacccaaaatttggttccagcgagtgtcaactatacattgtacatgtccaaaaaaaccagtttaacctcaaactatcttcataaaccaaagacaaaatggagcgagcagaagtaacaaaagattgagaaatgaagcttaaaactattaatgatcattgagtcgaaaaagagagagagatattaccttgcgtctggcgaaacgaggtggaggagtacgaaccctgcggttggtgcgggaacggactctaacgacatgagagtggatagcacaggagacacagtattgcgtctttgcatatagcttcggcaatgtgtatcctgtcaattacatgattcaatcaagttacagatctcagtaaacttcaatgccaatagtcgaaaaatccaaactttctcaataccaatagtctaaaaatccaaactttataatgtagaattataacaaaggtcaaagaaacataaaagagaggaatgaaatgataccctcatagacgctagcttcctgaacatctctaatagcagcctgctccacaatgttcctcacaatgaacctcttaatggccttgtcctatcccaaattattatagaaccaccacaagatcaaatcaaaatacacataagaattactggagattgattgattgagaagagaaggtgaaagagagtaccttggggcaacatttgccacagttggagcatctgattgggttgacgtgtcctctgttgtgcttgttcctcccaccgttccttcgcttgaaagtctgcaacacaaacaacaatggatgatcatcaattctctatcttttattgcaaatctgataatcaaaatcaaagaaaatgagtaccatcttgcttctcgatgaactcgtgttgtgtctgctgctagggtttacgctcttgttgccgatctcattcgtctaatctctgatagaggagagctgatctttattgttacttcttgggctttaacatgtagtgggcttgggctttattttttttttttttttttttaataaacattgccagtgactttttcattctgaccaaaaattggattttgtttctagagaagactttcttcttctttttcttctttcatcaattaaaaaaaaaaaaaaaaaaaacttatgtaaatcacagttatttttttccaacaaaatctaacagacaaatgtaaattattggatagagtaatatagagtaaaccttgaattttatgtacactctaataataatatatgaagatattctccgataaaatatgcaggactaatataaaatatactcagattaaacatgaaggagtgttgaactcagcacattcacactggtaaaaaggtaaaacctttcaaagaaaaaatactgacttaagagtaattttttgttatgcaagtaacaaacaaactcgagtaataaacctaactaaagtataacacttaaataagataagatctttcttctccgcggtatgtaataaaatgaaatcaccagatggaagtcttgttgtagagaaatatcgatctgataatcttatcacggaagaagactttggtctcgattgcatatctctcacgcacgactctcgtttgtatgaatcgaaagaacaaatattagagtgtatatacttggtttagttgtggcgatgttagctttgttgggcaagcgcatgtcgatgattctggtcgcttaagcacatttatctttggatcactaacaagaccaccggaagctcgtaacgtttattttcagtttcaagccatggatattcatgtccattgatgcttctctcattgaaaaaaagttgtggaggacacatattcattgggttttcaagtccaagatgaaagttcctttcatcttgagggggagtattagagtgtatatacttggtttagttgtggttaagtttggttagtagttttggtttagtttactagtatttaagcttaatcatgtataacttttacacttaatgaagatttcacgattattgaaaacaaagacacacacaatttaacgagttcccaaggtcaaaccgatccttggtacatctcggctaggctttgccatagcaaattcactatccagtttctttttttctttttttttatgcaaacaagagagatagagagaggattaggccaaaagaagcttcgagaaacttggaatcaacgacctagatatctccttgttgtcttctgttgttggcgatggaagtatttgagtaatgaaaggatggttcaagagatatgccgcggtgggcctgtgtggatgcatgttactgcaccggcttaagaaatctctagcctccggagagatatgacgacgcagattccattcgtaatattcgtcaaagtagtcctggataggtatagctccaagcatctcataaaccacacaccctagagcatatatatcaaggctcggatcgatgatcactcccttaggcccaaaagactctattggcatgtacttaggcgccgtaccaaagtacatccaaccataatcggaatcaggttccttggatgagccgaaatcagcaagcttgagatcccacggctctccaggagtcttggacgggaagaggagaacgttggatggcctgagattgcagtgaacgtaaccatgggagtgaagagcctcaagtccttctaggatcatacgagccgtgcgttggaccaaagactctggtacggattttccttccaaaccagatataaacttatggagattaccttcggacgcgtactccatatagatgtagcattcagagggtttgatttgtatgtgaaacttgtttgaggcttggacgatgcgatgatggtcacggaaacgatgcatgatccggagttccttctcgagaatctgtttgtgctgcatcggcgatgacttctttgcgcaacgtcgagatttggagtccttcatgagacagacgtaactgaagttaccttggcaaagaagagagaaggatttcaacgaagactcgtccacaatcaattcatcatctctgccaagtttctccatcttacgtattcgatcttctttaggttttttgtcttctttttttcttttgtaatctgagtaattttatgtggtagttgcatcacacgatatatatatatatatatatatatatatatatatatatattttttttttttcagaaggtcggttcgttttttcaattggacgtatactcctttttcaattacgaactttaaaaatcgtgtaagtttacaagttcaaactatatctaaataaatgtttaagattatccaatgcttaatattgatataaattatttagataaatactacagacaaaataataaatagttgaatatatcctcttatggtttttccatttgatcaccaattttgtaaaggagctctaaaaatttgagacgatattgaggaaaactagagctatatgagaatattctcttccaagtagtctccaaacagaatacatgcttttgttaagtaccttacctataagagcagtcttgcttagttttttagttcttgcgcaagcatgcatgctatctgaagtctaaagtcagtttttgttgtattccttctctgtaaaagtgtaaagtcatgtgaaatataaatttacatctaaacaaaagaaatataggtcaactaagcaaatacaagttcttatttccttttttctgtcgctcatctgatagcacctccattacttaaaatgctctcaaataacaatatttcaaatagaatttagtcttcaaatcagttcttgacactgccccgttatatgcacaaatatcctttactgtattttcttgttacaaaatgtaagaatgttatctgctgcatgttcatgcaaaaatcttttggtgtaataaagtaacatttaggtgcaaaaattttctttattacaaaatcttaatgtaacggacaatcacaaggcagtctaacataatacaaatatgcaacgaacaatcacacggcactctctaacataatacacaaatagcaaatgcttagtatgtgtgatggtttgtggattatttggtcgtattgttggccgctgatggaatcttaggctttttgtagcacctcctttgcttttagagtcaattgtttgttccaatgcgttacaattctgatcaccaaatttctaaataatgtctaagaaattgaaataagtagagatcaagagcctacatatatgaatatccattgcacgttaatcattactttcttccaagtagtctacaaaaaaaaattacagttaaaatataaaaataaaattacacatctcaaatggaaaaagaaaaaaagatggaaggccgaaattaacaacaaagcataataatcatcacattcattctttctcttaatatctaatttcttgagcaacctcaaagaagtgtgctacattctcttcaggggttccaactttaataccatgccccaagttgagaatgtgtttatctctcccagctttcttcacagtatcatgaatccggcttgtgataaattctttcgatccaaatagaactcccggatcaacgtttccttgaactgctatgtctcttcctagccggtctcttccttcagccatgtccacagtccagtccaagctcacaacatccacaccggtccgagccagtctctctagcaaacctcctgatccactagcataaagtatgagaggtaggtttgggtgagtttgtttcacagcttccacaatctgtttgagataaggtaagctaaactcctcaaaatccaccgggctaagctcggttgcccaagagtcgaatatttgcacagcttgagctccgctatctgcttgatagcgtatgtacgttatcatcgaggttgtgaacttctggagtaaggcatgtagaacctgagaagaaagaaaatctgttcaatctctgagatattaaccaaattgtcaagttgtacaattgctttaagcttttactaatccaccttgggttgagaaaaagctaatctttttatctgtgtgaagttcttagatgagccaccttcgattacatacgaagaaagtgtaaatggagctccaacaaatcccagaacagcggcttcattgttcacctgaaataaaacatattcttcagcttaagagcatttgttattttttgttttttggataaagagattaagagcatttgttgcttcgatcatcacactatctttagtacctcatttcttaatcttctgagtgcttctccaacataaggaacagattcctctggtacgaattctctaacttgagcaacgtcggcagctgattgaggcgggttaaagatgataggaccttttcctttaacaatgtcgaaaggtatgttcattccagacaatggagtgagaatgtctgagaacagaatcaccttttcatacattttgaaacacagacatgtcaacttaagagatcataaaaagaaaaactccaaaactaaatggacatagagaagaaagaactcaccccatctggcttaaacaccttccatggctgcaaagaaatttccaccacaagatctgcattctctgatctatctctgaaagaaggatacttctcacagagagtttgataactctgttcatcacattaataaacactcaggtcacacgaattcgaaagaaataggaacaagcaaaatgtgagttagtaaacaaaataaatggaagcaagcttgccttcatgtacctcccagcttgcctcataagccaaaccggaggtctatcaacaacttcacctttaacagctctcagaagaagtggctcgctggttgccgagacttttctctcggttacagtagttcctaaacaaagaatttgaatcccattaagcataaagattaagactcgtaagcttttgcacattccatgatcaaactcaattcagggaaaacaaatgaaaccccatagaaacgttccaattctagaattaagcaatatacgttacttcgaagaagcacgagaagatcatatagcttctgcagaacaaactcgaaaaatcctaaatttctaccagagagattattggtacaagagaaactgaaagtttcttcatattaccattgtacccatctattaaatccataacagattaaccaaaacaatcaattcaagtactacacgaaacacccaattcgtttcctatttgccaaaaagagagaaactttgtggaaaattcacaactttataactacccagatattaactcaccaaaaacttcatcaaaatgaatcaaaattgagagttagaaataagtaccctcgacggaacatcgaactatccggcatgacttggtagatgagagagattttctgggagatatggagagaagagtagaagaagaaagagacgaagtagagacttgaaggattgacatttttcagatccccgagacaatctcaaaggcttcttcaacgaggtcaaggtgttgttatactctgttttgagatcttagcatcttctctctttcaacgagatggggttaacgtcttcgaacgaagaagatagaaaaaactttgatgataagagatctgctgacgtggattcaacgttgcctagtcagctactatctctgccacgtcattgtttggtttattctaatcatcttggttcaatttggttcggtttcattgctaagatacagcttttatccagtaatcacatttctgcagttttcattgttgttttacaatcactatcaaatttgttgtttactcattagattcaaagcattatgttttatttaaagactaagattgtatatttattttttggaaaatcaacaaatataaaagaccggaaaagcaatcaacaccatatcaaaccaaaatgaaaaccaattacaaacacattaataaggactaaaaatagaaatagtgggaggtgtttgtttttaaaggctggattttttcttgctctgcttctgcagtggaagtgtaatgtgtatgaacccaaactttctcctctgcgtgacgtactgtttctcttcatgtacctcctctttctctccccgtgccgaaaacttcacatcctgctttagttccttcaacatttggctcaaattcacatttcgcctcggtatttgcccttcaaggctctgtctttggggagcaacaacatcttcctttggaacttgcttacgccttagaacatcacgcattgagatattagactttaacactggctttgggagaatgtcaagtggctcgtgatgcttgttcaaatggctgaaaaaggagcgtcgggtatgattcaaaggtgtaaagttatcgcctttcaatgagtcttttgtccacccgcggaaagcattttcagctgcaagttgcttcacattagcgatctctactcggtttaacgcagcttctaaagcctgcttactttgtttaactccttcagtagcttcctcaagcttcttcaaaatccctcgtcttgaactcttatccgtggagaagtcattatcaatcctgagtcctcttggtgtcacaggagatcttggaggctctggaaagcaaaattccgaatcatcgtcctggctttcaccattggatgataacattgtaatttcagcaatcgcaagtgcttccgctgctttcgcagcttcttccattttcctagcagcaaccaatctcatctctgcagttctcagactgttcttgttctgcaggtttaaacccgtttcatcggcttcagcaaccatcttaacctgctcccttaacggttcatcttgaacctgtggttttaccttaatccgactcaactcctcagctagagataccggtccaccaaacccatacgttagcttagcccgtgtcttctcaaggaagtctttctcttctttcattttcttattcagagattcaacagaggactggatcactacaaggttgtccatggttttaccaagattcatcttagcttgcttcaattccatcaagatcaaatcaggagatgacatgggattgtgatggcaatgctcatcgttcatctctttgatatctgaactgagttggtcagagcatctcagtgcttcttgctgaagctgccgcttcaaatcttcaacgatccttttggttgatccaagagcttctaaaacatccaaagtttcaagctctttcacaatcagatccttctcaagctccgctgcatgctcctccattctcttaatgtcaaattcaccattctgaacgttgacaaaaaccaaaagaaaatgaaaatcatatctcaactcctaatccaacctcacacagtgacacagatactccgagattcattgttacaaaatcagtgtgtgcattttacactcgacgatcaacacttaatggtgatgatgatctcagagacagaacaacagcttaaacgatcttgatgctttcaacaacttacatatatgttgctaaaacctcgattatgaaattctagactcgagttatattcaatctcaatattgtaatgctactgaattgcacaaaggtcatgaactcaattttacatacttccacagaagtcatgagattcgactgtaaagaacaatggaaaatggtcaccatcaaagcatcaaatgttagtatgcaatgcatattaatgtgtttgtatattacactgatctgacattgaagaaaaaactgagaaagaacaaaacttacgaaagtgtcatcaagcttgaaaggaacccaataaccacgaccaccgaatcgagtcaccgcctcctgaaccgatccgaatggaggagaagtatcgatttcagctctcaacccaactctcctaattccaggtacattagaaacaccaaccggatcaacacagaacccggaattctcagaaccgggttgaatcctgacatcatggatcccaggcgtacccggaatcgcctcagccacatgataattctgatgctgctcctctgccaatgccatcgccaccacaaagaaccaagagatggacgaattcgaagggttttaaagaggagcccttttcacttatcataattaataaaattacaaaagaaaagagaaagggaaaaggagatgaaaaaagcaaaagagcttttgaagaaggaatcgatatgattgtgctttctcgttacagagtcacactatcaccccactcggagagtgagaagaagagagagacacagagacagattataacgacgtgatgacgtggtgaattatgattggttggttgtttagattgaccggtgttaaagacaaggttcatgtgagaacggttgtatgggatggttgactgattactcgatttgggccgttgattgcgggcttattgggaattgcagtttcttctgtgtagcttttgcaaaaaaggcagggatttagggtggcatggaccaatcaatcaaacgacgacgtttgcgctgccgacggttgatcccacggatcttttgttttcacgatgttttcttttaggaagttatgggccaataataagcccatactgtttgatgtatgaatacattaatcggaaaagtaactcgttcatagatacaccaaagtaaaaaagaaaggtgaaaaatgggttaaatcatatatagtcaatgctataaaatctgtgttcatcataaaatagaagtcacaaaaatgtaattttttttaacgaatttatcactagtgaaaatatcagaatacatatgcatacttgatactttacataacgaaatctaattttaaaagattttcaaaaacaaaaaaaggggacaaacgtatggtaaatgagcagaataattgttatattgatttttggtacgcataattatcacaaccaccttatctttcacaatgttatgatttttttttttttttatggggtcacttacgtaaataagtggaaccttgcattgcatccattattttattttgtctgattctatctcaagatgaaagtttaccatacatcaaccatgattaatggctgtaatcaagtcggaagtaactcattacaaagtacctcggttttgagctttccatttatagataattgattatatgtggggttttaaacaaaattttatagtactttttaacatagctagtatttggggtttaatgtttgagcatataaaacctcttaatcaaaataatggattaatattcgacacgtgacaactacactattacactggcataaacaaaacaaaaatagttaagaaaaaaggtgacgaataccaccaatagctatgaagaaaaggcaaaccaaactaattatgtaatcaatctacagtttgttatagtgaattttattatacatacgactattagatatctttgtttacctataaccctatgtttaaatagaaccatgagcatgaaaagtaaatgtaaaatatcttcactcttttaccaaaaattatcttcaaactaaaatgcattaatacataatcaaccgtttagagtgtctataatctataagcctatagcctacactatttaagtaggctgttcttcataacctagccgtctacaaaaatatcaaaaccgaaatgcatagaactgcctaatcggttgtctcttctagtcttctgttattagaactgccctaaacaataatctgaaataaattgtagatgcatacatacacatatatacacgtagtgcatgtaggtagatgtatgaattaaataggaggagcttcgccttatatttttctaactaactttgtcttcatttctctatcgaattaaagaaaaatctcagtacgagacaatggaccacgaacgcatctcctatacattaatacgactcaactgtacatccaacggtccacactcttccgcctctctaccttctctttagtatcctacacgttttttttatatgatcatcttccaaacgacattaatagtgacatcggttttttaatctttttctttagtaaacttttcttacatggatattctagctaccactggagttcacttgatttctaggttcaatcaattgtagaaaaagttatgatcctacgttataaggagtaatacgtttttttcttgtccaatctatattaaactcatttcgaaatcaaaattgatgtgtaaatagtagtaacaattaagtcgtatacactaatgaacagtataacgcccccactcatttattatctaaccattttttggccctctacaattattttcgagtatcttatatatatgtcatatgcatccatgtgaaatttaccaatacaaaaaaaaaaccccgaaaataatacagatactacaaaaaaaataagaacaatagattaaaatgcacatgacatgtgctaacacatgacatgtgctaacacaccccatgcaaaaaaagagatcctttaattcttccgcaaacttctcttacactaccaaagcatcacttttccaaaaatagatgcgcctttgtctctcttttgcatatctgcagaagcttcgttgtcttcggatctcgcattttctttcttttttctccattttcgatattttcattctgcagataaaaacctgtctcaacgacatatccagagaggaaagttttggttacagaagcattaaatgaagacaatgtcagaagacgactctaatggagtcatatcttcaaagataatcgtcaaggagagctctcaggtcaattcatcgtcaagaatctattactacggcggagcctccgtgccttttttatgggagacacgaccagggacaccaaaacatgctcttttctctgaatcattacgtcttcctccattaacgccacccccttcgtattactcatcatcttcctcctccgggaacaaactgagtaaagcgagaacgattaaacaaactcgattcgtgaagactctgttgtcacgtcacgtgtcgcgtccttcgttttcttggtcgtctgcgtcttcttcttcttcctcttcgtactcttcctcgtctcctccatctaaagtagagcatcgtccgagaaaatgttattcttgttcgagatcgtacgttaaggaagacgacgaggaagagattgtgtcgtcgtctccaacgtcgacgttgtgttataaaagagggtttagttcatctatggggagtatgaagagagctttgtgttctgttcttagccatggatctagtcgtaaagatcttagattgatgtaatggtttttccatggtgttcttattttgattgttgttatgaaaaataggatcttgtgttttaggatccattttttctttttctttctttaaatgttttggctttaacttgcctctttgaacacatatattagtgtttgattgtgtatttgtgttcaacggttacaaaaagaagtttatcatgttttgattatttttcggttgctcacgtttgtgattttgtgaattttaatgtttcaaatttgtaaaatttgaatatgttttggtgcacttaaaatgcaatcgatcgatagtgaaattatttgttttgaatttataaattagacattcaatttttatttttattagtcaacgagacaacgacagactttatctaaactctacacgaaaaaatgtgggcgatttaactgaccatgtgccagcatttatgggctctattcattattccttgtcttgttatttcgtgttatttcactttctagattaaatttgaatttgagaaaaataagaaaacgtattcactctctcaatttaaatcgtaagtgggtaagaagcttaaatacaagtttcagtaaactaaccaaaaggtttaccatcaaaccgaaaaaacaaaaacagatgataaaaagtcattaaatagaaaggaaaataaaaacgggtaggtgttatagatgttcaagaaatttgtgacatgtaataactatgaagtaaaattcttttaaaaaaagtttttccttagaatatgcaactttttgggtgtcaaaattttaaagataccccataaattcaggtagttattgaaagtgttgtttaaaaaaagaagaagatgagattcccaagcttacgaaccagggcttgtccttttaccatattaagggaagaagattcggatgtacgaaaactgtttgagacaaagatctttgaaataacgaattcactgtaagaaaacagtgaagtaaattttaacaagaagaacaattatatctaggatttaattcttgacccaaggctgtcaaagtccttggccactcatgatcatgcgcacgtggtagaagttttgatggatcaagtctttaagtgctatcattcattgaaggggcatacgagttggtggcaaagaaatgtagtagaaaatgaagtaagaaaaaataaatggtggacgtaggcttatatattgttttccttataagagaaaatatttgtctattatgattactgttaattgaattgtgttaatttttaccatgcaactaaatacattatttcttttcccgtccctagaattttagttaactacgtagagatagcaaggcctttcaacaggagtttgaggcccacggagtggagagaaattgttacttcatgggatgggttacgttgggactactcttttaaaaatagactaaaaaaggagaaaatcaatctacaagacccacggttataagatgaaatatgtttggtgtaaagtctttaagattgtgatcctagatggactaatccatccaaaaatctgccaacaaaaaaaacttacattatcaaacgggttaatgaaagtgttatatgttttgataccacgctaacggcccagcgtcagcttctaagttgggaaaaagttcaaacgtttttttttcttttcggaaaaatgtgttagaaaaactaaactttaagtagtctcattgttgtcattagaaagaacttgcgttcctaaaaccatgtttgatgttttaaagtttaaactttgtttgggagtagtgtcaccggttcagccccgataaagaaagatatatgggttctcagactcacctataactcgcgttcaaagcttcgagacgttttgtggaaaaaaattatatttccaaaataagctgttataatttattttattttttaactcaattagttttattttccagttttcaattttgaaagtggattgttgaatttgaaagattaatctactttatattattattatttattgttaaataactttctttgctagatataaaattctaagttaaagagagaacaccggggcgacgatttaggctacaaatacgggtcaaacaagaatacatacaagtgcaaaactttctttgagtctaagcaatcttcttctttctattcgattttaaattgaaatactaaatgttctaacgtataataccaccctctttttttcacaacacactttgatatatcaccgctctgcatcttgcattcttcctcacatccgaattgtaaaatttattttttctaaatagagggaaagaaagaagagatgttgatagttcgtgtgttcttggttcatgttttgagtagggctataaggaagactattttggtactatctacaaaaacggacctagagacggtatatgggcctaaaattgatagctggataacagtcaaaataaattctatttcttttgttgataagaatgtaaatatcattaaaatgagagtacataggcttacacaatgctaaacctaaaattatattcatcagatttggtatttgttgaattctcctttattttatggtttattttctttgacgaagatcctttgcatcttccttcttctatttatgaattatcgatacgtagaacatatacaaaatacatacctaactatacatgcatacgtacatatagtctatttcgtacacaaatataataattaaatatgattattttaactcattttcaaaataacaacacatatgtatataatgatcaaatataaaatgagtccttatatacaagagatgatgagttttcttgattttgacaagaaactaacatgtcaaaatcatcaaactatcaattctcattctctcttttttttttaataatgaagagaatacgtctaacaatatcttctctaaatccttcaccaactttttactattataaaccttaaaaactatttatctatagtaaactactcagcccgcggtccattcgttagcaacggtttagtcgtttacatttatatgatttccaaaaattatgatctgtaaattttttgaatcatataaagttgaatttaacttatttaattacatcctaattgaggaaaaggaataggaaagaggtgtgctataaatgtgaagcaaaagtccaaatgcggctatgggaaaacaaaaacattaaaagtaggcattaagcacgaaatcaatctgttgttgcctgaccgatgaatgaatgactacataagtacgtataactaacgtgtgatcagattcgtaaagtcaaaaataaaaataaaaaaaccctcacgggtcacgtgcttaagcagtgaatacagctcttcagtctttactaactagatatcttcagttgttttcctgttaaaaagagagactattctggctctcgagttaccaaatcctcttttcatctccataagaaatttctatcataagccagctcatctatcgatgtatggacattggacacatgcatacactcacacatacaaaataagtatatacatcgtgatcactaaatctttcacttggtattttacttgcctttaaagccttccttggctatcttccttcgcaccctctttaagagtcacttgactttaatatttctctttttgtttctttctccttttctctgttttttcttttcttttctctttgcgattcgctgagagcatgcctgaatgtcaagagaaaggtacgaagtgaccatctcattagtgaaaccctttttctctacaatcatttagattttattccctcaactggtggatatggttgatctttaccttttagtcgtataaatattcatgctattattgaaaactaaagctcttttcaataccttttgtccagggagagatttgaagagatagggaagaagatcaaaagagaagcagatgcttggcctcatcaaatggctggaattagaagaccaatgtcgggtcctcccggaaccctcaataccattacgccttgtgctgcctgcaagcttttgcgccgtagatgtgctcaagaatgtcccttttcgccatatttctccccacacgagcctcataagttcgcttccgtccacaaagtctttggagctagtaacgtctccaagatgctaatggtaatagccatttcaaaacacacatagatatggtcttgatttatgcatgcattattacatatgtaacaataaccaactgatggtaatctagtggtcatatatatagctacgttagattgattcttattagacacatatataatttaccatagcgagaaattagatggttataaaaagttcgagattattactctgtatttcactatgcaaaccctgttaaaagaaaaaaagattaatggttttggcaaaattctcacaatgtgtaacaattccaaactaatcaggaagtacctgagagccagagagcagatgccgcgaatagccttgtgtatgaagcaaacgtgaggctaagagatccggtgtacggatgcatgggagccatctcagctctacaacaacaagtccaagctttacaagccgagctcacggccgtaagatccgagattcttaagtacaagcaacgagaagctgtcgccactttgatcgtaccttccaactcccaagttgccggatttcacaactccggcggtgtttccgtcattgcaccaccaccacaaagaccaacaactccaccacaacctacaacggctcatcctccttctccatcttcttgtgttttctctcaaccaaccacaagagacttagaatacggcaacattgaaagtgagaacaactacttcggttaaatttttattgtatcattctacaaacacatacaaatacatataattaatttatttcgataatttgtgatccggtgactaataaattaaattaaattaaattaatataagtgaacaaggttggtcttgaatagcctgtcattactcattaatctatcaaacgtatattaatattgtttagttggtaagtacgtagtactagtagtagtatttagcattcatattactgataattaaatgaggttgaaatatcgttttattgatgtacaaagtagaagtcaattggtctacaaaaaatttcatttaaccttgatgaagatgcattttgaattttgggtagcttaaatcaaattagtgagtcatacatacgaaactgagtttccctttttttttttccttttttctttatattgttggttattctagaatccaagcaacataatgttacttaactctataaaaaagctacttgcaccaaattttgtgtgtagctggctttggatctgcagttacgtgtaatatatatagtgtttcttggttgggtggaagtgtcagctgtatattaccattaattgattaattcatttagtttggtttttttatttttattttcggagtttcctttgcgtatcgaattaatcaaaatccagcttcttgctgatcggattcatgcaaaaaatgttcggtggggatgtgttttgcataatggcaaaataaaattaatgttagaaaataaccaatttgaaaattaaatatttgacccaacaaaaacaattttttcgtaaattaatcaccaaagtatcgatataattggccacagacagaattgtaatttgaagaccattgactagagcttttgtggttggacggcttatctagggtcaaagatagaatccttataggagatgacgatgtgatgttttgggtttggtccaatgtcacggttgcttcatactatggtacttaatgatcccttgtcctaagggaaaatactattccacttggtacttatactttcaaagttaacttgcttaacagatctatatcgttggttgaatttaagaccaacaccatgtgaattcgccaatgttcaagtatatgtgaccaaaggaaatcaataggttcaacaggtagaacataaccattgaacttgagtaaaccttggtacttccaacttcaagttttattcatcatgttaattagaatagcacaacttcaaattttcttgaaaaccatatatacacatctctcattgctataattagatactaagaggagatgtgtctaaggctttggcctccatttgaacacatcctcctccactaaactccttggtgtcatcatcactcttgtaaacatacttactcgctgcccacacgaaaagtcccatgttcactatcgaaatcaccactagaaatccataatagtaatcaagcctcgaatcattcaaattattcccaatccaactcttccctccacctttactcgtgatcttatcaatcattgtcaccaaaaagctgttcaagaaattcccaagaccgattccactcgtgaaaaacgttgttccaaggctctgcatctcctcaggtgactgatcatagaaaaactcaagcaaaccaattgcgttaaacacatccccaatgcctagaagagagtactgagggagcaaccagaaaatgctcataggcacaacttgtgtcggactagttatgtgaaattcctttatcacgcgcatcctcttgacctccacagccgaagcaatcgcgattgcaacaatttgtatcgcaaaccctacccctagtctttggagtaaagtaatccctctagggtttccggttttcttgcgcatgaagggaacaaaggattggtcgtacatgggcacagagagaagcatggagagcgtaacaaagcttcccaatgaagccgcggggatctggaagttggatccaatttttcggtccagcgtggtcccttgtttgacgaagagagtgttgacttgtgcccacaaggtgcttgggatcaaagtgacaagccatataaagataagtcctagcacacgctttgccacttccacttttgtcaccgtacatggcactcttgaacttgtcttaatggccgctttatccaagaacctgtaattgaaatatccatattatttttactttatctaaatgactaaatctatgaattgaattgtcattgaaaatgactttgtgacttttcttgtccatgatattttctaattctagatgagatgcaataaacttattttagcttttaaactgctatgaaggaataggtccaatcagttccaaaaacttgtttgatacttcatatgccaacaagtaaagctacgcacatttaaaattgtatcaattgtgatatcttcagttttctatattaggtagtttttgtaatgtgaaatgatttcggcacgaaactgtagtggggtgatattggagaacacattaacgtgtagaaggtgagaactggggaccatctactaacaaaattctacagagcaggtacactagattagatatattaataaaaaaaagaaaacaacattgtatatatattccactttataacccaccaccaggcaccaggcaccacacacaaaaggcataattttgatagattttttatcctatggttctattggcctatgattctctgtcaaggagtcaaactacaatcatactctcttggtttttgattcgctatatatatagtggtgaggacaaaaaaagattatccgtttatctagaaccagaatttgagataagtttattatatgagaaaataattaagagaaataaattctttaatgagatatgcaacactgacctgaagacgggcgtgtgatgaacttgatgcttaccattgcttttgtaataatgagagtcaagctcataaagctccaagtggtcatcaggacactgaagctttcggtttttgaatgccgcgataggaacttgaaccaaatctttcgccaaattgtctgttttgataaccttatgcctgtaaaatggtgttccaatatagaacacaacgagagaaaccaagagtcctacggtagggatgccataacctaaaccccatccgagattctcttggatgtagacgagccccaatgtcgcaaacaacgcgcctaagaaagagctaaacatccaccaattgaagaatgaaaccttttgctttttttcttcaatgctataactgtcgaattggtccgctccaaatgtggaaatgttaggttttgttccaccggctccaatagctatggtatagagggatatgtagaaaaatgttacttgtaacgaggaggccttgttgcataccccgttttcgcatgtcggtcttagggattttactgttaccgccattgtcaagagaatcatcccctgcaaacagaataacgatcttataaggaatcatcttcggtattttaatccaaatgttattgtacgtttcaaatgtacgtataggaattgttttttttttcccgtcaaattggtttttgtttataatgtctcaaatactctttaaaattgtaaaaatattattttaaaagaaaatattttaaaaaaaaataaagaaaattttttcgcttggcggtataaaatcctagcaactacatacattttgaagttagaagacatttcatgaatcatgagtcatgtctctcaatctgacggaactaaatgttcttcacttggataaacttggttattagtcattacttggttgagatgtgatctttaaaagtcataagtttttatttttctctagatactgataagatatgtatctggtttgctaaactaataaaattgaagtaaagtgataatcgtgggtccttttgaatatgtgtggaaaaccacgtatccaaggatctaacagaaatcaaatctcaaaaaaaaaaaaaaaggatggagttagctttcgttaactggtgccttcaagtctgacacgtagtcgacattttgatcaacgtggtcgacattaagcctgtggttattttaaatctaatcatctcagacttatcagtgccaaatgattagaaacgtacccaagttttgtaagaaacacctaacatcactttactaacactaattaatgactcttacttatagaaacatggcctataaaaacaactaaacaaggcctatatatttctttctacttagatgtcacatcagtgctgtcaaacagccgtcaaggtgatgtaaaaaatcctctgctatataagaaggaaaaacagtctgcttagcattcataccaatttttcccctacatatatggaaatttctgatccttcaagataatattctcatactataatataaatccactttaacagaaaccacacagttgtcctcaagtattataaccagtggagaaaaatgcaaatagtttttgtggcagtggatcttcttgggataaatgctcacggaccctatctgatcgtacgtccaaaacgcgacaaacacacacatctatacttctttatcatgaccaacccaaaattttttgagtaaatatatattcattgatatgaaaaatctgaaacatagaatatttaagagaagataaaagtagaaattgacgagtccattaaaactttaataagcttaagaaaaaaaaataggtcatacataatgtagactctgctcttattaattactgatatcattttcgtataattatatttcaccagttcagatttttgaactatttttaaattaatatattttgtttggttcatttctaagttcgatttcttcaaaaagttgtaaaagtctggtttagttgagtttaattcgtattttaaccataagaaataaaagagactgtagaattaataccaggacgtagatgagagaggaggcagtaaaagtccagaagcgaccgatgtatgagtcagcgatgtaagctccggctatgggagtgatccaaaccgcaccggaccaattattcacatttctaaccgaagagatcgtatcttcgtgaagtcttttagtcaaataattcactaagttcgacgctattccataaaacgccatcctctcaaacgcttcatacccttctcacacacacacacacaaagacacaaaagactacataaagatttatgtttttattttgttcaagttatctatagacgaaaatagttatctgaggtttgcgaaaacatataccgaggaggaaagagcaagctctccaacgaccggtcttggaggcgaggacgggacggccttggaggtcgacggtgccatcttgtgtgtaaacttttgcagcctccattaattgttttttctgtttatatcaaaatattttttttttaaagaattgtttttttatgggatgtatttggtaatgttgtgagagttgagagaggtcaggactgtgaagagagagactaaacggaaataatttaaggttgcattgtgtttttttttaatgggattttgaacaaacaaaatgagaacaagtcttagagatttgcttagtttagctattgccttactctcctcaagtatgtgatatatataaagccaccgctagattttttgtttccttttcattaatgtcatcatcatcacattggtcatgtaaccaccaccatcatcatcatcagtataaatccttggatggcatatacaattttttaattggttcattgtttattatagtttaaatatggaagaaaatacaacaaaagtcctatgtatatttggccgaaaattctggtcagcaacaggtatccaatgataagaatcactcaataaacctatgccatcctctcaacaacaacaacaaaaacttaataagccgttttgaatttatcatattcttttgtattactttatgccgtactatgcttgatgaaataagcgtttttttgttttgtttttttctgttaatgatggtaagcgtattcgtatgaaattgaccgacaatactaaaaatactcataggaagaggcgtataaaagttgtataaaaaaatatcataaatatttccaacaaaaaatgtctaaattgtatataaattttagttctctacgtttacaagtatatatagtttcgtctttcgtcatattaaaaaactcatggtgttttctactagattttcagaataaagtgtaatacagtaagatttcacattactgcgagttagagtctacattttccgagttacttaattaggtctcctaattctatgagctacttaagcctcatcaccagaaatacatccaaccattttaatactacacgtgcagtatatctaaggagcacatggaaaaaataaatgcactattgaattggatttgtacgaaatacaaataaagttttcgttatttttttatagtgaaactaataagaacggaaagttgaatactatttcattcgggtttcaagttctttttgatactatgatcttcaaaattgagtcctatgaatcaagacaaaatatccggatattctcgtcatagaacaactgtatgtatgaggatgacctttttcacttgcagtagttgccgacctagaaatttatgacaaatcaagtatcttggatcaatagtaaaatttctgagacattccattctgtttcaagcatgaacaaatgaagcttgcagtgaaaatcaaaagcgactgtggtccaaagacgcgtttgatgcatccaataaaattggaagatggagaaaaaaaatatagtggtccaaaaagcttgcgatatcttgccccaagatttaagccttgatgtcccttgtcattacaattagagaaagggaaacatgcatggaacttaatgcatccactttaatattgaagcaatatcttacctttctgtaatttcgtaaactcatcactaaactagaaacatttttacatttacttctttcatatcacaaacatatcatgatatagttattatatatattctttttaacatgacacttaataggatgtttattttttacttttggcataactcagattaagttgttatagtttagtaaatagtattaaaacgaggtatattaataatttcaaataattttaaaatatgtcaaaactatttttctaggacacagaattaatggaaattttttcttttacattgggtccatttcgaaatcccaaaattgtttgaaaaaatgacaaaaatggttttgttatgtgatgagctcagatattatggagcgtgagatgctgagaacaacacgtaacaaacataaccaaagaaggaatggaaaataaatatttccaaccatttctgagatttgactttaccgtaaaagactgcccaataaaatgacattgggtccaaaatccaaataatgaaaccacgtgtttttttagatgcaataactcaatggtatcattgtgttacaaaggattgtcaaacttatttctaacccaaatgtagcaaaacaatgtgtgagattacgttacataaataaagtttgttaattgttaaccataacacaaactctaaagttcataattccggatattcaacaataatactgaatcttttcatgatatattctggttctgcgggaatcttatgcagtcgcggttcgccgagactgtgaacagtcccaagaagcaagtccaggtacacccaaaaagcctgacggttaatttgttagcatatggtcaagagccgtgataatggagcaaagagtacaaaagaagattaaatgatgacaaaagatttgcacgagggttaaggatacgactgaaaacgatttgacaggcttgctttgttggcctcacattgcaacttgcaaagaattgaaacatgagcatgaggtaacttaggttttagctattagatatctatgagaaggacattgagagacattaagggttaaacgtataaccactaatagaaaaagattctttctcacttcgtacatttctcttgactataacaaaggcagtgccaaagtggtgcattgtactgttaactgttaaagataatgtttcctacagattactcgatgcgacaagaccttgctgtttccaccattcataggttcctaagctttctattatgacgtgttttgtccttccatatgtctatttacaaccataatcatcttttgtatacacaaagactgtggatatgtgtgtattaatggcccagtgaaacagagccaatcacgaaactttgcttgtggaccactcttctatctttttaagggtgagaaacaggaattttatttactataggcccgccactagatgtaacctcctctttttgccagatcaaccaataaacatcttagtagtaagctcttcgctgtttgatatagtcctcagggatcgtatgcaatgaaatatcaaagttaaacaaaagttagattttagggagaaaaagcttatttaccacacatgttaaacaatttgaacccatttaagggtacatatgggaaatgttgtcaaacactactatagtggtgagatgcaaattataatactagaatatctcatgagaaatttgatgttctaaatataacataaaatggaatctaggcatgctctcttctaactaggcagtgtactagtctctcagaaatgatagcagaacactattatcagtaaagtgaatgacacaaaaacagcaaagatatcagtgtgtaacagaagatacacaatgatcattaagactttagattggaacaaatgaaacgtacatatcatgttataaaaatttcaaccagaatatgtcatggtgagtaaatagctacagattcctgaaattccttttcatgagtgctcgtaagggttttgttctattttcatgtgctcattgtgtttacttcctgtcacaactttcgatcgaaaacattaacaaaaattaggaaaggctcatacccataccaactatttgcttcaaacaattcgatgggtgtgattactttcatggatttatctatcatatatgttgtatactgttacatccttttcagaaatagaacaagccacaagaagataaagaagcataacagattaaagctgtagcttggttggccattacagaaggagtttcttcaactcctttattcttaatgtgtaaacagagaacagctcaacaattttgtcttcaggttcccaagagaagacgggagattcggctaggcttattaacgtaagaagagattcagacgacgttgggacaatcacaatgatcaaattccattctccgtcatctgaatcatcatacttcgcattcctctgttttgcgtacaatttacgttactcaattaattaattggaccggtttaagtcgattgttttattggcctttgttggttttggcccaacagaagaatgttttatgggtttagtttaaagcccatttggttaagtatgttagtttagttgaggcaagctgcaagtaaagtagttggtaaactctaaagctaggtttttaacctttgcttctaatcttagactacaaaccctaaaccattggccgcgtaaaaaaccattcctcgacttccgccgtcaatttctcctggataattgttctggtacgcgaataatacatagtatagtgccctaacataacatcgaccaaatcacattcaggttttatatatttggtttgcaaactgcaatggctacacaaagcaacaaagaggctttcttaggtggatttaagaaactcttgaatgaacaatggcaagccgatgtacgtctcaaggcaggagacagtgatgagactacatctattttcgcccacaagcttgtcttggtttctctacttcctcttctcttttatttatcatcatccaattatagggaaaagttacttattgtgtagcaatgtttttgagagtgtctcttacttgggatgtttttcattgttgacatgaatggaatattgaataggtggcaagatcagaggtgtttaagaagatattggaatcagacgagttcaaggcttcatctaaacagatggagacagtcaccctctcggagatgaaacacgaagaattggaggcttttgtggagttcatctatagggttgatggctccatttgttctgctagtctcaagaaacatgctcgttcactctttcatgcagccgacaaatatgagattccgcatctaagagacctatgcagaaacgagcttatatcatctttgaattcgtcgaatgctcttagcatccttgagctcgcccaaatcccttttgacaaagccctcaatgatcccgccttcactactatcataaccaatataagtacgattgctagtggtgatgagttcaagctgtttgtcgccaatcacccaaatcttgccgtggatataatgaaggcttctataactagactaagtactagcagaaaaatctgtggttactgtaatcgctactactaaaagaaccatagcgttgcttttgttgtttcctttctcattttttctttgttaaattgtttcatctctttttgataaatggttttatcattttcaagtgatttgacataattgtcacaatatcgacttcgcggatatcaccatttgcatagtatccatagtttgccaatttgtgtctaaattgtgccgcctctcagaaagattaatgagcattgggataagaaaagaaaaaaagcaaataatcaatcttgacactaagttttgatttgtttgatctcttagttcttcttatgtccaaaaggaaataaacagagagattgttaaaaagtttaaagctcaatttgagcaagcttttttttttttttttttcgtcgcaagcttttttagtgcattcctatcattctttcctgactataagtaaggttcctattttataaaatcttagctagagtcttttagattcttgtttagtgtgccatacacagaagtgcaagagacagtaagaagaggtaaacaaaccataacacaaaacttaaaattctgtattcgtctgataaagtctcctattaatgagtgcaaattaaattccgagttctaatgtattaatgtctccttgaccaaatccaaaagtcttgggaaaagaaagcaaaatagtaattttgaccgcctaggttctatatataataacccacaatcgttaactaaatcatatccacgatatatactttaaaaacatggcaacagaaaccaacaaagagcttttcgtgggtggatttgcaaagattttgaaagaacaacgtcaagtcgatgtacggcttaaggcaggggacagtggtgatgagggtgcttctacttctgcccataagcttgttctggtctctctacttcgtttctccttttaaatcatcatctaatttcataaagaaattcatccaaatgctcttacttgaactgattttcattgttaattaatgctcttttcttgatataattaatagtctgcaagatcagaggtgtttaagaagatgttggagtcagacgagatcaaggcttcggctcaactagagacaatcactctctgtgagatgaaacacgaagaattagaggctttcattgaattcatatacagcgacggctctatgctttctgcaaaagagaagcaacacgttaggtcactctatattgcgggggacaaatacgagattccgcatctacgagacctatgcagaatcgagcttatatcatctcttaaatcttcaaatgctcttgacatccttgagctcgcccaaatcccttttgacaaagcccttcatgattccgctttcttttttttttttttttttttttttggataacccaggtatcccaagcccaatgggctcagactagcccactgcgtgcgtcccgaaagcggcaagagtagttcctggaggccgcatagcccgattttaaattgtctgcggtggccacttaaggtgtttgcagccgtggggattcgaacccgggattattgggaatttcaccctcagcccgaaatccttcctaccactggcccacctataagtggtttcatgattccgctttcactaatatcataactaatttaggtgcgatttctacttctgttgagttcaaggtattcgccaacaatcatccaaatcttacagtggagatactgaaggctttaacttgtacgacgagtgctagaatctgtagtagatgtggtcgctgttgtcagtgctaagcaccgaggttcccagggttccaagacttcgcttaatgcgaagttgagattacgagcctttccaattttttcttaaataaaataattccgtaattaaataaatgattaaatacaagtactaatataactaatacataatttttctttcttcatttttaactaaatttttcaccaaattctcataatcttatgattttttactggagttggatacattctcaaagacatgttgttagagattttttttatttttattattattattaaatcagcacaatcatttttttaaacgaaacaactctaaagatgaattagtatatattaagttaataaatatttagaagcgatgaagcagggaaatacttttctattgctggttagggaactagtctcctaaaaaaggagccgatcaatttgctaaattgctaactgtttggagtaatgactaccatattcaatccaaatgcacaattagacttatgagtaattagattcaaccactgccaatttggtcattagtttgatttgctcacaatttttcgagtgtcaactatatattaggattgtagagcgttttgagatttattctgagttttattaagtgcaaaaacgagattcgcatttagggatttgtaaaatggaattttacaatgttctagtggatgaattttgcttataacattatattttgattcacagaaaatggcaaacaagattgaattcattgattcatttgcgaaatactggaaagagaaagttggagtcgatgtactgcttaaagcaggggaccaaacagatcctatccctgctcacaaaatcatcttggtatgttctttttctcttttcaaaattttctataacaaaaaaaaaaacttgctagctagattcagctaaactgttaatggattgtgttttacaaaggctgcatcatcggaggtgcttaagcagatgattgattcaacttcatcagcaagtgatccaatcactttttcagagatgactcacgatgagctatatatacctttactgagttcatgtacaaaggttacctttcggattcaaaactgttgaagcacgcccgtacactacatagctgcagacaaatacaagattccgtacctccaagaactctgcagtaaccagctcattgcctccatgaattcatcaaatgcattcaatgtcctcgagcttgcagatattctctaggataaaatcctaaagatgctgtctctgactttatgacaacacatattgaagaaatgttgttagaagaatccagtttggctttataaaccctaattttttctctctaaaagtcttgttaataatcataatcttatgccatgtaaaatcagatgatcacgtacacttagttgtgcttaagtaaagtatcaatcgtgggacgaatgtgtagaacggatgtatttgtacgttttactttcccgggtttctggagttattttgctcacgtgaacaaaaatgcttgtcttcttctgttgtagaaaacaattttctctaatatcttctgatcaaatccaaaatagtaataagttttagttctctgctaaactcagcttttttatttatttctgatctaatttaaaatgaacaaaattataactatctcagttgataacttgatatgttaggtgatgtaccttaagaacgtattttctattgcttacgtgaaataaataaacatacaattgatttttcttcattatcccttttcacggggaaattctggactacaaaatggacagaagaaaaagaaaaaagaagaagcagaaatactatagaaactgtgttatttccttatattttgtataataagaaataaattatatataaaaaaaaaatgaaaagtgggtcaatctagttctgtggatcattgatttcaccccagctcctgattgcatcagtcactgcctgtttcactgcttcagcatccatattttctccatcttcattctacatttgtattattaacagtgacgtaatcattaaaataattatacatgccaacacacacatatcgacatagactacacatgtttatattttgtattcgtgtgtgtgtttgtgttgagattgcccactttttattataattttacaaaatgatttttaaattttcaccagcatgaatttgaatatatttgtaataaagtaagtgtaaccacataagatttcgtaaacatatatgatgacaccattgtaaaaaactcagctcatttgtatcaagaacctagctcatataaacactagtgtgatgattagttaattacctcgagtcccatggcatgcaagctaaaagagtcggtacatgaagccctagcttcaagaacgttaagcccaatatcctcgaaggcttctaataccgaaacaagcatccctggctgattctttcctgagaacacgtttatcataaaacccttgtctagggtttccactgttacctataaaatttcccaaacaaaaagctcttaatgaatctctcatttacacattaatcacattcgtacttaaatatatatgatggatcctaaggaatatttatatgttttcgattgtttgtaccattggtgtttttggatccgtgggctcgcttgaagattgctctgcagtagggtcttggttgaatctttcgactttctgcttaagcttttggatatattttgatgcatccattatgatcgatgtatcgttttcctgtcatcaaaacacgtgtgcccccacacatatattagtagcatatacgacatctcaaaatctagaattataaatttagccgagaagagaattcaacttcaaaggcctatatatcttgtttgtaataacatatgcttctatatatgcttagaagaggatcaagtgattacctaaataactaaataaaaaaagcaaactggaatatagaagagcaaaagggattcaaatacctaagctgtgatagaaaatgatccaaagggaacgatcgaaatcgtgacagagtgaataataataataatctatatgtatattgattacgattgtatgtgtgagatcatgtgtgtgtgtgtgaataacaagatttatatatgtagatatatgattgcgttaatctccgttggaggtaataaaaatagaaagaaagagagagtgatgtaataattacagcatgtgaattagtgattgaacgaagcaattgaaacttctcttgcaaagaacctctcttctgttcccttgaaaccattcttcttctatgcttttgattagcctcttgtttcgtgagttttctcgatcagtttctgtatagaggaactatgtgtaaatatgcaatatatatatgagaaggaggaagcagagatcttagatttaaattgtttataggatcctctcccctctcacatgtctgccttagtctctcttgatcgctacaaaatataatatacggacaactccgatttgtatctcgtgaattacttgcttgcctctatgtctcaatagacgatattctatttaatattccacacaatttttattttgttttcttatatgaaatatactatcttatatttatacagtatttatatcataaaaatacgtacccttacctaccaacttgaatcttgtaaaatgtagattaatcgctatgtttttataatcgatgtgtatagtcgatgaaataccaccattttatttactttaaatttactgatgtgattttagtttcctctttgtcttaatactgttctaacgcctccaagaaaaatcacgataattgataacaacagtcgccagctttgaatttttggaaacggatgaaaacgtatatgattacaaaaatccatttatcgactcatattgatatgattgtactcttcaaattcatgtaaaaagtatgtgtatgtggatcatacaaaaggactttatcatgtatgtatatatactaatagagttaaaaagaatacatattagctatagctagtcattgaactataaattctatatgaaagtaattttattttaatctatacatatatctaaattaaatagaataactagcaaaatgacatcgccatctcttttttggatatgcaatttctattcaaccgcgagttaaaacatatgcaagtaccattaccaactcgttatgattgtaacaagaagaacaaatcatttgaacttgggatgactaggtgacggttaaatatatacatactctatatgtatatatatgggccacttacataatgttaatatatgataagtgtatagatagtaaaagtaaaaataaaatgggacgagaaagggaatgatgagctcgtgatatatgggggactaattaatatttgtgaaatgaaaataaaatttgggagcatcgaaagaagtgaaggtgaggataaaagcaaacaaaagaatgttagttgtgattttggaatgcctccaaacactcctcacggggatctttatgaacaaatacccacacatatatcctcctctctctcttcacctattcctcatctctccttgtcctctctatcgcgctctctttcgttctctctctatatgtatatgtatttgcaacgccgtatacaacgcgtatatgtggatctatgcattagcaacataaatcccatttttgaacaaacaccaatgtaaagtcacatctttcaaaacacatataaaggttgatgcctaacaatttgccttcacattacatattgaatgatttgatggatcaatctaaaaaacatatctatttagatcgagttactcgtcaaacttatatatgtatgcatatacgaataaatttgtatatttaagcgtatagatatatgtagaagtatataactttggatagattagcaatggtataggatatagaagattgtatatattggagacggacaaataaacgtacccaccatttcacatgtgtgccaattaatcatcacaacacaacaacactcacacacaagtcccgttgcttcatcaaaccccttttctttcacgtctctagcttcattcatttgattttattttactatttcatctcatcttcctcctcctatacgatctgtttcttttcttttctttaatttagggtttggtgcaaaacccttgattgtttccacctctcgtctactacatgatccatatatgtgtatggttcgatagatatctatattataacaaatgatcactaataagtcaccatatatatgataaatgtgagtcacataatcacaattgatgtttgttgttgactgacttggaccagaaaccacatcatcagggttccaaatccaatttacataattgctgagtctatacatattgttgatcggtttttacattttgtaaaatgtttatacataagagttggtatatgttgtaaccgaagttttaagctgatgattagaattatacatgatgggtttataactttatatatgtgctagaaattttccataagctttatcaacactgattaattaacatatacataattaatgtagttggattatctatgttcacaaaccgtgatactattgttttcttcttacaaacatttgattggaaattaaaatatacgtggaataaatgagttacactatagagaaagggtcgctatcgacatctgaattctaatggctacaaggagttaccttgtcatcgtttcgcttctaaaagttttggcttagaaatgaccattttagaaagacaagtattttcctatcatattatctattcatttaatttatgtcattatgtaaatatatatttaaaaagaaatcgtaaaagagtctcgtgtttgtgacagctatatctcctttgtcttcccccccccctccccccccgtaattatatatttacccgagacaaattgagattagtatcattttggtttttacaatatgcacataaaatcatgttataagcaaaatttaaaaaaaatatccaatattcgtacactcataatcagtagttccacttgcaaaacggtcattggtttgtttcctacatattaggaaaggattctgattgtacttgtaaatttaaggctaacataaatagttaagtatacaataacttagagtggtcactcgacccattatccctagtcctagttttagtataaatatggcataaattttctaaatggttatgaattttagcaatttgatttttcttaatataagaatttgacccaaaaaaactttgtagtagcatagttttgttaaaaacgaaaattgatcttttatatgtagcattaaattagtaaggtttgtttttcttcgaaaatatagtattagttattactaccaaaaaacggaatttataccttgtttttgagaaaaagtgatgtcatcatcaaactaacatttgattgttctctacaaacattacatttatacacacacaattttttttttttaagttcgtatttgaatatattatattttgttataaatttggacatccagaacaatacaaaagcatatgtacttatatacacatatgtttcgtcattttaaaattcattacaattatatatatttaaacaaaatcacaaatgaaaaaaataaaaataaaaataaaactaaaaaatatgatggtcctatggaatcgtaaatacgtatgcagaagtaaaatgtttagaaatataaacacggtttttacaaaaacaaaaattagaaaacgcaagaaccttaaaatccgtcgaaagtatcataagttacataattcatgtttgtcaagactcaagacaatatggtgtatgaatacaatcatatccattttattatcataattctcatgtttgaatgtccaaaaaaaaaaaaaaaagaggattttcattacgatcatcatcattataacacgtatatttctctctcgttgtttcttctccatgttggcacatcaatgttaaggacgactcattaattaaactccaagatataacatatcggatggaccatacgtgggatttagaagagaccaaaaggacaaaataatattgaacatatcttaagaagaatttacaataatatgttgtagtcagggtttagcaatttgatctaccccactctcctcttgaatgtgacaaaagaatcaaatgagaattaggtcacgggggcggctttatgctatcaaacatcacttgttttttttcttatctctcgatattttttgtatagtatttgatcaaataatagacattgttcaatcatttacatcctcatatatatcaaaatagaatactgctgagacaaaaaaaaaaacgcgtttatcattaaggttatgactacatatgcttacatgtacatatatatgcgtgacgtttgcatgcctaattataaactagttataaccaaaacttatttgttggaatcccacaaaaatgggagagaactcacgttaacaaaatatatgctcaagtttaacatattgatcaatgttgtttatttacattagaatcagacgatgtccgattttccgtaatgatcaatgttatcacttcaatttttttatttcactaacatgtaagacatgataacattttatactgtgttaatctttttatgataaaattttagttttatgtacttgattttttttattttttatttactaaatactttgatggtttttctgtgagtatgaaaaagtgttattgttgcaaaatgaaaaaaagtagtatataaccaagaaaaaaaaacaaaactaaatatatgtggaaaggaaaatgaatgtacgtacgtcgtaggaattaaaaagtatatgggcccattaagaggaaatggagaaacgtaaggcccattatgtttctctctaagccctacccctagtgtgtgtcctcttcttcaatcatcatcttttcgataccgaagcagcaaccttcgcgccgccgagagataacgagaaaaaatggggaagaggtcgaaaacatcaaggaaagggaaaaaagcatggagggctaacattagctccgaggacattgaagatttcttcgagaaaactaccagagatgctctctccggtggcaatctctccgctgctcccagcgaagacttgttccacgtcgataaatcccatggtttgttcttacttctctctctctttttcagctgcaaagtttcaatttttcgatacattagcatcagcagagtaagatttgatgaagattagttatttagctgcttgttaagatttgatgggagttatgagaatgtttatgatgtgattggtattcaggaagtaaaagagtattattaatgtttgaaagaaggctttgtgaatttgatattgatttgattttgcttatcagaccttccggtgaagcgaaagattgagaaacatagagagagagtgctccgtgttgacagtatcttaaagaagaatccatttgtccagttagtgccatcttcaaagccaaagttgaagaaaagtaagaagacaatcgttatagaagacaaagcacctaaacaagttcaaaaagtgagtcatttgatgatatgatttcttacatctataagatatttcagggatctgatttcatatgatttctcctttctttgcagagtgttggtgacgattctgtaatggccgacttgtggggtgatgatagtaaaggtttgcttagtcaattattctgctttttagttttttttcttcttatctatgtcatgaattaacgtttccgtttgcaaaatatttacttgcaggagaacatgagagcaatcctagaaaggtaatgtgtcttctgtacttaagttgtttgcttttgttgtttctgtattgaaaatgttagttggtgttagacagttactcagttggctaagaacttttgtctggtgtacagattttcaaaaatccttcgattatttcagcagtagaaattgaacatccaggatgctcatacaaccctacaactgagagtcaccaggtaataatttattatgaactaagtctcacagatttgagcttgttttatcatcctagtcttgtgtgtgaatcttgcattcacacctcttttctgtattgcaggatatgttggctgaagccgtcgctcaagaaatgcagaaagtttacaaaactgagttagggcctgcacctgttcctttgactattgaaggggatacactcagtgaagatgaggtgagtcttttgcttgtatgttataatataatcgatggaaagatgagcattgaatttgatagtttaatccatatggctgttgtatttaccatctcagaggtactttcttgatgtggacaattttagtgaaggcgaagataatgaaaacgttgagaatgaagtgtcagaggctggaattaagtaagaagctctcttatttacatgttaacataaatttgtccaagagaaaattataatttgttgacttactccatcagcaaagagttggatttcatgttttttgaaattcttatactgcagattaaaggagaacccatttgtccagttaaagccatcttcaaatacaaacttgaagaaaatagaagacaaaacacctagacaagctcaaaaagtgagtaatttgatgatatgtttttttacatgtatgagatgttttgtctcgaactttttccttgggagattatcttcatatgatttctcccttctttgcagagtgttggtgacgattctgtaatggtggacttgttgggtgatgatattaaaggtttgcttagtcaattattccactttttagtttcttcgtaatcttatctttttctatgtcatgaattaacatttccgttacaaaacaaattacttgcagaagacctgaagtactttcttgaagtgggcaatgttggtgaaggtgaagataataaagatgttaagattgaagtgtcagaggctgggaacaagtaagaagctctcttatttacatatcaacataaaatcgtctaagataaaattgtaatttgttaacttactccctcagcaaaaagttggatactcatgtttttgaaattattgtactgcagtgtctcaaggaaaacaaagagggttacccgtgtggaattaaataagcgatgtaggcaaaaggcactgcgaaaaaaagagacaaaggaaaaggctaaagagaagatattaaacgaaattgacaggtatcttgtgattttaatatatcttgatgatgtctgattacttataaaatcacgcctagacaaaatcttgttttaattatttcgttcctgtttttgcctttatagcttgcccaacatcttagaagaaatagccaaagaagatgaggataaacagaataaacatttacgaagggtcatcgccaagcaggaagtgctgaagatacgtcctcctcggttgggaaagtacaagtatgaaactaaatccttctttacatctatacatttctgttatattttcaagcttactagtgtactcattctgatcaattatatttgtagttctgaaaattggatttttgggatattgactgttgtttgtttcagatttgaggctcctccagttcaagtcctcttgacagaagagatgactgggtcacttcgtaagctgaaggtatgactccctgttccctgaaaccaacgtttttggtccttgtgaatttcttggtagctaaaaaactgaagatgtcatcctttttatttaaaaggcatgttgcactcttgcaagagatcgattcaagagcctcgagaagcgaggaatacttgttccctcaaaacagattagaaggttagttttttacggcaatgactcatagagtgaaataacgtaagaatatactgagttcttactatgatcatgatttgtgcaggttttaggaactcttctcactgtctgcagcttgtttgagaaaagcttttggaagaaaacaacaacaaagactgtctcaatcgactcatatatcttgtgttttaacataaagtttgttttactgttgtcaaattttgagtttatgaaaaaaatacaaaagattttgctaccaatctttctgcttaatctctatatgaagtattttagttcgttgcccgtgaatcagctaaagactggtgaaggaaagatccttttgaataacaaaaagttaaattttgtacttaaatgtcattttacgagacataaagcatagtgagtgttggtgcttaaaagttaaaactctgcttcaatcttatacacacatttttcctgaagttgctattataatacacttcttacaaacctattttacatacaatagacatgaataaatgcaacacaagctctaccatctaacaaatccttgaagagaaaggactccagaaagcgtttcatgtttcttctgttgctgtgaaagtgtatatatttgtcgaaatagcgatgatacttgtggcaacagcaagaacaagcattactgaagctacaatcttctctcttaaagtcgagaaaccatttacattcctgccagtttccaaaaacaccaaaacaatggataagatttaaactttattcattcagaattacatgagagggattaaccaaaaagggtaacataccgtaggacaattgcagctggaaagatgaatgctatagagactgtagaagttgatcccaagaactgaaagaagtaccaaatgtctggtatggcaattgcacccaagaaacaagatatcagtaatggaaaagtgagtgcgaagaatcttttgttgtcttccactaaagaaagctt

SEQ ID NO: 357 - DNA, 75198 bp, Arabidopsis thaliana
aagcttacctcacccaagtgtccccatttccattgatcctccattttgatgcagcaacagctcgattcaatatggctgcattgtgagattatctgaaacattgtagatgattcgtatttgatatgataagacatcccagattcaagaaacatataaaatgaaggcctcgggtttcttgggaattcgattgaactgttttttctattgttattacttttctatagtgttatctgaaaatttacataatacagtgttcgaagcaaactgttgtggatgaatcttgctacgtagctatgtacacatagtctcaatcagtaatgcaggccctttcactcgaagtagcaatatgcaataatcaaatcttatgcagtctcaccaaatctatttacatagacatggttatgtacagaggcttagaggagtgagtgaagcatgagtctgacttatcacgggcggttgtccatcttcataaagtggatatattccagttgccccatctctcctccgttcacgggatcaaagctgcatcggtagaaactgagacaagaaaacacaagtaagcactaagccgagatctgagagtggtttttatagatgcacaactagtgtacttgctctggttaaagattcctggtagtgtgatggaaatacaaagtgaatgggcttatttgggattataccttccatccatgccgataatagcaaccgtgttgttactgccaaatgctgcgaagaattgtgtgacttctgatacatgaaactgtgcatatgaccattccgagctgaaatactttggtagaacacctgcaacaagagtgtacatgttaggtaagaaagagcgaacgaatttttaaggcttcaaagtagcatttcaaaaacaccattcttcccatttctacattcatggaagagataataaacaagagaaagaataacgttaacaaaaatgtataatcttaacaatcctgcaactatgaagggagtaaatctcttggacttagctactacatagtcaataaatctcttggacttagagctactacatagaatttttccttacctctcataaacgacaatgacgaaccgggattggtaccaatggttggagaaacaaggccttgcagagaattagaataattttgttgtgtcaacagagctccattttcagtggaataagaatcctccccaacaaccctaactctaagagagaaaatgtgaacagtccccttgtcacttgataccgccagccactgcacatttggtgaaagtgcaatgctatatatatctgctctgtcgactcctcttcgtacctataaagaaacacctttgaattgttagtaatgtaatacagtgatcaaagcaaaccagtatctgatatttacctcttgcaaacgagttccatccattgtgttgaagattctaatcagagttccctttgtactagcagttgcaagcaacaaaccatccaatgtcaaggtcatacacgcaatacttgaatcatgagcatttatgatttgtaccatgttaagcccgaaatgttcaacacgaatctctcctcgattgagaccagggcaagccaacacagacgtattagaatgatgagaaaggcaacacaatcctctaggattagcttgagtttcaatctgatgaagaagtctaagatccataaagttataaacataaatcttatgttcaagaacaacaacaatccgatcccttcttaatttcactgcacgaatctcagacctaaatgcaaattcactaatgcaacggctctgatgatcatcccaaattagtactttgcttgaaggatactgagagttaggtccaccaccaacaagtgccagtatattgctacggaaaagcatctctacgattttaaaaccaccgtcctttagctcacgcctgaaagtttctttgaaaggttcacagttatatatacgaaaaccatgactcgttccagctgcaaaacaacttgaatcctgattccaacacacagaaactaactctgcttcctcttttttcatagattctgattctggaagcagaaatgagcctggttgcaggattccttggggatttgaaacagttgaactcattttttattaacactggacctgaaagatcaaacaattaacataaaaatcgaagaaaattatacatgatctttgattcaaacattggcaaggagactaacggattctcaccgacgaaacgagacgaagaacacgagatcgaagaaatattgaatctccaagcttcgatttcaatgacgaacacgctctctccagagttgctgatttttctcaaaatgacttctctctgtaccggtaagttttatcttctttcaaattaaattctccggtttaatttacttttcggaatttagtcggttggaaaaaaacaataatgggctaatttaatgtacaagtgggccgccagctattgggtctttattcacccatctggtaatattcacgtgtctgcgttttcttaacttggagatagaccctcgtgtcgtttttaaatgctggaagacaccgtcgtgccgttttcggattagtaatttggtaaatataccagaaatggaaaaatcactttggagacaaaacaatccatatttggaaaaaagtgatttggactatgaaggaaaagtgagaaccccaataacactcactttgttcaatgcgcacaaatagttaaagaaagataaaaaaaaaccacagtttccgagagagggagacatggacaaattatcacttgattctgtttttagttttaagttaaactaatagtctcacaataatctttcttttgttactaaattactaaaatagcaagttgttgacaaacctcaacttttttggttttctcttgtatttcatgcatggtgcaagtttggcaattcatttaaaaatttcatcaacaattataattaattttcttattcattttcattgtagctaacgaccccatctttaacaactagtcggtatgtcaattcgaattcttcttaatctcaaagttacgagaataatagaagaaaaaaaagattcaattcgttttgtaaccagggagaaaaacgttttacacaagattcattcaaattaagagcaagaacaaatagtagattccagattaagttctggagagaaagtagggatttttttcccaatcttgaactcgtattgttcctttcgtttcaagtttttgtatcaatcggttttgtagttcttttgtgaacgagagtgatatattatgagattttgagagcctttaattctcactaactttatcataaactgcaatatagagagttgtaatgtttgcattttgattaaattgtcagacattatatgaaaacataagtttgtagtaaactaggtaactattctgttttagtacatgtatataatatttgtactttttggagtaccactcaccaagaatttgggaatattacatgcacaaaaactctcgatgtacatgaagcttaaaacgtgatggggtttgggaaatttcaagggaaatttaaactattgttttgctacacgtaaaaagatgaaacattttgtcggtaaccaccggcttggcctaaaataattttctaaaccctagatcatatatattgtttaattatttcattccctcgaacaaatgatgctgtaatgctgatgccttttctttttaatataaactaattggataatcacatgatgagaaattatccgtatattttttagcaagggtccatatacttgctgcatttccatatctgcattatttcatcagtcaaatacatgagccacacaaatatacctttgagacaatattaaataaaaactcgagatcgtgcacgatatctatacttttttatgtgtcgacctttatcgaacaatgaaaaaccatgtgttatacttttttatgtggtggtttagaattataaaaatcgtaatggtttcaagttttctatactattttcggatagatattgtcatcttattcatatatggatatccccttacttttttcggcatcatcagttctttgaaacttagttcagagacgtacggttccaatataaaaaatcaagaattatgtactagtgtagatatataattataaaagtcgatatctaacacatatagcatataaaaagaaaaaaagatttcaaactgtaaatatctttttaaccagaggacgatgtaaagtcgtgacccatgcatggttccaattccaatcatcgggaaaatacaaattacaagtataaaagtctttttttttttggttgtcaatttaggtataaaagtcttacattgcaaaatacgaataaggcaagaacacaatcgacccctatgtatactaattaataatatctctcaacccatcaaataaatcagggaggaaaatgtgtactttatacatgttactacttactacactgcccaaacacaacattacgtattattattataataattattattattatttaagagagaccatcgtaatatatccatagtcgtcataaccgaagatttgccttagaatgtaatatatcattcaaagaaattaagctttacttaataatttaaccccaaaaaagcattacttttaatatggctataccttttaatgcaaccctgtagcgagttagtggctagattctccagcacgtggacatgactcaaatcctaaaccatatggttaagttcttttgattcatccatcatctacaatttgattaatcagagatgatgctcaaagaggttgaaaatgcaaatccagtttcagttcaattcggttttgaagttgaaaccattgtctttagatgcaaatctatactcatcacatataaacagattatgagaaaaatgaaaatttgtagaaaaagaaggagctcccttcagtccaaacacagataaagaaggatcaaaaatatctcccgcatcattcacacagtcactgcggtttaaatttatcgtttctctaccacgagtgtttggatggatgagtcggcagatatttctaccctcttctttttctatccatgactggactgaaagaatctccttctatatctatctattttggtcttgattcatatatatacttttgaaacaatgaagggccacacacacttatgaaaagcaggttattctacagaagaatacattaggcatgaatagtttcaaacacatgcacttattgctttaaatgggccatcaacaactagacaaaaatgtgaccaagacaacttcctatgtacttatatttgaacatttagtttgaaaggttattgcatgtacttacttataaatgcatcagctagaaatgaattagaatgtcaacttataatgtaataagtatatatgaatgaacttaacttacaaagtttggatggggagtttttcttttgaaacttcacagaaagaaccaagctttactgtaaaagtaaaactactgatgggtcttgtcaagaagaggctagcaagagagagacaaagaacgaactgttcatcaaacattgaaatcataaaaaacattagtttttttctttaaaactttgaaattggtttctgagtgatgtaagccctgtgcgcagatgaacagttcccgtagtaataactacattaataataactacttgagtaaatatatacctaatcagcagacaagtccaaaacatgtgtgaaaagattctaccatagtcattgcagatcatgagaaataaattaagaaaatatatagaaagacttaatctaaggtaatcaccttttagaaaatacaagctttggaccaagaactattcagttctttttcatgagatctcggtttctggagggtttgtgcaagagattgaagtccaaaatcagagaaattgcattatatgccttcaatttggacaaggggaaaaaccctaaaagtagagaaattgatggaaagcacaatattttcttttctgtggacaaaggtaaagaagaaatctgaagcgagccaggaatgattatataaatatagaccttaagacaaggagaaaaaaccctaaaggcagagaactgatgagaaatcgattatctattcatgtggttgagggattagatctcaagcaagtcacaactaatggtactagatatatgatgatatgacaaaagaaaacccttacatggctcttgatgtttcacactcagatttaggagctgtctgaaaaccctagctagctctccttttgaaatcttctcaacccaatagaaactataagtggagactgttacttatagaataaggtgaattaagtaggtggatgttgcaactagcaactagcaagtggtggttcaaagaagggacaaacaaaaagagatgacgatgataatgatgaatgattaatgataatgatggtggtgatgttgggtcattgtcttcatgggattcagggaaagctaactgtttcttcatatctcaccatatcttccataaatgagagagaaagatgagagagagagagagagagagagtacgagagacagagagcgagatggtgacttgtgtaatcttgtgttgtgtttcaggattgttttagggggatgattagaattgaattatgatgggatagagccatcaagaggttcatcagccagctttttaaggttctttcgttttctttagggatcacatttaatgagaggtggaagagcttgagaatttagataatgtttttatctaattaagtcgtctttttatttatacatttttatttcttattttttaagcattaacgagtggacaggagatacatagtagtagctagaaatcatataattggagactgaggattattagtgtataatataatcggtcccgaaaaaatatgcaccgttgtctttatgtatgcaagaatctcacaagctcgtgaacacaaatcccatctaagcgagagagataatatgaacatcgcaagtactaattactgaaaatttcgtgaaggattcaaaaagtatatggagtcatttattttgacttctaaatttgttctataatgcaagttgtatcatcaatagttgttaatttcttttagatttgaagatccttttactaatgctcgaatacacatcatatcaaattatcaatgatcctttttacagtgaatcttagtaagctattcacaagttatgccataaaaaaaaaacaatgtaacatttcttttagatttagagattaatttacaataaaatttacattgttttttgtttgttttcatattaatataattaagatttggtctatgcatggtttcatacttatggtctatttctctatttatgcttgttatttttgagcatggaccatgcttatattctatattgttccaattttattaaattggtagaaaacaaactttaggctgctacctttgattctatgcatctctacatgaaatcttcttttaaactattttaatcaattcaatctttattatcagattttttttaaaaaatgtatattaaattacatatatagtaattgctaattaagtaaattttaaaaaacgtttagagacagaattataacatatgacaatcttacccctgcctacctgtcatctgcgaaccgaccaaagtagtgagtgggcatggagttttgaactgagacacttgtgggtcctttgtgttgtgctttgttccttccttcaagaaagtaagacgtaaaacccgatcaataattcggtatccaattaaacccgacccggacgaatcaacctgacccgacccgacccgatatttcttcaattcgatcgatcaccattgatccccaatcgctgctacgaacagcaagcttcggcgaaaatgggattcattacgactctttaactcatcgatcccaatttgaaaactcgcatttccattgattcctttgatcagttctcaagtcgaaggtaattttgaatcaggcgcgatactccaagttaggatcttcggttcgagcttttgtgtgatcgatctaaaaggctatagaatatggtgaaaccatcggatttcaaagcaattcaagggtttattcggctgcattacactcgggtcaaccctgtcacaattggccgatcaaacccatcagctttgtcttctccagctattccctccaatggtgtttctcagcttcagcctaagtttagcttccacagcttatcctcgaaacccacttccaaaaacgtgggattatatcagattctgtcgtctcctaagctcaatcctaagttgcagcaagctttgggtttgcctcgtgtgaatgtgagttttgcatcggcgtttagattggtatccactaagagctctggatttcgaaaggttgatgggagttttgcgagaaaggttgttgataagcctgtcaaagctgttagttctacttttgctagataccgtgaggctatagggttgcacattgatgcattttggaaaaagaatagtcttgttgtgtttggagctgcaggtgtttttgtatgtattttcctttggcggattatgtttggaattgctagtacgtttgttggcctctcagagggcatggccaagtatgggtttcttgcactctcctcagccattgtagcattttctgtaagtttcgctctttatgtgcttttcgatgggaatttgtgcttcaattcttggtggttggctccatttcttagtaatgtttcagtgatgatctcgcaatgtttgcccaactcagtgccatgaagttgtcctgaataaaaatgaaactgaggaatttctctgtagggttattggttgatagtgaatggatgtggagcttacaatgatattggtttgattttaccacgactagagtataggttcattctccttgttaactgatctccttcacagaaatacaggagatcttgcactgtatatttcaagtgtcttatagcatgatattgtttatggaatgcaaaaactgctatatgatatggtttgttgctgttacagtctcctactcccgtatcatttaggaatcactccttgacagctatctgcatttttctaataatagggattatacctccgctcaaggtttacaattaatccggataaagtttatagaatgaccatgaggaagatcaacacggcagctgaaattctagaagttatgggtgctcctctgtcaggatcagatttacgagcgtatgtgatgtcaggtggtggcataacatttaagaaattcaagccaacaattaggagcaagcgctgctttcttctattccccgttcagggttctgagcaaaagggccttgttagcgttgaagttaagaagaagaaaggccaggtttcactttctcaactcctcagttcctcgtttactcaactttcttctgtcttgttcatgttgtaatcttcagagttgtaattagctttgacaaagttcagcagctcaactcttagctataggtctactgtatctagcctaggactgaatgttgtagattagagctgttgtgagttggctagagtgcagtttgcgaagggctgagtttataaggatgtctcggcagattttttggttgtagatttcgtaaggttggttgggcatttggttaagcggagagataatcttttcattcatcaatctctctatgctggtgaatttggaagaagaattggagtttcatagctgttctttcagtttcagttaaacgtttaggcttgtatatataacatgtggaaactgatattacatgacattgcgtatgcctgtctagtcttttaggtgctttcattttttcataccatcagcgaatccctattaccaatcacgctccctatattgtgagtttggtctacttcttatgttcatgtgtctgtttcttcagtatgacatgaagcttttggcggtagatattccaatggcatctggtcccgaccaacggttatttctgattggcgatgaagaagagtacagaattggtggtggtttaatctctgtgttaagagaccctgttgtgaaagcaatggcagcaactaaggagttcgataatcttgatagaatcgaagaggaagaagacgctgaaagagaacttcaagaagctgaaagaaagcatcgtgaagagatcgagaaactcgagaaggagggctcataactcgtattttcttccccagaaatattttcttcttcggtggatataagaacaacaccatgaatcttttccaaaacccagttttttttttgtttttgctaactttcgagaaataaatttccctggctatgttgatcagaggatgctattgtgattactgattcttcttcatacaagatgtatctccttgttagagcagcctgtgctgtgaaaaaccgtttggtttagaacttttgtcttccaaagtataaactggtgtaagcttaataaaggcccaccatagcccgcccaaaatagacacagcgtcattttctatgtcgtcttcaaccagtttctggtctacaaaattagttatggttaatcgaaccaatttcccatcgcatgtatgatgtaacccaagacaaatataatgttttgttgcttaaattgaacgttctctggatccttcttgttgatgtttttgattcttttcacagaaacttttgatctttgatcacggatttatctcttattcatgcaagaacatgaacaatcttaagttggcaagatctagaagtaatccgttcttaatcttcttcttttatcaaaccataaatagctaggtcctttatttgagatccttataattctatctgtaaatttctccttatctgtttagaattgttaatatcgagaaaaatggttttttgtttgtgctgttgattcagagagctaatgatccaagctagtatagaaagttaatggggaatcattgtacaagaattccttgttgtaaaaaggtaagacctttaccttaaaatttacgagtttcatggagaacatgtcgaatctaactagcaaatttttattaaacccgttgaatgttcataagcattgtgcagtttcagatgaaaatggtgatagaaaatctcatgttctgaaacaggtgtgttcatgtatctgctgttgcaacagaaggaacaagactcaagctaggagccagaaagggtcctactttataaaagggaaggtccatccggtaagtagaatggagaagtgggaggagaagatcacagaagctaatagtcatggcaaaattgtaagctcttcctcctatgatttgcctttctatgttgttttgcattcttcctctgtagatagctcgacatgatctgattctttgtaacatggaacagcttgtagtgaatttcaaggcttcgtggtgtttacctagtaaaacaatattaccaatataccaggagcttgcatccacatacacctcaatgatatttgtcactatagacgtcgaagagctcgctgtaagtaaccaatcaacttctgttacttagaatgattctttgtgaagatgagagatctcgaaactgagcgatttgggtgttaaaatatgtttgatacaggagtttagtcatgaatggaacgtggatgcaactccaacagtagtgttccttaaagatgggaggcaaatggataaacttgtaggtggagatgctgcagagcttcagaagaaaactgcagcagctgcaaatctccttcttagacaatcttaacgttttttctagtttccatgtcagaaaattatccaaataaaaagttgaccagtatttatatgcagatcatgttggtatcactgagatttttgttattaactttgatgcactcttgtagtgttaatctcaatcaaccaatattaacttttctgactccttattaagacttatcaagaattgcaagaagagaatgagaagcatgttatataaatcaattatcgatttagtgcaaagcaaaactctgctttatcagcagatctgtgttggttacatactgtttataaaatacagcttgcaactataaatcccctatattgagaaattaagttgaggctgcgaaaagaaatgtaccggatgtttctatgaatcggaatctgaccctgaatcagtttctgcatcacacttcaccccaaacggtctcaatctgtttgtgtttgcttgcaatggaggcataccatcatcatcatcactcgaatcaacttcaccgtcatcttcatgctgttcaatgggtgagcttttctcagctggaatcggtctagtatctttgaagatttctggcctgcattcaccatgtccaaactaacatgagctataattactcaatatgagaagccatccatacagaacaaaagatagaagctataccattccggagacttttgaagaagacggacttgctcaaagaatagaactttacatacaatagatgtaactttgctaccagactcttgagccttttcctttcctgtatggtcaatcactacaaagcttcctgcaaatcagtgtagcacatctcaaactcctccaatccacaccaaatcatgcagtaaatctaaccattcaagaaagaacaaaccagagaagactaacaagaaaaagtacctcgtctgatccacatgctctcacgaaacttggctggaaacaaagctaatgagttctctccttttgcatccattatcttcaaagagacaacaaaacaactacagcagttaaaacacaaactttaattcagtacatacatacatacaaacaagccaacccatccaaagaaaattccgaagaaaatgctatgaattggcgagattgtatgaaacctaagaaaaaagcgtttatcttttacctcaatttgattggaacctctgagagagacgacttgggcaatgctctgacattcctcaagcgtgaaatcctggtccgacgccgcttgtttcagattccttcttcctctgttcatctcttctacctcaaattccaaaagtccgaaactttcacaaacaaaattacaaccaaaagatcaaaatcgacagaaaacttgagattagggttttgcagttgtgtgccgttttactggaatcggaatagttccaatagagaagaggaggtagtttcgttattttatttaaaagctgagggtactattgtcattctcaagccacgtcggtgcaaacgaattggcagataaaccggcaatacgttattatatcacgcggcggtctattaatcttctccggcgcttgaaattccactcctccatagtctccgtcgattcgcaatttctgaattttgaacgaattctctttcacttcacaggttcggaatcatgttttcatatcgtaactgagtttgttttcgtatgaattatataactggttcaataactattttgaaattgcataaagtttttgggtttgagctatgaaattgcataaaggtcatagcttgtttgtgtgtttttgaatttttttatcttgtttatgaattcgcagtactgaagtttctattttagcttagtgatgggtaggagaaagcaatccaagccccagcgtgcagtgggtttgatcactccaactggttctgaatccgatagaaatcaattacccggcgacgaagctgagggttcaggggacaagaatgttgaagatatcgataagccgtattatgtgaacatatgtttaagtagtcgagtttcggagcagcagcagaactttgatttagctgaagttgttctaacgaattttagtgtaagagaacgtgtaggaagtagtagtacattcacaaaacctattgaggttgatcatgatctggattgctcgttacggtttcggctttgcaatgtgactaattttgttgatcggattaagcttggtcactggccggttttgtcttcgagtgatataactttggaattggttgataataaggtgtctgatgatgaggttgggtcagtgatttggtctgcaagttttgatggtccaggtgaaggggtttcgggtcttgctcatttggcaagtataaagtttttgactttaaggctcatgcctggtaatgagggattgttgtctcctagagttagagttgagatgcttcagcaggcttttgatgcatgtgattctcttcttgagaatacaaggcagatttggaaaaagagtatgattcatgtcatgtcttggttgaggccagaggtaatgacatcagaggctaggtatgggacaagattcaacgtcaaggatattgagtcatcagttgtgacggaagatgaaactttggactctagtaagcagtctagttttgatgctgctgctttttatgaagccataaagccatcaaagtgagtgaacaactttttttctctctttatgtgccttaatatctgattttatctttccaacttattagcacaatatcgattcaggacggatgcaatgcttggagatgacatagctgatttgctcccagaacttaggccgtaccaacgacgggcagcttattggatggttcagcgagagagaggcgatccaataacgttgggagacaaggaagacaaccaattcatttcacctttgtctatctccgtgggattccttgactctgctacaaaaatgttcttgaacccattcaggttagtagaaaagaatctaagtagtcctttttaattttattttgaactataagctcctctcatcgtcaacaaatagtgtatgttctgctcagtgaagttccgccatttacagaagaactaatttgttctggtcaatttgtcatgttttggttgtttttagtgggaatatctcattgacaccagagtatttttcacctcgaattcagggcggtatccttgctggtatgaacaatttgcggcttcattttgcctccatgtactatataatcagaaaattatttacaaggataattttgttttgacttgctttcacaaagaatattttcagaaatatatgttttaagtcgtcttaaatgctagatggtgtatatggctttgtctacctctaatatttctcatgcgtttcgttcttaatgtggtaaagtacgaatgctgcagatgaaatgggattgggaaaaacggtggaactacttgcttgtatcttttctcatcgaaaaccagcggaggatgaaatttctgtgtctaatggttcatcagttactgatgttttgaacgctggcttgagaagattgaaaagagaacgtgttgagtgcatatgtggagctgtcagtgaaagtcacaaatacaaaggagtttgggtacagtgtgacctttgtgatgcttggcagcatgccgactgtgtaggttattcacctaaagggaaaggtaagaaggatagtcaacatattgatgaaaaagcatctcaaaagaagagcaaaaaggatgcaacggaaattattgtcagagaaggtgaatatatttgccaaatgtgctctgaacttctacaagtcactgcctctcccatctctacgggtgccactcttattgtctgtccagctcctatattaccgcaatggcattccgagattacacggtatgagattcttctctcccttctgttatgttttgactagaggaacacttaacaagatggctttcactagacgtaattttttgtgtatctccacatcatgtaatgtgagtcctctttccttctttcatctgtcatgttgtagccatacacgcttgggatctctcataacatgtatctatgaaggtgtgaggaacgcctcactttctgaagaacctatgattgacattactgaacttctcaatgcggacattgttttaactacgtatgatgtccttaaagaggacttgacacatgacttcgacaggcatgatggtgaccggcactgtcttagattccagaaaaggtgtgattaattatatttaggattcttatacctcgcatttttcattacatgatgaacttttgtcatacctgatatattgaagaagatgaattattaaaatatttctaagaatttgccaatatagattagttccatactcatgtactcagacgagccatattgaacaacagcaaatttaatctgacaggatttttttttatctcctggtttcctgcaattgaatagcttttcggagagattgagtaaagatttcatattgtgataggtaccctgttattccgactccactcaccagaatattttggtggaggatttgtttggatgaggcccagatggtggagagcaatgcagctgctgcaacagagatggcgttgagattatacaccaaacaccgttggtgtatcaccggaactcctatacaacgcaaacttgatgacttatttggactattgaagtttcttaaagcaaatcctttcgatgtttcaagatggtggattgaagttataagagacccatatgaggtcgagcaggaaaaaaaaaaacatttcttaccttttatagttttcttgtctaacaaccttcttgatttgttcagaggcgagacacaaaggccatggaatttacgcataagtttttcaaacaagttatgtggcgttcttcaaaagtccatgtggctgatgagttgcaacttccacctcaagaggaatgcgtctcgtggcttaaattttccgcaattgaagaacacttttacagtagacagcatgacacttgtgtgagttatgctcgtgaagttatagaaactttgaaacgtgatattctcaaaagaggtaccatggggtgcacatagtgtcttcagcactttccacttttgtcttttattgcctccaaaagttcactctcagaagtttgacacttccttctgtactggctgcttaagtttctatccaacttgtgataatctacaggtcatacttcttctgataatcctttagtcactcatgctgaagctgcaaaactgttgaactcgctcttgaaattgcgccaagcttgctgccaccctcaagtaggaagttcaggtttacgctctttgcaacaaagtccaatgaccatggaagaaattttaatggtgattttgcaagatttagcgttttaatcttcgttacttatttgtgctaattgaagtttttcttaggtccttgtgaaaaagacccagagcgagggagaagaagctcttagagtgttaattgttgcattaaatgggattgctgctattgccatgcttaagcaagaattttctgaagctgtgtccttatacaaggaagcattaagtataactgaagaacacgccgaggattttcgtcttgatccattgttaaatattcacattcttcacaatttagctgagatactaccaatggccaaaagctacggtggaaaactttctgcatcaggaaggcctgaaacaaaaatagatgtaaaagatgatgatcatcatcgtgcatcgaagaggcaaaggatcaatgagctcgagagtttaactcatgattcttcagaaactgtacatcagcgggaagctattgctccagacaatggtttaaagaaggatggagagtgtcatgaagaatgcaaaactctggatatagtttgtgacacactgaaggttaagtatttatccgcattcaactcaaagctttctgcagcacagcacgaattcaaaaaatcatacaatcaggtattttccacaaaaatatttatatctttttttctttaatctcaaaaagctacttgtacccttagcctaagtgtaaatataatccgtttaaattaagtttcaagatcaggcatgttaaatattgagcatcacttattttcctggagctcgctctctgtgacacaatgctaaatggttgaaaaactttcaaggtttctgagtcgttgagcaatatggggaaacaacgttcagtttggtggttggatgccctgcaacttactgaacagaataaagacttctctagcgagttgacaaggaagattgaagaggccctccatggaaacttaaacaattcaagctcctccagagagagttctcggttagtgcttaaaaatttgcagttttgtgagctttgtttttgccagagtactttctcagcttttagtcacaaatttgtctgtgatatggggcatattttctacatgtgtccgcaaagttattagaagaagtgacctaagagactggttagcttcattaaaagactagattgattaccctataatttcagtatcatatgtagtgaaagtcttagcaatagatcattatattcaatctaatctcagatgtttcctgatttgtaagcagacagtattctaggagcacataacttgagtacgttatgaactaacttgcaaattccttattccagatttagaactatacatggcatgaaacttcatctgcagacgtgtatggatatgctggagagatctagaaagaaagtgatagataggattctagaaattgatcagactatggagaaaccaaagttggaggatattgagcgtattagcaactgcaagtattgcaataagaatagtgatggccccccgtgtattcattgcgagctagatgaactattccaggtttgctcttttttgcttctgcacttatatgaacttaaatcgatattaatattagctgtcacatcatcatgtatcaaaaaatcattccaggaatatgaggctaggcttttccgtcttaacaaatctcgcaggggagtaatggaaattgcggctgctgaagagacggtacatttgcagaagaagagagatgctcgtaatctttttttatttggtttatcatcaagaagcaaggatctaaatgcatcacgtggtgatgacgaggagccaaccaaaagaaatgctggtgacattgtggttgtaagttacttgatctagtttggatttggtattacttcaagaagtctttgaattcattactgagaataaatcctaaccacatctctgtttattaactttattgatacggcgttctctatttcctcttttgtttaaaatcttttgaaatgtcaaataatatgattttgtaatgatcgtcgcagtctgataaatatttcttttatgttcttatcatagctttcaaaatctccatctgagacggaaatagttcttggagtgataagaaaccattgcaaaactcatttagatagggaaagcaaattggcagctacaaaacatttgcatacccttgaggtattgcctgagagatcccttctttgcttacattgagaaagggaaaactattccttcatttttgtaacaagatctgacatttccaattttgcttatctaattaaggtgatgcgaaaggaatatgtacatgcaagggtcttagctagggatcaagctcaactcctacgtgcctatgatgagattaacatgtcaacaatgagactacagcttagagaatcggaagatgacacatcgatctatgctttgggccgggacgagttagatgttgctagtgtgctgaacacaaatgacaaatttatggctcaatcctcgttgcttagtataaaagggaaacttcgttatttgaaggtaaatctgtaaccttagtgtgttattagcctgacctcctatttttatcatgcctataagtcatttatatctgtgttactattaagaagtttacgtggatagttacacttgatcacatttgttttgcaattccagctccagagctctacccatttcaattttttagtcacgagaagctatagttatgtctttgtggctaagttcctttttgtgagactttggatcgctggaaaatatctgcttgctttccctctctttctttgattttgtatccaatattgaacaaatcttttttccgttgcagggtttgatgaaatccaaacagaaacaagaatccgagagtccagatctttcctcaccaatacatgaaacagtcgatgcttcggatcctgctgaacaggaaagcgaaaacctgcttaagagagatgaagcatgcccgatttgtcatgaaattctaaggaatcagaagatggttttccagtgcgggcattccacttgctgtaactgtaattactttgacctttcgattgtttgtttttcagcttcgagttttaagcattttctttgtgttccattaatctactatattcttcgtgaacctaaagaatgttacccatatctgcttctttgtgtttgttcacacaggcttttttgctatgactgagcgcaaatcagttcaagaaacgctgcaaaagtgggtgatgtgtccaatatgcaggcagcatacagatgttagaaatattgcatatgctgatgatagaagaaacagttcttcgtcagatcaagatcacaaagacagtgaagcatcattggtggttcaaggttcatatggaacaaaggttagtctccttgcttctaagatcagtgcacaagaagtacttctttttctcatctattgttttgggggtagattgaagctgttactagaagaatcttatggatcaagtcaagtgacccacaaacgaaggttcttgttttctccagctggaacgatgttcttgatgtgttggaacatgccttcgctgcaaatagcatcacctgcatccggatgaaagggggcaggtaatgtagtgagaattttaatggggagtctgttaaaagtggcacataggtagcctaagggatgcatgtaacttttattttatggaaatgtaggaaatcacagacagccattagcaaattcaagggatctgagaaagaaacccaaaagacaaactcccatcaaaaagaggaaaaatcgattcaagtgttattgcttttggtgcagcatggtgccaacggtcttaatcttctagaagcacagcatgttattctggtggagccacttctaaatccagctgcggaagcgcaagctgttgggcgtgttcaccgaattggacaagagaagcctactctagttcatcggtttctggttagtgtatctgctttgtttgccaccttggtcttgtacagcttcaagatcctgccttatgtgattcactttgatcttgacctctcttttttggggaaccaggtatcgggcacagtggaagagagcatctacaaactgaacaggaataagaatacaaacttaagttcatttagcagcaggaatacaaagaatcaagatcaacagttcttgacactaaaagatcttgaatctctatttgcttcaccaacagcagaaacagcagagatggaacaaaacccaggagagagacaggagaatctgagagatctaccaccctcagtcgctgcagcattagcagccgagaggagaatgaaggaaagtaatgcatcctcatcaactacaaacgcatcatgactatggaaaaggttgcagagagattggttccagccaaatgtttgttggagcgtcttgttgtatgcacataagatggtgaagagagaagctgctcgaaataatactttctcttttgtgtcgtccacgttcattatgtaggttaggcaaaggataagctcttttatttattcattgtattgcaacagacattactgcgttaggtcttctatactttgacatggaaataataactcatgataaatgcaaaatgggttctcttttcaagtaacttggagtaagtgcttttcttgtttgttataacatttgagaagacaaatcagtcaactacattgaagaaatgaaaccagaaagccccagaaaagaaccaaaatttattcagctccacgccaaagaggcggtaacaaacttagaaactggaaaactcttcacttagtcttgaatcttggtgatatctcacttctcttcagttgggggtgggtcaatgaatgtcttctttatccaaccaaatggctgtgatgataaagaatgtgtcagatacaatacattatgagtttgaaaagaagcttagtaaaatagggtcactagcagcttaaggcgcctaatctcttcataacaccaaaccaagagcaaattgtgtctgtaagtgatgaaactaattcatgaagaaacaagctcatgtatcagtctgaaataagtgcaactctatcctccttaagatgttaatggcgtgaagcaaggatcaatagaagctaggcattttctgtagaagactaaatcagaatgtaagtgaaaccaatagtacaaggaaaacgaaatgaagaagatttgatcaccaattcaagaatagactagcaccaaaacgaatcaagcctttcatgaaacgtaattatatgcaacgatgctcataaaagtaaccacctttatagataatctaatgagatcaaagcaagtaaatttgataaatggtgatcaattatgaaattttcatctttcaaccagataaagccaacaatttcaccagaaacataacattagctagagatagagatcccagatcaggaccataatccgtgaaaaccaatctatggccggaaaacaagagatcgagatagcttacttggacgacccagatggcaccggctgcggcggcgattccccatccagcggcggcctgaatatcaatcgtttggatctttggcttcactgcgttgagcaatccagatgttcctgccattactgcttcaatctctctctcactctctccttcgctatgaaattcgatcaaaccccacagagatccttaacgaaatgacgataatcaattctgcggaatttttgacattaaaagagcttcttgacctagtcaaacgtcaattttacacttcctgccgttctacttattaacacttgaacaacgcgccgtttctagtcgttgtttctagtcgttgtttccgatatgcttaaaaaaattcaagatcattgcctcattgattagcgtttaaactctttaatgtaagtatgtaacaatgcaaatgatttcaagaagaagaacaaaacaacatcattctatattgaagaaccaagctttgcattgatcttcttccttggactatcaggtttagtggcgggtcgacgacctttgtccggaccaccaattacaccccattcctcaaactgtgtctgccttgctcttgccctttctttctcctcttctgatttcttggagtaacagtaagggcaagaaactccatactcgtactctggagcttccatgtcttcatcacttataggttgcttgcatccatagcagagtttatgtgttccttgagctagaccatgttccacagatacacgtttgtcgaacacaaagcattccccttcccataagctctcggttttagggacttcttcaaggtactttaatatcccacctttcagatgatatacctgataacaaaaatgctttgatcttttaagtacctttgaaaccaacagaacaatggttagatgttgtgttaggttacctcttcgaaaccttggctaagaaggaggcttgaagctttctcacacctgattcctccagtgcaatacatagcaattcgtggcagcgtcttcggtttttcagctttgtcttctttatgggtgatttcagaaaaatcctctttctccacctttgcttgcgtttcattgccttcttgcttcaatgcaaattgattctccacccaagatgggaaatttctgaaagctgtggtacatggatccacagctcctttaaacttcccaattctagtctcataggtattacgcacatcaatcactacctgaaacacaatagtacttaaagatctgatatcatcgatctatctaccagaacatttaatcaagagagagcagagaaaatgagtcctaagtgtataaacagttatcaagtctttattcaaatttcactgagttcttgactaaacttgctacaagatggtaaaaagaggactcacagtttctggatcactgatcagttcgttccattcttcgggactcacatatgttccaactctttcaattggcgagacactaggaattccaagcgtaacaatctgcacagacattgcaaaagaaaacaactcttgacaatccacaaaactcctccagtctcaacttcaaagactaaaaagtgtacctctttcttaagtttgaccctaacatgatcccatctaaatggagcatcttcaccagctgcaagaggagagctactactatgtccatggtgaattgcttcttgctcaggactcacaggtgtctccacttgcctcaaaccatttaaccggacatctctctgtataaatgccaacacttcctccactgattcacgaatcccacagatacttccatttatcccttctggtgcaagaatgattccacctgaaacacgctggtgaaacaagacaatccaatctacattagtgattagtgcctcaaaatctaaaccaaattttcatgatcaatacaaacactcgtaagtaaagacttaacctttcgtagacagacactaaaaatctacacttttgaatgagatagaagaaacgccataccaatttttcgcagagatccttgagaggcttcctgaaatcagcatgctcaggaaaatcagcgaatttgtagaatgaaactacaacgagcgagcctaaatccgaatcaatagactctgttctctctgagaatgcctgagaaacagtagccatgcttctccgtatagctccggcgtttgaacaagccaccgtggatttcagagaagaggaaggagaggaagagagtttatggggttgggattgagggaattgtaactcgggtttggagtttccaccgactgagttcgaattcacgccgccgccggagaatggagagtgtgagtgaggagggggtggtgatgagagcattctaacgacggcgagggacggcggaaatctccagtggtaaaaccgtagcattggggacccaattcaagcaaagtctctgggaattcaaccaaaccggactaaaccaaaacgtaggtgtttcccgtacgagaccgattcatcatcttagccattctttttcgttttaaaaggttttcagttttcaaattttattgtttttttctttattcattttaaaatttaaactaaagagaattatatacatatgatttttaatttatgcaatatcaaatatgttacgtaagttaataaattttaatcgattaatttaaaaaagtaataatatgagatgcatataaataaaccgcaaaaataataaacaagccacaattcgatcttaattaattaagcatatatactaaaaaattgtatgaatatgagatataaatatacaaaccgcaaaaacaataaacaagacaaacaatatatatatatatgtagattattaataaaataaaaagtaaatgaaataattagtatttagttataaagtagatatatattgagtcaataaatttagtgtgaacaaaaactttaatatataaattaataaaatggaaagagtttcataaagtttcattgaagaaaataaataattgataggtggtgttaaccatggaagatgttctagttaattgctaacgatttttggattagtgacctctcgtttaggaaattacaaaagagaatgaacaaaaagcgacaaatatttgaatccacaacatgttttttttcaataggaaatcaatcttgcaaatgaatctataggtatatccgtcctaaaataaaaatgtatgttcggaatatgcaagatttccagtaagaaagagctgtatgtgtcgaagcttatattaggtattttattttcgtttcttaaaatatgattatcctaacttcttaccatgcattttgtagctatcttactagtttactttcaagccataagatattgaattttgttcaacagcatttaatatcttactgcatttttatatagttttgactatattggggttaggtttttgaatagtagtcaaatatcataactaagaatatgaccaaaatagatattatatagaaataaatctctaaatatgatatttcattgtttttagtatttgaaatggtattaagaaacattcaattttttttattattcaaacaacatttatttctcattgtttagcatctattttttcttgtttataaacaaagaattacaacatgaaacacgtgcattttaacataaatatatttagaaaatgtcgaatttcgtgaattagtgagagaaaaaaccacaaaaacaattgttgaggtgtagttaagttgacatatcaatcacacatattattctactcagatttattatttgaaaagaagaaaaatgcgagggaaaaagataataatcacaggtgaagatgtgaagctacttgtgaatatctttggtacaatcggagtcaccaatggtcgcccatatcaatacaaggttgaagcttggacaaatgaaaacgagaaacatgaaacaaaggttgtagcaaccgaaggagatcctgagtttgatgaagaattacaactttttcaagatcagaattttcccgtagaatctttatatgtagatgttttcaaaacgaattcaactggtacctatttcgttgggagaagagtcacattgttgccaacggttaaaggggttgatttttaccgtgaagttaacctctctggtcctgaggaaaccggatttcttcaattgtcacttactctcatggaatttgagatacttggttatgttccttcatgatttatcatctgtatgtggttgtgaattcttaatttgatattgttatgaataatgaataatgcatactgataataagttatcataaattaaatcatgcatgtttgcatatgtactaatgataatatgaataatggaattcaagcaagttgtcttgatttatttatttggatcttctaatgacgattgaatgttttgagggcatctcttcttcttcttgatgaatcatcatcatcatcgatggctgtgttggaatgttgacattaatctagttaacgaataatggttcttcttagaatctttttttttttttttgtatatttactaatgataatataaatcatggaattcaggcaaggtgtttaacgagctatatcattaacaaaaaattaaatgtacgaaaaatattgtgtttaagtctcttaacttccaacgatttaatgctttggaattggaggcatttaatcttaagttttgaggattcgtgaaataagggtgtgtttgctaggtaaagtatgatgtttattcgaaacgtaaaaatccaattttataatcaacaaggtaaaattccaacaaattttcattttcttgatgtagaacccaagaatcattattcagcagttagcaacaaggacaatcaagttttaataatcattgattggtttgcttcatcctcaatttattttctcctatttatgattagatgtcttctgtttaatcaacgaatggaaatttgacacgtgtgagattatttatcagtgttaatagtaaatgccagctggattgtctaacacagtcaaagttggttgacctctaacactagattttaaattttgaccgttgatattaatcttacgcgaatcagtttacatcttagtcgtttatcaacaagaccttctttatataagttggaatcaccctttgtggcggtcgtttagctcaaatattagtaactgtttttatttttccggtaaatgttagagaatgggaaaacaaaatctctcaatttgtagctaaaattttgattttacttttacttaataactaaatgttcatacgtagatttgttaacatattctcccgggaggcaacatttaccctatttataataagtaaatttgctaaccaatagaaacgaaaacctaaagaaagagattattactatggagcggaaggttgttggagatctgacggagtcttcattgaagataatttttgttcttgataaaggtacctacggctcgtgtctaacaagaatgattcaaacttgaacaaatcatacatgaagaagacaagtacgctcaaacattccgagaatctcgagaggagcttaagaccatgcttcacttccacgccaatcctttctcatggtgtggaaccagactagattgtgccggtctcttcgttaaggtcgaaatctgttgtagaagtcgtctgagagatagccatgtcggggcggtaattctgaactctagaagtaggagatgacacccatgaggaagatgataacaggaatgaacgaactcatcatctctagcagcaaaatgaaaaccaagatgcagaagaaaacgagcagtgactttggtgtgctcttccacattatgatgccatcaaccacatcgccacaccaagatagagaacccatagttctgctatagttaaccatgcttctacggatactccataaataagattccaaattcaggatgtagtccaaatatatctcgtgaagactacgtttgtttttaatcccaatttttgaaatattgtaatttctttttaacatatttggtaatttaatctagttagtcatttacattagccatacaaaaagaattattagtttgtattaagtagtgataggataataaacatgtgaagaagacgaggaacgagagtatcatgttaggaaaagaagatgcagaaggcgactccttataacatcaatagaaatacgataattcttcttctaaattttggttcgctgtgtgcatattttgtctatgtcatataacatttttttctaagttaatgttatgctaatttgtttgtcttttcatatgtttaaagatttttcaaccatgtattatattgtaaactcacgtggatccaccacttttcgtagatgtatgaagtaatttgaacaaaaacttacaaatattagttttataatcttaaatatatatatatatatatatatatatatataatggtagcatataatggtagcatctttaaatcatttgtgacaactaaataatataataaaatattgtatttcctctgttttattattattttattttatagaaaaaattatttctaaaatattaattttttagattttctatgcaatattaattggttataattgatgaatatcaaacttcaagataaataattaaatattagtttttaatatgttttttaaaatatatgtgtttaaaaaaaaatcaattattaagaaacaaaagaagtattatttaccttttataaatattaaataaaacaatatttttatataataaactacaattatttgtataaaatttgccgtttacaaatgtaaatttatttcgagctaaacttaataactaaagaggacaaaaaaagattttggaaacgtgatatatgtggtacatgccgtttacaacgtattgcgtacataattatatatttctaaattaaatttaaagattggtgaagtgtatcaaaaccatttgtgataatacttgacacttggtaactgtatcaccactttaattgaatctcaaatattacgatttttttatcagtcaggttgacttaaatataacaaatctatagacaatataggtaataaattttaagtttcttataactggcacgaccagaatatccataaacgagcaccggcttttgtatatgttttaggagtcatgtcttttaattttagagtcccttcttacattgaacgaccttttggctacatatgtagacacaatcaatagttgatcataaacaactttatatatgtatatatatatatatatatatatagatatttatatatttataactttataagacaaagagtgggttcagattagtactcacagaactcaaacaataatagaaccgatcaactagccaaaacagaaaagtgttcctagttgaaatcaaatgacacctagaaataaaacaaatcactaggttacaaaaaaaacggtttagtacaaattaaaacttgatagtttgagatctgagtagtgatcgctaaatgggatttagttctaaatacattaaagattaaaaaaagtagaggctgccgtaaaattagtggggactaattaagaaataaaataaagtaataatgaccataattataatttatataactatgagttggatctagttgaattattgacgttttcaacgtacttttattggtgttcaactttttctgtattttaaaaaaataatatgaaattagattcgtacgtagcaaggactgtctcttgcgaattgatgaaataattatacttgagacaaagaattctctgattgggtatagcacgaaataagattcaacttacacatttaagaactatatgttttgcatataaaaaattaaaccaaattttaaatttcgtgacagataatgatccagagtagtcttagcgataagtagcaatccgttaatcgaggcctcttggttaattattttttaagacaactaagcttaagattagattaagcacaaaatgatgtatttataataaacattgttattattctaataaccatttgtcatttgtcaatagcagttccccaatcatcgttgacctttctctcatcatctccgaaagaaagcaataatttaacatttgaatataactagtgtccatattttgacaatctctaaatgattaatcagttgggatttatagataaatgccgaatttggatgagtaaacgaagaagtaaaacaaagctgtttggacatatttattggttcaaaccgagaaataacacattcatctttttacgatcgaagtcaactactacaacaacaaaaatatcgttaattagttcgtacacaaattatatttcataaatatttcatcgttctaccattatactactcaccgttcattattattgttggtataatctgtttcgttaagttgtatgataaattaaaactagtaaagccgttttgtttttgtttatagttgaaaaagtaagcgtaatataatctgtaatttctagagaattaataagcaaacaaatggatttgactcttatggattttttttatttatttgcgagtggatgtacaatgtggactgaaattattgtgactccgaggagtactcagtggcacctgccccctcattgccgtcacaatatcccaatactaaacaaatgttacttttttaaaaaatattgttttttttggtaggaaaaaagatgtattgttttatgcgtcacagaaataaaaataataattaaccaactcaaaattactcattttaatgaaacgaagatatttttcattcaacggatcaaaaattcaaaatgagtcatttcttacgatcataggttttaatttatttttggtattaaatgagatgactcacacaaatatttcaatagttacacgagtattaattaaagtagtgacagtttcaacaaattttaatatttttgttcagttcaaaattcatagatttttaataaaatcagtactgccaaagtgatcagggccaagcaagcaataggctgacataacctagagttgtgacttgtgattgtattggttcttttaccaaatgatccaaaacattgattatctacttaagtacttttccggcgtttttaatggcagttctacaaaacataaagataaaattaaataacgttggcttagtataatgagattaatcttgattactagttttagatccgaactaagcggtctcaccacgattatctatatatatatatatatatatatatatatatatatgcttatagcttttagttttagtagctagtctatccatgacaaaattcatcaatgagaatattcattaggatccttctgcttccgtaaatgcacgagaatacacacgtataaatagtttcttcttaggaaaaatactactatatagcaaaacatatacatttatatcttcaaaataaaattacgagattgataaaactctaaatattattctgtcttaagactatttgacccaattactcttaaaatatattagtggttggtctgatatagaatatatcttgtcaacatttatcctctttaattatcaaaaaaaaaaaacagttctccttattttggttctttcccttgaaagtgaatttcgtggtactgaaaaataatttgaatgtcataaaatattagttatataactctttctccaagataaaaacaaaataatttttcgcaaaaaacatttaaaaatctaaccaagttgttggatcgttttcatgagcattaattaattaaataaatccgcgaagaaaggagaaaaaaaatacccaccaagccatcaaacgtgttacggagatgggtgatgtcattccacatcatcaatgtgacataagcaaagctcttgcaagccaatgggtgaatagataagttataactttccaattataacctcaaatccatgactaaattcataactacgttggttactttccctttataccctttcatgttcattataatgcataagcatctctctctctttcctaagcatcttcctttgatttttttctgatcaagagaaaaaatctattttcttctctttccactatattacaacatttcttcattctcaaatcatcatactaaaaacctaaaaaaagttacatattcattgtatctttgtgagaaaaaaatggattcgaatagtaacaacacgaaatccataaagagaaaagttgtcgaccaacttgtcgaaggctatgaattcgctactcagcttcagcttctcctttctcatcaacactctaaccagtaccacatcgatgagacccgtcttgtttccgggtcgggttcagtttccggtggtccagatcccgttgatgagctcatgtctaagatcttgggatctttccataaaactatatcggttcttgattcttttgatcccgtcgccgtctctgtccccatcgccgtcgagggttcatggaatgcttcatgtggggatgattcggcgactccggtgagttgcaacggtggagattccggtgagagtaagaagaagagattaggggttggtaagggtaaaagaggatgctacactagaaagtaagtgacaaaaaaagttgaattcaaatatcaatttattatgttatatttttattcgtgtttaatgatataatctcctttttatgtggattttattcgaacttttttcattacaatttgctatttttgtctatggataccatcatatagtggtagtgccccatatagaaatgactaatcgtaaaggttaaaaggatatgaatttgttcataatgtctagtgcttaatatatactaaaaatacaatcactgtttgtgtgaatggtagtgataggaatcgtatgaatacgattgattggatagggccaatcaatgctgactataccatacataactttaccgaattttgttttactttctattagtgtataattgcgattagtttggtacaaacaagactgaatgtaccgtggatttgtttgaaatgaacataaaaaggcaaaaatggtttagtcatttattaacaaatttgtgatttatcatttgcaggacgagatcacatacaaggatcgtggaagctaaaagttctgaagacagatatgcttggaggaaatatggacaaaaggagattcttaataccacattcccaaggtccttaattacctaactccttatatgtctatttatgtatctatatactcacaatacatatataatacatataaacatgggcaactcatttttataccagggatctctagccgaaacatatgttatatttcaagtcactatgtgaagtttgcaatggcctaaaatcaatatgcgttttaatgttttgcagaagttactttagatgcacacacaagccaacgcaaggatgcaaagcaacaaagcaagttcagaaacaggatcaagattctgagatgttccaaatcacatacattggctaccacacatgcactgccaatgaccaaacgcacgcgaagaccgagccttttgatcaagaaatcattatggattcggaaaagacattggctgctagcactgctcagaaccatgtcaatgctatggtgcaagagcaagagaacaacaccagcagtgtgacagcaatagacgcaggcatggttaaggaggaacaaaataacaatggtgatcagagtaaagattattatgagggctcttcgacaggtgaggacttgtcattggtttggcaagagacgatgatgtttgatgatcatcaaaatcactactattgtggtgaaaccagtactacttctcatcaatttggtttcatcgacaacgatgatcagttttcctccttcttcgactcatattgtgctgattatgaaagaacaagtgctatgtgaacatccaaatctggaatgatgaatcagcactaggtcttctctttgagtatgtctagtttaatgtaatatttttgttgtatgtttgataaaaacaccatatatacttctctttttacaccattcacatgtttttttcttccacaagtttattttggatacatcatgacactaaagatggcaaaactttaatggattaccaattaaacttagaataaaccaacctccataactgcgcaagttcatttgtctttatggttattattagtgcttttaattttggattctataattatgatagatgaatatgattacctaaagagtgtaaagagacttatccattcaaattgcggctatgaatgtttgctgctaaaaaggaaaaagttgggacaaatgcattttggaactgtcgtgcttgtctttttgttgttgttggcatgttacctttacataagcatcaccgtgtacactagggcattgattaatgcttgttacaacaataaaacaaaataaattaagctataatgttcggttcggtacaagtactttttcttatacaaactaaatttaattcacccctgtaatttgaaaaatcaaatataactccatgaaatcatttttaatagatgtctaaatattgatgacttttatatatgttacagtgtactgctatgaaaataattgagagaataaagtgttttctctgtcgacataacaaacacaaaagatgaacaaaaaggcaagcaaatttggattcatgagaatgatgacggtcaaaggaccatcacttccactcgaagagcttgtttagacacggaacacaccttttctaattatttggattcttaagtttgagaaaagacaacaacaaaaagaaaaaaacaccaacaacaagttcatgacagtttgtgagaaactgacaaactaataatttcccccctaattttgatttcttaaagaaattactttggttatgtaagattttctatatatgttaactttaagaaaagaataaaataagagattgagaagaaaaacaaaatacatatgtgaaacactaaatacaaaacactttttcattgtcaaagaaacagaactactaccctataagaaatggttctcattagatcccatttcacgtgtaatagtgcaaaactataataatagtaatataaataaattaaattaacaacaattagtgatttgtgctaatgttggcactgcatcactcactacccatacataaaatccgcagaacttaatcttaagaaatactgtatatttttcctctgtacgtagatgaatcttgattgttttcgtcaccgtcaatccgtcatccagctgccggaaacggtgatgatgttaagatggatcgtttttaggaaatatgaaatccatgttggttccgaccccgccgctaccaaacataacatcagccatgtcaacgacagcaagaccgtagtcaacagaatgaccagtggtgacggatgagattggaatggtacttggagtggcagaggatgcggttggagcggttgagttgtagcaagtgtgtgagccacggtatgtgacccggaaggtgaagggatcgtcgttaaggcgttggacttgtttcttggccgggcaattgtatagcttttggtgggtgcacctatagtacgccctgcaaaatagaaatttaataatcttacatctatatgataatcaagtagtagctaataactttgttttttaaagtacgtagttaatgattgaattagattaaaggtatttgataacgaaatctgagaaagatatgtacttgtaacatcgaagtttcaacttccagctgaactttaataataggattatttggtcattctatcactaataaacttggtggttaagaatcaaaagagactgattacaacatatgatgtgatgggaaaatatgtaattaactaaaggaacttcttgtgaccttatatatgaaaagatattattatgaccttattctacattactaatctagaatctttgacttgttctggacgaaaagcttattttcgtcttccaagttccaactaaacttgggttatattaatctcagatatagtataaatacttatttggtaactaaagttaaattacctaggaaacctagagccaagaatttctttttgaccgtatttacgccaagtatggttatcgtcgggtggcagatctgtgttccccgtccttagcgccgccaccaacaccgtttgttcttctccttcgtccttcctaaataacgtactcatttaatgattaaattttaatcgtagtatcgtacatacgtcatataaagtacataccaagttcaattattggtttgcaaacaaaaaaaaaaagtttgaatgtgaagtggacttgaggtggttttccacttttggctaacctagtcacatgtaactggttcaacccacctctcccctttatggagttaaaaaaaatgtagaccaaaaggcaaaagaaacatgaaagtggactaatcaatgatcatcgatttaaacctagtgagttttaaaaaggtttaaatatttgtatatgtatgttcttgctttaattaatttttggtaaagattagggatacaaatatatttaccacatttttatgttctaatttgattatgttatcattcataatatttatcaaaatctgatgttttctgaaaaaatatttttaaaaagatgtaggtacatcatgataaaaaaatgtatctaattaggaaaataaaatttgcaaaaaagtttttaaaatttcgtgataattgaacaaaaactatgttcagcccaaatatttatatcaatttatgattattattattccgtcatttcattattcatctcatacacatccattaattttgtttatacgttacgtacgttaccaattttgttatatgcactttgttccaagaaattatttgttacatgtatagcacgaattatacctttgttataaatttccagataaaataatacttgtatattttaccttctccgctgccttggcgtggaggaaccgctagcgccggatctttctactgcagccgtcaaattcctttctccaccaccatcaacggccatgagctgcgtctggaacatggcctccgttccttgagacgacgtggacccgccataccttaaccaatactcttgcatcagacccggttccatctgcatcaacatctggtttgcaacggacacaatcaccggtttggttttgtttaacgcagtctcggagttcttaatctctagtaacatcttcagccgctcgtttgcatcactgaatgtctttacgatctcgtcaagagatgtcaatagagattccggtggcttttccggtaagctggactcgagcgatttaactagtttcattccgtggaagatcattgacattacctcttccatctggtaacttatttttttgtacgagtacatgtttttaaaatttatgcacacatacatatatatagacgaagagatacgtacacgacggttagtcttgttttccaacagtttgcttcgatgttggttccaactctattgaaattttgaatatgcagattattcaaacgttgtaattatctacttaaagcgacataatatcattacctatactgttattttttggggctgggttaagtaaaatggaattttctttgtcgacaggtgaaatatgtccaagaatcaacaaatatttactaaataacgttacaaatactcgtttagcaaaatccaaaccaaagatctaactaatgataacccattgacccggtcggagatacttaggatgggcgagttcgttttttgttataaacacggcagaggaactggtaataacattgaccaagtcatggtcttctatatatgttttgagacttaattaataatgattatttatttctttcaaatttcaacattacaagattttcttagaagtctagacgaagacttaagattttcaatgctgagactgttgaatttttttttcttaaagtggagacacataagctaagaaatttctaaggcgttgaagcaagtttggtaagtttcttgacaagattcctaaatagaaatttactttggatccgaattatgtcttgttatagttacttatagccccttgcaaattggaataattaacggggataatttgcacaagaaaatcattggacaagaatataagcccacaaaattatacggcccacatactatgaattcggcccaaaataaaaatgtcaacagatccaaactctacgacgtttttataagtaaataaaacaacacgaattgtaataagcaaacacgaaaacggcaatggagtaagtccgttcaggtcgatcataataattccgacgaattagaaagcgaaaaaacaaatctacgaaattctcctctttccgaagatgcagattgaagaagaaggagaagaatcataagaataaagctttgaattatcccgttttgctccaccttcgttcttctgattccatatagatccgtttaatagcagcaacgttgttcaattgagaaggtggaaacatgtttaagttcttaaaaggagtagtggctggatctgggacgggactcaaggatctaccttataacatcggtgatccttatccttctgcttggggttcatggagtcactttcgtggtacctccaaggttatttctcttttctcccctctctccggatgtttgtaattctgcgttttttttcttcctgttacttgctttgatcttagctcttctttctagtattttttttatcctgtttgttttatcgttatacttaggattttgagttctgcagattagctgtgtaatcgaattcggttctgtttagtgttgctttatgtcaaaacgaaatacgataccaaaggaaatgtaacgtgattcagaagctttaagatttttatgcttagtagctgtagtttaagaattaccaattcgaattattattgctcttggttcttccaatatgtgagtactctgagttttaagatttttggctttgttttattaagtttatgtcttttttctgcttttctgctttattggatctaatttcagatactgtaagttgtgatacaatcttatattctttactgttggtttcttcaggatgatggatctccagtttcaatatttgctctctctgggaacaatgctcaagatgggcatttggctgctggacgaaatggtgtcaagcgccttcgtaccgtaagttctcattaatttatcacatggtttaggctcgattcatacaaacgagattcttttttctgattactgacataaacgtctattgagtactaagttgtaactctaagcacttggaaatcttattcatcaaactagtgtgtacggggaagtatgaagttgcaataaatttatataatccgtaattcattcctacttaagaattccctagttgaactgacacctgcataatttttgtttcttctgactgtcggacttgatggatataaatatcataaatatcaatgtacccttttgatttatctgaatgtcggaccttatggattcctttctcctcttgttagtatcattggcatcattctgttagattatcatcgactattttgttttgcaggtgaggcatccaaatattctttcatttctccacagtactgaggtcgaaactcatgatggctctactaccaaagttacaatctatatagtcactgagcctgttatgccgctgtcagataagataaaggagctaggcttgaaagctacccagaggtatgactcttattatgaggatctaggcatttaatctgttccaacaaattatgtcacactttaatctgtctttttttcataataatggctttgccactggacattatcatggtctgcatggtaaattttaattaccttccgaaaattttgcttttagggatgagtactttgcactggggctacaccagataggtaaagctgtgagctttctgaacaatgactgcaaacttgtaagtatctgtttataacactataattcagctattagagtatataaccggtggctagtcgattttttagttaaaactcttaagttctactgtcttaacaggtgcatggtaatgtctgtctggcaagtgttgttgttacacctactttggactggaaactccatgctcttgatgttctatcagagtttgatgggagcaatgaatctgcaagtggacctatgctggtacacatcattcactattggtgttcactttcttgatcttgtcaatttgaaagccattttctcccccaaaatcttagaattcaaacctgctgtcatatttgttctttaacattattttatgatatccttgataaagcgtacaatgtagtatcatagaccttgttcatatgttcagggtaggaatacctgtcagtatttattgcttttttttcatctttgcttccttatttttcttgttttagccatatgaatggctagtgggaacacagtacaagccaatggaaatggtcaagtctgattgggttgctattaggaaatctccaccatgggccattgattcgtggggattaggtactgtagtttttatgccttactaattctcaatggagattatatgctcctcgacccttagtgcacttgagtgctattctttcactaaagccctttacttccttttttgaaggatgtcttatttatgaactcttctcgggctctaagctggcaaaaacagaggagttgcgtaacactgtcggcattcctaaggttttgttttaatcctttccgtatacatttgcatatacatttggattcttcatatttatggattaaactccatgtagttttgataactttaactccagtgtatttggaacttatactggtgtgattttagtcaatatgcttcgtatgtttccccaaagttttgatgtgttactttttatctgtttgtatgactttgaattctaagagctggctttgatttcggttgaatttttcttttctcacagtctctgcttccagattatcagcgactcctaagttccatgccttctcgcagattgaacacctcaaaacttctagaaaatggcggtaatcttcctgtcttgattgcaaattttgtaccttaaacaattcactgtttttcgcttctttacatgttctttttctctgtatatttgcttttgtcccttccgtcttggtttctttatataacgtgttgtattttctctcatagttatctttgaccattctttatctcttgattcttattttcaacatacttgaattggcagagtatttccaaaataagctggtggacaccatacattttatggatattctgaacttgaaagacagtgtcgaaaaagatactttcttccgcaaacttccaaatgttgctgaacagcttcctcgggagattgtgcttaagaaggtatgaatctgaattttattgggtactaggataacaatttaccttttgagttggaggttttgtgttttgctttttgactttaaccttttggttaatgcagcttcttcctttattagcttcttcccttgaatttggttcagctgctgctcctgcattaactgccttacttaagatgggttcgtggttatcaactgaagatttcagtgtcaaggtttgttcagccatgctaaatttctgtttaaacgctctatacactccaatgctgtatgtatacttttcagttattgtctaaaggtactcccttttatgattttaggtactaccaacaattgtcaagctttttgcttccaatgatcgagctatcagagtttctcttttgcaacatgttgatcaatttggagaatcaatgtctgggcaaatcgtcgatgaacaagtaagatcagtttctcttctgtggcaagaaaggtgttcacctatgggtgtttgacagtactgctgtctaattgcatacttttagcatttacaatgggatgtgtttttactaggtataccctcatgttgctactggatttgcggatacatctgcttttctccgagagctgactcttaaatcgatgctcgttttagctccgaaggtatctgttcttaacccattcaagccgctttatatgttttccgttagaaaaggtcactgtctgtttcatcccatctgaagactttagctcgtctttattgtcgttcacatttatatttgtcataatctagttgtatctgatataaattgtttttctcttttcttttgttgtctttggctgcagctttctcagcgtacactttcgggatccctgttgaaatacctttccaaactacaggtttgtatcccttacagcaatggctggacctttttctttcccatagttaatgtttctagtaaaatgttaccggcttccctacctctatttatggtaatcctttggttcatttttagctggagttaagaggtcatatatgtggctgctctatttgtcataatctagttgtatctgatataaaatgttacctctattgttaccggcttccctacctctatttatggtaatcctttggttcatttttagctggagttaagaggtcatatatgtggctgctgcacttctttcacagtattgtggtttaaaatttatattattctctcaggtggatgaagagcctgcaatcagaaccaatactactatactactcgggaatatcgccacctacctaaatgaaggggttagtctctagcagctttgtttttttcttttcttttgattccttgttacctttgtggatatattcttttgtttgtccctaatcaataatcatgattatatgatgcagacaaggaaaagagttttgattaatgcttttacagtgcgtgcattgcgtgatacatttccacctgctcgaggtgcaggtatgtgaatataacaggatcatagatattacatattgtgtgggatgtttaggttctatgaacatcatttcgatattcctgttgttatcctctttccaggtgtcatcttatatctcactggattttactcttcgcagggattgttgcattatgtgccaccagtactacttatgatgacactgaaatagctactaggattcttccaaatatcgttgtgctaaccattgatcaagacaggttacttatttaagtgcatttcgatccctttttcgtccagtattttcgcttccgacaaaatctaaagcatttctcttattttcttatagtgatgttcggtcaaaggcatttcaggccgtagaacagtttcttcagatattgaaacaaaactatgagaaggtaggagtgatgactctgccgaactctagtatttccttgagctacttttatcctttaagtcttatgtcaaagggtatggaagataactaaattattttggggtgttaatagacaaatgctggagaaataggagccagcggaggagcctcagctatacctgaaactgctggtctgatcgggtgagtatagtcaagtgaaatttaacagatgaactatacatgaacattggtcagagagttaaatataccaactgtactaatttatttacttttatagatgggctatgagttctttgaccctcaagggtaagccattagaacaagcgcctcttgcttcttcttcttcagcaccatccctagcagctgctgcgtcaaatgctacaagcacaggtacacttgagatcccttgccataacttttctctcaacctaagtaaaatttgttgaaatgtgcaactgcggaatatgtaaatgatcataggaaagaaaaaagaaactgccttgattatatgtttgatttatcgtatatcgatcactgtgctttcggcgagtcagtacagttgccagtatttttctcatttcctattttgtttatttatttcttggaaatattcctcagcaacggaggcaccgagtgtcaaagccagtcatcatacacgttccaactcggatttcacagatcaacctgcaccaccatccccaacatcaacagatggttggggagatgctgagaatggcattagcgaaggtcatgagagtgacaaagacggttgggatctcgaaccgctggatgaaccaaaaccttctccagctcttgctaacattcaagcagctcaaaaacgacctgtgtctcagtcctctagaccttcaggtatttttttaaagctgaatctgtttgcctcaatgtaaaactttctaaaattcatatggttatgtgttattcctcctctttatagctgcgacaagctcaagaccaaagattagcacagtgaaagcagctgcgaaaacggaagacgatgatttgtggggatccatagctgctcctccacctgcaactacttcaagaccgttgaacgtgaaaaagacagtacagtctgatgatgaagacccctgggctgccattgctgctccaccaccaaccaccagagcaaaaccgttatcttctggtcgtggccgaggagccaaacctgcagctcttaaactaggtgcccaacgcattaaccgaacctcatctggaatgtgatgaacactaaaggaagaagataagcagcatacaatgtacatttttttgaaagcatctccagatgacccaagagctcaagccaaggaaccaacgaattatttgatttgtaaaatcattcattttaaaccataagagtgtctctatttttactctacactaccaaaaagagagtgtttattctgagaagtagaagtgatgtaagaacatcatctattcagaatgtgatcttgttcaagttgccttgtcctcatctaccatattactctttaacctattcaatacgttgaatatctcagccttcattggagaagatgaacctcctgaaaagaaaacattagttctatcgctaacttcaatccaactgcaaccaggttgtttatgcaagcctttctccttcatcagacccaacagctttgctgcttcgttcttcaatcctgcttccatgtaaagattgattagctgaacataggtactgcctctttccggttccattctcaacaacttctcagcagacaatatcccaagttctacattatgatgagttcttgaagcagataagaggcagagccatatgctactgtctgcttcaataggcattgcttttataaaactgtaagcttcttcgaggagacctgcacgtcctagaagatccaccatatttgcataatgttccatatttggttcgattccatagtcttgtttcatgaactcaaaaatgtttttcccttcctccacaaaaccggaatgattgcaggctgaaatcagagacaggaatgttacatcatcgggcgattctcctgcctttttcatctcatcgaacagactcaatgctgtaatacaatctccatgggatccatacccatatatcattaggttccaagtgatcaagctcttatgctgcattttcttgaagatgttctctgcatacttcgaaaacccgcattttacatacatatcaatcaaagcgtttttcaggtgagtatccgaaggaatgccgagtcttaatgtataaccatgtagacttttcccttttagcaagcttgcagtcgatgagattgctacaaggacacttgtgatggatactgaatcagggaagataccttgactgagcatcagattgaaaaggtcaatcgacagttctggaaggttgtttcggctgtagcaagatatcattgaattccaggcaaccatgttttccgtgctcatgctagtgaaaactttgagagccatttctggtaagccacacttagaatacagatcaataagggagctgccaacaaaaacattcagcactagcccagttttaatcatgctgccatgaacctgaaggccaaacctgagagcctctaatccagcacatgcgtttgtaacgctcgtcataatatcagaatcaggtttcaagctatcatcatcatctttcatgtccccaaaaacttttagagcctctttgaatttcccattcttgcaaagtcctgagatcagggagccccacgcaaccatatctttttcttccattgatttgaagactaagtaagcatcaggatcacatccacacttggaatacagagtgagtaaagcactctctattgtagacgtactttgtatcggtctcttaaacagttctgcgtggactgatttgccatagttatacaatcccaatacgctgcaacaggatataacattcgacaaggtaaaagaatcaggcaagacacttttctgcctcatgaaaccgaacaaatccaaagcagagtacccataatcattctctgcataagctgcaaccatagcattccatatctcaagtcttttatccacaacgcaactgaagacagtttctgcctcaccaaccataccacattttgaatacattgacagtagagaagtacaaacatacgggtcattgtgaagtcccatcttcaccacgtcgcaatggatctgcctaccgaaaccagaattctcactttgactacacgcaccaagagctccagtgaatgaagtggaaacaagcttgacactgttattctttgcaagcatatacaaatccaagctagattcacagatcccactaccgccaaaccctacaatcatcacattccatagtacaacattcgatttatcctcaatctccacaaaaactctccacgcatctatcgataaaccaaacttgaaatacatatcaatcaaagcagttttcaagaacgaatcagtatctaacgaattccttaacataaatccatgaatctgtttcccttcttcccgcctaaagtttccttctttacacataacactaacaacaatggataaggaaaaagcatcaggtcttacaccaaacaccagcatccgacgaaaacaaccaaccccttccttaaatcttcgaaatttgaagtacccatcaatcatagagttccaaacagtaacatcccgagcagaaactccactctgactctgagaccaaccgtcgaacacttggacggcataatctaaaaacccacattttacatacatattaacaagcgaggttgcaatgaaaggatcatatcgccatcccaacacgacgaccgaaccatgaatggttttcccataactgagattcgtaagagccgagcaagctttaagtagagaaggaaacgtgaaaacggaagtccagaaaggagaagaaccatcatgcttagagtataaatgcagagcttgtagatactctcctttctgaattagagctctgattcctgaattaatcgatgccggagaaatgtaagaatcagctacacaacaaagtccccgacgaatgtgaacgtcgtgaagcttgaaacgcatatttgcattgtcgtttaatacattaaaacagacacatcgtcgtttattaattttctcatgattgaagtaaatttcaaaaacattacacctaaataaagcttacaatataaactactaacgaataagccatgtataagcaatccgcatgtgttacgaatttacgcaatgggtgatgataaattcatgtttgattatactttatgcaaatttgggtttttggtttagatgatttacgcataaaattttatgggattccttacctaaaggatcacttccatgattaactagtcggaagtttcaacaaagtttcgatatttgatatctatagagaaaaaaactattttctcatgaggtttttatattcgttgaaacttgtaagtaattttgttgttgttgttgatacactgatactcatactcatactcaattactcatacaaacgttacatatacatatgctcagaaaaaacaaaaacaaatgggccaatgatgtttgtttaagcccataataatttaatgaaacacattaagacatcttagcagaaaaaggaaatatgggccgataatgtttatgtaaagccataataatttaatgaagcccattaagacatcttaggagaaaaaggattcctttttgctggctgtttccttttttctttacaacggtcaatcggatcctatttaaacagcagatgtttctcaatctcaccattctcgtctttgtttttcctctcgctctcgtttttcttcttccatggagagcgattaagagtttctccaagtttgtcatcaccaccgcaaggtttggttttatctaatttgttaagagtttctgattgtgtattccatgaacttttttccgattcaatgtttgttcttatcgaattcgaacctcttttattttttgattaacaatccaattgaatcttcatattagggttttagattttgaagtcgggtttcaattttaagattttaaaaccattgctttgtttcaaattagggtttttttgttttaagattttcaaattagggttttgatttcaaacctgttttaagaatttcgtttgttgcaaagaagctttttcaaaacttttttttttgttaaaaatcttagcttttttaaaaaagtttcatctgttttattcgaatcttaggtgtttccaaagttttgtttttggttttcttaaaacccaaaagaaagggatgacaacacttatgattgttgtatgtccggtttctacttgggaaaattgtccctttatcggtccggtgttgcctaaacaagcatgatcatgcttgaaaacagagataaacgtcctctcaagtaagggcttgtcaaaagtatgtatcttgctgagctgggacagcattgatacaatattcaattatctgctttgctgagctgggacagcaatatactattcaatgatctgcttattaagcgatgaacaattgtcctttttataaggctattaatgggtgttgcgagattcgaacttatggttcatatgtctgctttaagagatcttgctgggctgggacagcaaattgatcattcaatgatctgcttattataggagaaataaaaaggtcctttttataaggcttgtttgtgggagttcgagattcaaacttatagttcatatatctgcttaaagatgtgtattgctggactgggacagcaattgatcattcaatgatctgcttaatgtataggaggaataaaaaggtccttttcataaggcttgtttatgcttgctgtgatattagaaactttcaattcaattgtctgcttatgctggactgggacagcaacacaatattcaatgatctgcacattgataaaggtacaaacgatatttttaaggcttgtcttgtgatgtttctggggttgagaaactcagttatctgctaaaattctatcttgtcgagctggggacatgatgaagcttgtcaaaactatatcccaaattctatatcttgctgagctggggcagcattgatacaagattcaatactctgctgcttgatgaatgagagtaaatgtcctttaagataaggcttgttaattgggtgcttcgagaataaaatattcaattatctgcttaaaaatttgttgctgggctgggacagcaatataatgttcaatgatctgcatattaaaggaggaacaaaaacgtactttcaaggcttgtctaatgatgtttctgaggttgagaatctcagttatctgctaaaattctatcttgtcgggctggggacatgataattcaacattctgcttaatgatgcttttattaaggcttcttgatagtctgcaaaatactctatatcttgatgggctgtgaaaccatgatgatgatcaatgttctggtggagtaaaaatgacatctagtaagacttctctaatgatgtctgagcagttcaagtgtctgctctgctatattgtgcatattgatgggataaagaattcttttaacgatgcttctcgataggaagattcaatagtctgcaataactctataatttgatgagctgggacatcatgatgatggtcaatgttctgcttgaggaaaaatgttctttattcaagtttctcttgttgatgttctagtatctgcttaaacatcatgacaaaaattcaatattctgcaaaagctccatattatgattgcttctcgacaggaaaattcaatagtctgcaaaatctcatatcgtgatggactgggacaatcatgttgacgatcaatattctgcttgaggtaaaatactattgctgagctggggcagcattgatacaatattcaatactctgcttgatgaatcagagtaaatgtcctttaagataaggcttgttaattggatgtttggagcatgaaatatatctgcatattaaaggaggaacaatgtcctttcataaggcttctctatggttgcttgactgaggcagcaaaaaaacatccaattaaaggaagaacaaatgccctttttataagaggcttgtttatgtgttgagactagagttgagatatgagatatttcaggtcatttgtctgcttagagagatgcattgctaggacatcatgagaagatcaatattctgcttgaggtaaaaaaatatcctctattcaagcttctctaataatgtatgactgagaagtttgcttaaacatcatgacaaaaatttcatattctgcatattgctaaagggaaaatgtcctgcaatataatactcaattgactgcactgatggaggagaataaccttttaataaggcttcttgaataacagattgaagagttcgagtgtctgcaataaaagctatagatcatcttgttgggatgacaacatgattcaacattcaacgatgtcccgatttctgaatttcaagtttctgcttgttgatgggactataaaatggtgtcctaagattgaaaaattcaagtttctgcttaaacgacagttgcgttgggacgacgttataaaatacttgaaatgatatccaataatctctgagattcaagtttctctgctaagaaaaaagaagaattcaagtttctgcatatattatcttgtgttgtactggggcaacatgatatattcaatcttctgcttagaccagcctttgaaaaagcttgtcaaattatataaaatcttcttgaggaaagatcttaggacagatttagagtattcaatcctctgcattcatcttgctgagacttgatgaagaaagtactcaatcctctgcgtctctaccgtctttgcaaggaggtaagtgtttcatctcaactatattgcactcgtctatgcagtgcagtgttatattttgacattggtctagtagcaattgggaagttcatttttcttctacttatgtacttctcttacaaattaatcactgtgttctaactacattttttggtgattgcttcgtaacagggaagtattgcagaaatccagttacgtgactgttgaactttctcagaggtgttctctttcagatccttaactctcaggtttcaggttgctctcttactctttcgcatcttgttgagcaaaatttcgtaaataagaagcataaattttatcagaggaggataggagctacatgtctactatttttagttttttagccaatgggagagctccacttcataccccacttttaccaatcgtgtgattccacactcagtctcacccatgtcgcgttgagcgcgtgtctacgatttctaaagggggttaatccacaaaaatcatgcctttttggatccacgcacctcattctcaaaaacccatcgcgtgtcttattttttttggttttcttctctaaaccaaagtaaaccgaaccgagatcaatttgaatttcaaaaccaatgtaaacccataaaacccatcgctgtgaaaacaaaaagctcggccactgtaaccacaaaaatggagacgacacaacttcgaagagaaatcaactcgaaatagccaagagaatgttcgaaaccccccccccccccctcaaatccgatgcttcctttgattccagcctccaaaagcccatctgctcaaatcttcatttcgaggacgaggactcgaggagtattacaaggtacctctatagaatcaatggcttccatggattttgaaactttacttctaataaacaccattgtaatgtctttttggttgtgtaaggaacaaaggatagtgaaagctgaagagtgggattcgtttatggagtttcagagtttttttgactaagtggcctctgtttttgattcttcagtggtcaattttgtgatgggatttgattgaaattgtttttgatgctcactctttatcttagttatgatgcattttgtgattcctagacatgttaacaaaatagtattgagcctttgaacttttgaaacagagcctgactatatatcattgaagctttgtcttttacgccttttaaaaggaagttggcttttggggtgtacatcaacacttaatgtttggtatcattgttgagaccttgaggacaagatggttctcttaggggtgagtaaggtaatatggagaagggctgtctatgatgcagagaagaagaagatgaacagtgtagacagtgcgcgaaagggtaaaaggagaagcaggagatggttagtgcaaccacagttacatgggtttaggatctttactggcgacaagggaccttttgatccaggaggagctgattgtgtgtatgagctggttagagtatggaggctatttgagaagcctcatggaacttgtttgatggtcgaaacgttttcttcaatgtggccaacaaagacttcgatatatcaagataaatggcactagagctgtaaagggaaaaagaattaagaatatgaagccaaaaaattacttatggaatgctaactgttgataaaactgcggagaaaaagatggttgtgtcgagatactggttggaaatcgtaattgcatttgagaaagcactcgacaagataacatattctcgacctaagaagcatgtagttaagagttttctgtaagaacctaagatagaggctatagtacaaccccaaattcacgtttattagctgtgtaacacattgctagagggaataattgagatggaaggtctgcgtggaaaatttcagtcaagaagcatgagttattttgagaatcattttgctgaaattctcacacatgaagtgttccattccacttgctaaggccaccggagctaccctcctatgaagtagttttcttgttgtgcaagggccaaggggttgtagttcgaaagagaagataaagaacctctacttaggattcataaccatcttaggaatcgccactgtgcttgtttctctcctcccggagtttcgggtggtgggggcgtctctgttctttggaatgggattctctggcttagctccgattcttcacaagctgataatcttttgggaccaacctgaagcccttcacacgacatgttatgagattttgatgggtttgctttatgggttaggagctctggtttatgcaactaggatcccagagagatggatgccgggtaaattcgatatagcaggacatagccatcagttgtttcatgttctggtagttgctggtgcgttcacgcactatagagctgggctagtgtatcttaagtggagagatattgaaggatgttgaagatgaagattgaagattagatggattctttgatgttttaaatcttgtttgtagtagcttcatataaaagttggattatgtaaagtcttatctataatcaaacgtttaattgtttcctttattcaataaaggattcatattgttaatctacatattactggttaaagaagctcaaggattcatatttttagatgattccagtcttgcttgcagcattcaaagtatcataatccagtgtcaacctcatataagcctccttgtgaaacggacacaagcctaactggtcttcttcttgaaggtttcccctgactggtctggttggtatacatttcgaatgatccataagtgttgataaactacaagttcacaaaatatgaaacaaaatctatgcacatcaataaaaattcactttgaaaacgcagaaaattcataaaattcataagtgtttattattgttttcaatatatgagaggaggagctcccctactatttttagttttttagccaatgagagagctccacttcataccccacttttaccaatcgtgtgatttcacagccagtctcacccatgtcgcgttgagcgcgtgtctacgatttctaaaggggttaatccacaaaaatcatgcctttttggatccacgcacctcgttctcaaaaacccatcgcgtgtcttatttgttttggttttcttctctaaaccaaagtaaaccgaaccgagatcaatttgaatttcaaaaccaatgtaaacccataaaacccatcgctgtgaaaacaaaaagctcggccactgtaacaacaaaaatggagacgacacaacttcgaaaagaaatcaactcgaaatagccaagagaatttgatcttttgaaacagagcatgactagatatcattgaagttttgtcttttacgccttttaaaaggaagttggcttttggggtgtacatcaacaacatgttttgtattcagaaaagcaaaaaaaggtctggtttctttctctcttatcttttgccttccaattttcagtacttgttgttttttgaataggtctaatgagttccttttaggtttgacttagacatacaacttcagttatgccaattaaggtgtaacgtttgcttaggattaaataaataacccaacacatgaacacaaatagtgaaaatattcatacacatctacttaacacaaatgcaactaaacgcaacacaaagttcgatcactcgatactttgctttatttttctcaaaattgttttggttggaggtgatgttgctttgctaagtttcttacaaataaaagaaaaatttacattttgaaacggcttctggattttaagccgatcgcaatggagacattgttgttgtgagtaagcaatggaaccatctcaagcaactctttgatagcaaatctagattttcatagattctaaaccgaattttcataaaaaaaacatttaataaaaacagtgtttttgtgatccatattgatttttttttagaaatttcctgaagaaagtaaacatctggtaagcaaattttgtgaatctttagctttctggccaatacaagtaatattgttaacaaacatgataaagctcccaacttcttttcgatatttcaaaatattcgatgagcaaaccagctccttaactacaaaacttacgccacggtttatggtggcgaaaccgatttgatcaagttttttgtgtacttctattgccagtaccactcatcttctttctcttcttaccttgttgccctttttgacgttcgtctctctttctcttcattgtttccttgtgatgtgatttcccaactaaagacggttgttctctcagagcaaaactcttggcgacatgacccaagtgaagcttcttcaccacgaaaatactcttgagctctcccttgtgagctgcatatcccctaacccaagagacaaatgcattcttggccaggctcttcatctttggctgtgaataaaacagatacaaacaatgagacatttagaccatcagactgtaaattaatcacatagagagggaggaacacattgaagagaatcgtacctcggcgtaagtaagggattcaagagctctctgcagagatatgacccatggatgggattctagagataggacctttttgattcggggcatattgccgggtatgggaaatttatcaagtactttcataagagggtactctgtaagtgatgcaccatgtttcttcagctccttaagatagtctatttcaatcggttgtagaaataacaaggcttctcctttttcaccaatacgagctgttctaccaactctgcaaccatgaatcacaaacacataagctcagtaaactcaagttactaagtatctaaggtataaccgtcaagtggttttttgccatttcagaatttacctatgcacatactcggtagcttccccgggacagtcatattgtataatacatcttacttttgggaaatccaagcctctagcagcaacatctgtactcaacagaacagcctgcttctctgttttaaaggtcccaaacgcagatcttctatcctcctgctccatacttccatgtaaccggaacgttttgcacttgagaaacaactctttagtcccctcctcttctgtctcagaattcggtggccactggaattcactcagaagtgagtaatgaaaatctacagcatcacgtgtcgaaaagaagacgaccacctgtaagaaaacagccccacaaaacctcaattaacggagaattttaaaataaacagacagttatatgacaggaacttctggcttgagatttaccttttgagaagcttctctttcaaaaaggttcttgagaacagaaagaagtgccacaagccgtgcaccacatggcactgcatgtaatatatatttgtatcaaactagaagcacagaacaatacaaagagattcaagtgaagataaatgtacctctaagatatctctgtaccagctgtgatggtattccatagtcctcagataaagggtttgcggatttgttaacatgaattaccatatcttccgcatcagagtcaggagccgcaggagactctattgatagattttgttgcaatttggtgttgtcaagaccaatcattaccggatcgtccaaactaagttttgcaagatcgttaactttatcattcaatgttgctgacaataacaagttctgcttctgaataccctttggaacaatatcatcttcttccccttgctcgttttgccctgaacctagaagcttaattatctgttctatctccttcccataacctaattcgagaatgctgccaaaatgcaaaggaagaattaattaaaggaagcacaggatcaaggaagatattaactttcagggtacagcatttatacctatcagcttcatcaaagatgacccaacgcagatttttgtgcacaaatgaagctgtgttcttcaaatggtcaagaaggcgtcccggggttgcaattagaatggatattcctgaaataaaacgattagtctggattcaaaagtgaccatctcgcttctcacaaatttgtacctttccttaatctagccttttctttagcctttttctctcctcccataacatagccagggactatccaatggaaccgatgcagtaacttctccaaggtttcatacacctgaaggcatagttcccgtgtaggcacaatcaccaaagctgccacaaacaagtgccaagtatcaaaatcatcactttaccagcaaagaaatactaaattgtagctagaacaaaagcacataccaaaagttccatgagaacgatcaaccttaggagaatgaccctgcaagtgatggatgaggggtgccaaatacgctatagtctttccagtaccggttggagcattaacaagtctatacatttatatatctcaagttaactgaaaacaaaccaaactacaaatgtaatcatagttcacacaaaaagaagacagaaatttgtaggaaaaggatacacatctcgaccagagagaataacaggaattgcttgagcttgtacaagagtaggagcttcaaaacccatcctttctgtgtaaattgacacggaaaaactcaaagtttaagctcactaggcataaacaaaggatgtcaacatcggcagaggtaaaaaagagaacctttgagctggtcagagagcttggtatctaaaccaagtgaagagaaggaacaagaagcgaacaaaccgctcttcgctttgctagcatctttagcttcttgctttgtttctcttgccgattgttgggctctcttcatcatcttattcttcgacgaaacaaacaagttctctgtttctttccctccgtcttcgactactcaacgacgacgacactgcaattgcaagggttttgcctcctatacgtcaccgtttacgtctgagccttcaaaaattgtgggcctctcaacttcaaagcccatgcgcattgtttatttttttgatcggctttttacggtttaagtttggattaaaccggttgggtgtacccgaatttgaaacacccatacttatatccatggctccgaaagtctgaagatcatacgaagcctattccaaattccacactccactctaaacaagatactgaaacatcatttttatagatgtaagagaaaaatttacagagattttgtaaaatgtttatgaacaattcacattcatgagattcaggcctaaaaatcgattacaaaactcacttcgaatcatctctatcgttagctatctctaaacgaatgcaaagctcttgccgccttaaagccatctctttgaatatgtggtcctcaaaacgattgttctacctcatacttcttcaatctgcaaaaccagaattatacagaacagagtcaaataaaaataccagaagagtagccgagtcgaaatgggaatctgtgaaacctataatcaacctgaggaaggttcatgagctcaagaacagccttagtcggggtcagttcattatctattatcttagctacggctgtcaaaaccggcagtttcacattgtatttctgtgctaatgctatcactgccccggctgttgctacaccttctgcaacctgcgcagcaattgttatttgattcatgggtttcagattcaaccaatcctttttgttttaccatatgaagagcgacaccaatgagaaacacacctgattcatagaggttagtatgtcatctagtgtctcccctgaccctaacctgactccaactgttcggtttcttgaaagatttacaaaacacgtaagcattatgtccccagttcctgataaaccagtaatggttgttggctttgcacccatcttctcacatacaagacagaaaaacgcagaaatgcaataaacacaggatttagtaatcattgtagtgagttgcatggaccgaaaaaaccactttctatgaagcaattatagacacaaattaaacttactacctttgtggctaaccatcttatctctgaacaaccttgggacacaagagctgccatagagttgttaccgagattcattccatcaacaattcctgcagctattgctagaacattcttcagggcaccggcgatttccacgcctgtaacatcactgaaatgatcagaggttacaagctgagtgcacaaaactccctcgaggaattaagaagttgaccattagagctcagtcactaacaccacacatatacaagacatgaataaactctcaagcaggtaggcaaatggatattatcatagcccagcagggaaatgcatccagaaatcattgaaaccaatggagtcttgttttgaaatgttgtacctggaagtatttattctcaagtaactagaagcaagaagctgctgaacagcattggccaatttcttatcttttgaggcaaccaccattgctgcaagcaaaataacataccaaaagaaaacatttctcatcattcagcaatagaaaactataatgctattcgatttaaacaaaagaagaacaagagtcaaacaaaccagttggtaaattgttcatcagctccagagcaaatgacgggccagaaagagcaacaaaaggttgccggggattcttaagcgcaatgggaatgatctgagacatcatcctaagagtattaagctccagacctttgctaagagatataaaaggcaatcctggatcgacataatcggcaattccctctagaaacgaagagctaaactgcaacaacaaccccacattaatcagcagaacatagaaacaaatcaacaaaactaaaaacaaatactcaatgtgcttaaacctgcacaggcacggcatgaaggcagtaatcagcatcaagcaatgcagctttcgcatcagttgtagcaatcacattctcaggtaacttgtgctcaggaaaatacttactggcaacagaatcaaccttatcactgcgaagtcttcaagaattatgaattgtgtttggataaaaatcaaacgctataaagtaccaattatggtggttctcgttgatagattgacaaacaaaagagtcacgaacaagcatattaacctctaatccctctttccttctagctacatgagcagccattgcagtaccaaacgaacctccaccaagaacaacaacctaaaaacccccagattctttcaaattctccaaaacgcaaacgaaattaagaaagaaagtgaagataataaaaccttgcgagtacgctcaagaacatcggttttagctttagcgcgcaaagaacgagaccatcgaaccaacttctcccaagcgatacgaaccactttgcgctggtcacggttcgtattgatgatatcaggcggaccagagatggagtcagcttcgggaattacatttggagaagaaacgcagcggacgataatagcgttgtgtttaagaagcggtggatgctttccggagaagtggaggtctaagcatgcaggttgcaccgaagccgccattttcgcagagacttggagttggagaagaacccaaccaaatcggaaagattgagagcgagcgagccagagagagagagagtgaacagattctttttcgtcttttgcagttattcttggcccttaacgatattcagttgggcctttttatctcacttgggtcgtctaccaaaacgctctttcctctgtcgttttattggttactagagtccagttcatagggagtggtgtcgtttcttggtgttttcggattttagggttttcggttttattttttttttttatttttttttgaatgaatgcaaaattttattcatcaaaaaaatcatggttacatcaagtgcttcttgtttgagttgttaggctcatactttgtcctagctatgccaattaaaacctagtggaaagccaaaatacaaacaaatcatcatattttgggtttccttgtttctgaagaagggtgattcgtttgcgaacgtttttgtcgatgttgtttccaatggccaatggtgtgatagggttctcctcaccatgtcggcgattattcctttctctccatatggtgtgtacctttatttgaaatgtatatctcagcagtagaagatgtttcctcccaagagacgaacttgtgaggagcgtaacaatgcggtcccaagaagaagtgtaatgaccttgaagtaggcctttcatgagcttctcccacacttgtgttgaataagggcactgaaagaagaggtgatttcttgtctctaccggttcagcacagaatttgcaggtagtatccacttgtgtgttccatgatctcattcttgcacccgttgttagtctatcatgaattgcaagccaagtgatgaaaaagaacttcggtgtagcttccgagaaccaaatctctttcgcccatctgcagattggtttttcaactctcagcattttccaagtttcatttgaggagaagttgtgtttaaaacctgtcttccatttccatagaatcaaatcttcctcttcaaccttcctcctcacccttgtttccctgatgacctcttccactctatttaaagtctccactctatgtcgtctacctctctgagaggccaaaacgtcacccactgtggcttcttttgtaatacccaaatcaatgcaccctcgatctccaaaagtatcaaataagttccccaaagaggaccatgtatcataccaaaaggatgtccctctgccactttttatttcaacctgatagaaatcctttgccaagtctctaagctttaagagtttcctccacatccaagaaccttgagatgaatttcccttgactgtccaaaacgttttttccgaattaaataggcatgaatccacttactccacagagacgttggtgctgcaaataaacgccaaattagcttcagaaggatttaaatcaggcccactccagagaaaagcagaacaaagttgttgaatctctttaatacaagcgccggataagctgaatgttgaagaccaaaagtttaagaatctctttaattcaagcgccgggtttttggttttaatgtagtagagaaccaatcttttgcggatgactttatatagttttgatttcgcatttgaattcaattttagttagatatatatgtttaattctcaagcaaaaatagtttatttaatagttttaatgatttttatgtttgtgtcgtctttgtatcaccattaaaatatcatatcgtatcgtgtcaccattttaaattcactatctgtacttaaaaattaggctcaaattatgggttattcggtttgtagataagaattgtttggttcaaattagattagtttagtttattcaaaattaaacaccctcactaccactagactcaagtccaaactttcaaaacaagtttaagttaggttagattttggtgaacattgaattccaagattcattatccaaattggatacgtatcaaactcaattagctccgctaattgccacctcttttggacagaatgatagaaatatgatttgaaattaaataacgtgtagtaccaaatctacgtatagcatggttttatttcagtctcaaatacaaatcatgtgtatactacgagaaatcgtgcggtacatacacaaatcagaaaaagaaagaaaaataataacatcatgcacataaacaaaacatataaaataaaaaacataaaaaagattggtaggtttggtccgatctaaagtaatgagaacggagacacatatgaaatgacacgtgttatgatgttgaaagcttccatggagacgtacaagtctccggaggagacaatttctcctctgcgtctcgactttcgactctctctctctgtctctcggagaagaaagagattcatcatcttctctcaccattaatcttccttgccaaagattttcgagcccattcataagattccggtgaattttccgaggtaagagaagaaaaacaggattgtactcttatatgaatctcatcgtgattcagttaagatcctttgctcttttttttctctcgtattaattttttctgttctaaattgaaattctagacctttcttgctgcacaagattcttactcttcttttcacgcagaaacgatgtcaatattgtgcaacaatggccgcaaaagagataagagaagaggaagaagaaaagagaaagaaacaacgatagaagagactcatcaatgttgttgttgttgcgtgtggcctccattttcaatggttagaggaataaagagatgtttcttcctctcatgttatccatttattcgatgtttaggattggaagagagaagacatcgtcatcatcttcatcaccacaaccactttttatgattccttttgtgtataaagattactatagggcatgtgaaaacatttcttgatttcaagaaaaacatgtaaaataatcaaataaggaatcaagacacaatgaaaacgtttcatggttagggctaacattataaatctctcatggttagcttctgcagttcatgagatgacatttaagcttctcaacatcagcaagcttcaaaggcttctgcataaacatttgagctccactcgctaaacatctgctttcaaaagaccaaaacagaacattaagattgatgatctttactaattacttacactataagaaacacagaaacaagttcttaatctgatctcaatttgttcttacttgtttatgcgagtaggaatattctctgaagacattatcacaacaggaacctctctcagatttgatgactcctgctaaagaaacacacagaagatttttaggttaatataaatctctggatattggttccaagaagctgttatataattaccttcactttcttgagtagctcaaaacctgtcattccaggcatacagtaatcggtgatgattagactcaccttcataacctagaaaatccacacatatataaacctaatatcaaatatgtcctaaggaaaaaaatccatagatcttgaagattttatatgttttttttttgcttacgttacaggtcaatgcatcaatatgctgattttgatctcccaaacccaaatactccaatgctctaagcgcattctctgctgttgtcactgcaaaaattcacattttagagacaaagattgcataaagtaatgattgattataaaacatgaaaggtaaaatgattgaacctttgcaacaagagatcttgagcaacctctcaacgagtttacggtcaataagattatcatctacagctaaaacatgaagctcttcatcatgaccatgatgaagatgatgatcataagccaccacatccattaaagacgaacaagaacctcctgaactgttcatgatctcctttgttccttaaatgtcaagtaactgataaagaaaacaacttgataataagcgagactgactctagcattaatataaagaccttgcagacattgcttttagttctccatcttcaacaaaaataaatcaaaaagacaaaacacaaacaatgaagaagaaagtgacagactcagaagtgtgtatgcatgaatcatgtgaatctctggtgatggtatttatgatggtttctttgattttttaggtgggtgaagaattttccattatgatttcccaactatatataattctgcagaataatttttaaaagtaaataaaaacagagagcaatggggaagagattgcatcaaagaatatcacggatatttcgtgatctcttatttttaggggttttagtttcagtaccagtcgttatagatttaaagttgcatatacttgtctttttgtattgtgttacttgttaggacatgttcttcgaatcgtgtggggtttctttttttcttttcttttggaccactttaaaattaaaaaattgtagtagattcatagaactgaaaatatgatatgaaaaagatttattcggtaacaatctgatatgatttgaagaaaaatcgtataataaaagccaaagaacctcaaaaaagatcataattgttttttgggacaagaataaagattttgtgtgtgtttaatataagaaagaagttgtgtgttttggaggactgattctttgtgaaactaaataaagaaacatatgtgtccggtgacagtcgtacggatctgtttcaggatcttgtaagctgataagataattctttagatatcaactttttcattattatttttcgggttcaaatccttggaataaatggaaacaggtaatgactttttgtcacaaatggaccaccaatctcttttagagatccccatgggccaggtctaagattctttatcatccttccttgtaagatcatctacgtcgaatcaaaacaaaaggaggttgtttcttctaattgaagtaatttgcaagtttatttgaacacaattggtttgatagttcaatccagagtgaatggcttggtttatctgattgaaaaaaccccataagtagctaagtggatatttgtaggtaatacgttgcaatccaatggtggacttgcacagcttgaacgaaaggagtgaacaaagaaaatggaactaagtatctagtagcagagagttctcaaaagggaaattgaaacaatgatgtttgtcaaaaagctaataagaagaaagtttttagattaattcgaattgtgacaaaaagaacatcttttctttttccaactgagtttgcgaatatcaaagaaaaacgctagagtagaggagagaagtatcaactgagtttactacttgatggtcgccttggggatgctggaagtgcaaggtccagccgaggtcatgaattgtatgcctttgtatgtggctacgccattttcatcagtgtagagaccctgcaaatgcatgtgattaaccgaagtcctcgtgagattgaatgtttacgtataataatgcaaacacagtactcgcatcttcggtttgtttaagtctggaacctaataaagggcaaaaaacacataccggtgttatcttctctagttgcttcttttttgggttcagtacatcttctggctttccttcaatcctatataaacatttcgataaagggttcttgagtttgagataaacaagaacaacaataaaataaaaagaaaagagcatatatgagtttaatggctggaggggaaacatgtaaataaagcaatcaaagaggttcgatgttatattgttaaaactatgtaccctgaaaatgaaacacgctctcctggtttagcaccagcaggtggtagcaacggctctaccaccgagtgatcttcacttgaagcacaaagaacctgcagcaaagaaatcaaaaacacagaaaatgagcaaatgtgagagtgtgaaatattttgatagctgatgagctggattgaggcagacagaagagagtattaccagtccttgtgacattacatctcttagctttccaggtttgacatttgtgatgagtgcaacgaggcggttcttcatcataataacgcaggaatcaagaaaccatagataagtaactttcaaccaaatttatagattgataaaccaaattttacgcctacaaacaatattagtaaattaagacataactataccgttagatcctcaggactgcagaactttgctaagccactaactacttgtctcactttatcctccccgacatctatttcttccaccagcaaactgcattgtcaatacataagaaaagtatttcaacaaattagcagatgttcagtgaaatctttaacagagccataaaagtgaaatgtttttgaccacaaacctatccgccgatgggtgcttccatgctttacgaattagaccaacctgaatgttaagcaaactgacactaagctctgcctctttcttagctggttctggttcagcaggcttcttcttttcctttttggcatccttctcttttgctgcatttttctttggttcctacacgaaaaaggacagaggagaacaccagattcaactaattaaagagactcacagtcattgaaatcaaacttaaaagttaaaataagtacctctggctcagttttctttgtgcccagctgcggctgcacatctggcttgtcaacaggctttacaccttctgcagctttttttgaattagaatttgtttccaccttaatggcaggttttggtacctacgtttagaataaatgaaaaagatcagaaaaccattttctcatcgcatgtaatacatctgaaaaaagtagcatgttattattgtttctcagtctaagaaaatgggtatgaaaagataattcacctcgaagctaaattctggtagcttcacaggtattggtgcaaataatgtcgacaactcttctttattctgtaaaataatacgcagcatatattcgtaaagcagacaatcacaaggaaagaaaaatgtgaaaggtgatgttcagagagtgcatatctagctatagtcactaacgccgttacgcgtacacataaagtagtcctccatggatttacaggctacctcggcgcaatcaagtaacaaaactttatgatgtcgaacttacctggatgtaattcacccatcttatgacatgtggtactttctccttgtctgaatctgagaggccaagctgggaacagcaagtcaaacagataacagttagtatttaatacctttagtcatcagtttatgaaaatttgatcgtagcatctttatcaagtaacataaaattacttatacaggaacgaaaaataagtagactacggaatatagagaagtggtaccactgaagaatgcagagctgaaaacacagcaacatcagctgccgatggcgtcaatccgtttcccaagagcactgacttggtagctaactctaaattcaacttttcaagagctgaaaaccaatcctttgaatctgaagagaaaccttccgcaaaatctagccacttcaaaacctgaaataggtttttactctttaaaatgtgaaacaatgacgcattatgcaaacgaaagccaacgaatcctcatcatttagcattacacagaactcaaacatactaattcattttttttctaacgtggtagcaacgagaagggaactcaataaattcccagtaagagtttggcgtttatgtctataggaaccaaattcaagaagaaacgacttacatcgttgttttgtgcagatacttcctttccagatgccttcaatacattagaataaagtgtcttgatatcactttcacccgctccgcccacaaaaggttcctaaacaaatgaatcaaatcaatttcagaaacagaaccaataaatcatcacaatgtaaaatcataaaagccaatttctaaagttttttcctttttcatgaccagcttgatgcataagcgtaaacactgataagtccaaaacataaactttctaattgatttcagtacccaatcagataatgttcgagttttctccactaactaattcaaaaaatgatcatacacatactcagctaccaagcaaaacctcacaaaaaagcagaagcttttgagatgtcatcttcttcaatacttacaggatccaaagagaagtgtttgcagagagctgaaagaatcatctgcttcgcctttgaatccatcgtcaacttcttctctttctctattttcgaaattttgttcttctctttggggctcttcgctgtaagaaaacacactgcaatttcttcgatagggtttttgcttgatgtaactaacggtcctaacggacttccaactaacggcgttatctccatctataatgggcctagatatattagcagcccattaatatgttcttactatgggctttaccaccgaaagcaatcattaataaaataaaataaatgaattaacttctcagattcttcaaagacctagagtgtcttcgtcttcgacgacggcaaattcgtggaagctgtttcatcgattccggcttcactgaagcggcgtcgctcgacgtttattattccgacgactaggcctttgaggcagtttctgattaacttcaggcgataatggcaaacagaacagatccgttggcaaagaatataagaggaacgaatccgcagaatctggtagagaagattgtgcgaacgaagatttatcagcacaccttttggaaggagcagtgctttggtctcacggcggagacattggtggacaaagctatggagctcgaccatctaggtggtacctttggtggtagccgcaagcctactccgttcctttgcctcatattgaagatgcttcaaatccagcctgagaaggaaattgtcgtggagttcataaaaaatgatgactacaagtaagatttctaaccaaaagcttatttctgcgtaatctagattggatactgctattagccttgtcgtagttgtttctcaagtatacaggtatggaatgtctctcaaatctattggtcttagataatctactctcttagtttctgcagatatttgttcttgaattactgaaatatttactcttttggtttctgcagatatgttcgtattcttggtgcgttctatctgcgtctcactgggactgatgttgatgtctatcgctacctcgaacctctctacaatgactaccggaaagtgagacaaaagttatctgatgggagtaagtttcattttctttcgatggatccgttgtgtttaacttttgattgatttgttcactaactagatttatttctttggtttggaatagagttttcgctgacacatgtggacgaagtcattgaggaacttctaaccaaggattattcttgtgatattgcaatgccacgtttgaagaaaaggtttcttcttttgcatttgtctgaagctgaataattagtttttggtttctgcagtattttaagatggttaatttttcactctgatgataggtggacgcttgaacagaatggtttattagagccaaggaaaagtgttttggaagacgactttgaagaagaggaagaaaaggaggagaatgaagggattgctgatggatctgaagatgagatggtcagtgctttcattctgcaatagtttttatgtgatctgttttctgtttctatctagcagctctaagatgataccatcttcctcctcttttacaggatcagcgccgtaagagtcctgaaagagaaagagaaagagacagagacaggagacgcgacagtcatagacacaggtatctgaatccgtgacctttactagatacatttctatgctagttaacatttttcaaaaaaaaattctttgtgattgtggaagctgtttgatctagctaatgctcttgcatcatgtctagtactctgtcttttgagtgtctgtttccactatggcatctcaagccatcagcggttggatacagcttccgaaattaaatttgtagagatccttccaggtttctctgtactgacagtgttcagagagaagtattatggatcagacattattacaatccttaccctgatacagtatatggtagttgtcattgtgttactttgaaaaagatcagttaatcatgagagcacttcccatctagtttttagctcaatcaatgttttctttttgttacagattttcattatgattgatgttgagacttgagctcattgtttcatgaattataatttgaccatggttctgtgattggcagggatcgtgattatgacagagactatgatatggatcgagatcatgacagagactatgaaagagaacgtgggcatggtcgagaccgggatagggagagagacagggatcactatagagagcgagatagggacagggaaagaggcagagatagagaacgagacagaagagacagggcaaggcgcagaagtagaagcaggagtagggatcgtaagagacatgaaactgatgatgtgcgggatcgggaagaacctaagaaaaagaaagaaaagaaggagaagatgaaggaagatggaaccgatcatccaaatcctgaaattgcagagatgaatagactgagagcatcactgggaatgaaacccctcagggactgaactgtgaaatgaggacatctttatcaaaccgaaacttggttcatttgcccagctaaaccggttactacactgtgatcctactcactatagttttggtttttttgagtttacctgatccctctttaatgtagaacaaaatggagaatctgtaatggcattgtactgtatgttctctaaaccgtaaacgaattgtggtcgagaaattctgaatgtaacccggttcttgatattagttgtttttaaggtaattcagataaatataaaaacctatatgttatgtctacgtggcgatatcactttatgagtccatgtaaatcggacccaccaaaagcttataggtaaatgatacggtttcataatcattaaccatcacgacgcgcgtgctactcatgtcccacttacgacgacgtcgttttaaactctctctctgtgctcttccagtctctatcgatcgccttctgaattttccggcggaaaagcaaatgtccgttaacgacagtatcgatcctcggttcgtattccacgttgaagatgaatctttgcgtttccgtgtgggagattcaggtactaagatccgggagctcgaaaccgtcggcgatcgccatttcagaacccagcaaggtttctgcggaaatagaattgagaaagatgaaaccatgtattccgatggagatgatgaagagtacgacgtttctatccgaagacgaactgctctgattcagcctggtattgattccggtaacaattatgattctgctgcagctgaagaaaccaacagagaaagtaaaaatccaggtataataatactctacattacttctttcacgactaccggagattccaagattgttgaagctaacgaaaaattctttggttttacttaagctcagttggttgggaactggttgtgagagaagatggggaaggtaattcaacgattgatcgacatgaaatggagtttaaggtgaggatcactaaaccagatggtaacgtatctaattcccaccgtaacacgcaacaaaagcgagattttgcttctgtggagaaggagagagtcactactactagtgtcagctcttgggagtctctcaaggccatcctctctgatcctgtcacgtaagtttgttaagtctgcttgtcaatggtcagggaatttgataactaagatcagtttaatttttgaatctgagtcaatgtcaatgtaaccttgatgattattgttgtgtgatggaaagtgtatcgtctagaaggctaattcttgttaacattcatagagatgatttttcttttctgttactttggtttggatagcggagccttgatgaatgatgctaccatactgccttgtggacattcttttggcgccgggggattaaaagaagttaaaaaaatggtatatgactgactcttaaccagtccatttaataagggtcttcttgcttttgtctcatgtgaatcttaataatctgagttttggtaatttttgttgttagaaagcatgtttcacatgttcccaacctactttagaaggatcagaaaagccaaatctctgtgagtttcacggcattactagtttcagagaaagacttctattcttcttcctgatcaagtttattggcttgttcagctctcagaattgtagttcatgctttccgccaagaagaagattcagatcatattcacacgctgaaaagaaggaaagaaaggtcggatcaggtttgtttttccaatacacagtaatcatgtgagattacattaacagtgagaaatcagataagcagagtttctttcttatgaatcttgctgcagaagagaagtttctgtatcccaaacatcactgaaactcctaagagtagccgaggcatacagtttcctttctccattggagatcatattatcatagaggtctgagatattcatgcataccaatgttacttcatacattctagggaatactactttcatgttttaacagacaaaaagttccttatggcttagggaaacaaaaggacgcctccaaggtttgtcggacgcatagctgttataatgacacaatgcttaaatggatggttaagtctcgttgcctcatttcatccatagatgctgaagctcttataacaaaattggatatatgttcccaggtacgttgtgaagacagtggacaattcagagtctatcaagttacaacattgctcacttgccaagatttcagacaattcatctacgaaggtaacagtagctgaaatgccaccgtcttggctctaactcgtagaaagcaaatatctgtggctgcagaaatcagcatctgtaattttttcattcagagaaagtagttactacgtttcattatgtaatataggaacgagacaacaattttctgtactaaatccagtgttttcattcatacaaggaaactttgctcatctaaaaggacatgcgtattgaaacaaatgccaactttgtagctttgatataaaaagaaaaaaggtcgcttctaatgttacatacacgaatgacaaactgatcaatcgcctgttatttacactaaagataataaccatcaaaaaagtgctaacataaagacaacatataggcggtgtgattagtcagaaattcggttaaccaaaaaaaaaaaaaaaacaagattaagaaccggtaggcggcggcttcatcattgacagaagaaaactgcaggttgaaaaaatagaagctgcagccgcctgaaccgccatactagtctcctgattaccgtctttcccaaaactgcaagtgtattgtacaacaagaaaatcatttagaccagtctttttctatgcttctatggactgcttcgtctataccttgaatcggatgattgggaactaaaaggcgagtactcttccatttgtcgtagaccatggttacatcgtgactgcatttccttcacttggtttagcgaacgttcctgcaaatttcaaatccatagtatcaaacatcagaccctaagcttaaaagaccatgtcgctataatcattttaactcaaaggcagtggatatttacgcaccaaatctctctgttcatcatacagagctttatttatctgatcaaattttgcagtccacctcttctgatgtgtctcggttgctgctttatcggacgaagcatcaccagaggtattcgtagtcaccatctcaagagaatttgcttggttagaagaagattcccttgatgaagcgagaagcggtaactcagtagtcaaaatattttgaactctattcctactatcctgcacagctgcaaggcataagatctcactcaaatctctataactcaattaacccgagaagcctctctgcggtatcttcttcaagtaagtaaaatgcgcacctgaaagtcgtccgctgaggtcttgttgaagaaactccaaccattgggaagctacggtagcagctaaaaagcaaagaaacattttccttttaagcatttctttccgtttccacttctgcatatgaattaatcattatgcacaaaaaaagaaatacctaacatttatatttctatcacttctagacttactttaatcagaaaccctaaatcgttaattgacacagaagtcttcatttttacgccataagacttgccacttattacttcagacacatactcagaagatccaagaaacagttaactaaaggtaatctgaaacaagataaaaggcactgaccttcaacagcaagagatgtggcttgttcaggatttgtaatggaaatggcattatcagacaccccggtggatggtaacttaaaggctaatgctctatcttctctgattgcgtctgaaattccaaggtaaacagagtgagcaaaaacattgattgtgaaagttctcgtctctggtctgaattggctaacttgacatcttaatgaggtaattaagaatgatagatagatacctcttacattgaaatcgccatgtctttccctcgtggtagcatcatcattactacttcgaatcaaagctt

SEQ ID NO: 358 - DNA, 72839 bp, Arabidopsis thaliana
aagcttaatttctttgaatgatatattacattctaaggcaaatcttcggttatgacgactatggatatattacgatggtctctcttaaataataataataattattataataataatacgtaatgttgtgtttgggcagtgtagtaagtagtaacatgtataaagtacacattttcctccctgatttatttgatgggttgagagatattattaattagtatacataggggtcgattgtgttcttgccttattcgtattttgcaatgtaagacttttatacctaaattgacaaccaaaaaaaaaaagacttttatacttgtaatttgtattttcccgatgattggaattggaaccatgcatgggtcacgactttacatcgtcctctggttaaaaagatatttacagtttgaaatctttttttctttttatatgctatatgtgttagatatcgacttttataattatatatctacactagtacataattcttgattttttatattggaaccgtacgtctctgaactaagtttcaaagaactgatgatgccgaaaaaagtaaggggatatccatatatgaataagatgacaatatctatccgaaaatagtatagaaaacttgaaaccattacgatttttataattctaaaccaccacataaaaaagtataacacatggtttttcattgttcgataaaggtcgacacataaaaaagtatagatatcgtgcacgatctcgagtttttatttaatattgtctcaaaggtatatttgtgtggctcatgtatttgactgatgaaataatgcagatatggaaatgcagcaagtatatggacccttgctaaaaaatatacggataatttctcatcatgtgattatccaattagtttatattaaaaagaaaaggcatcagcattacagcatcatttgttcgagggaatgaaataattaaacaatatatatgatctagggtttagaaaattattttaggccaagccggtggttaccgacaaaatgtttcatctttttacgtgtagcaaaacaatagtttaaatttcccttgaaatttcccaaaccccatcacgttttaagcttcatgtacatcgagagtttttgtgcatgtaatattcccaaattcttggtgagtggtactccaaaaagtacaaatattatatacatgtactaaaacagaatagttacctagtttactacaaacttatgttttcatataatgtctgacaatttaatcaaaatgcaaacattacaactctctatattgcagtttatgataaagttagtgagaattaaaggctctcaaaatctcataatatatcactctcgttcacaaaagaactacaaaaccgattgatacaaaaacttgaaacgaaaggaacaatacgagttcaagattgggaaaaaaatccctactttctctccagaacttaatctggaatctactatttgttcttgctcttaatttgaatgaatcttgtgtaaaacgtttttctccctggttacaaaacgaattgaatcttttttttcttctattattctcgtaactttgagattaagaagaattcgaattgacataccgactagttgttaaagatggggtcgttagctacaatgaaaatgaataagaaaattaattataattgttgatgaaatttttaaatgaattgccaaacttgcaccatgcatgaaatacaagagaaaaccaaaaaagttgaggtttgtcaacaacttgctattttagtaatttagtaacaaaagaaagattattgtgagactattagtttaacttaaaactaaaaacagaatcaagtgataatttgtccatgtctccctctctcggaaactgtggtttttttttatctttctttaactatttgtgcgcattgaacaaagtgagtgttattggggttctcacttttccttcatagtccaaatcacttttttccaaatatggattgttttgtctccaaagtgatttttccatttctggtatatttaccaaattactaatccgaaaacggcacgacggtgtcttccagcatttaaaaacgacacgagggtctatctccaagttaagaaaacgcagacacgtgaatattaccagatgggtgaataaagacccaatagctggcggcccacttgtacattaaattagcccattattgtttttttccaaccgactaaattccgaaaagtaaattaaaccggagaatttaatttgaaagaagataaaacttaccggtacagagagaagtcattttgagaaaaatcagcaactctggagagagcgtgttcgtcattgaaatcgaagcttggagattcaatatttcttcgatctcgtgttcttcgtctcgtttcgtcggtgagaatccgttagtctccttgccaatgtttgaatcaaagatcatgtataattttcttcgatttttatgttaattgtttgatctttcaggtccagtgttaataaaaaatgagttcaactgtttcaaatccccaaggaatcctgcaaccaggctcatttctgcttccagaatcagaatctatgaaaaaagaggaagcagagttagtttctgtgtgttggaatcaggattcaagttgttttgcagctggaacgagtcatggttttcgtatatataactgtgaacctttcaaagaaactttcaggcgtgagctaaaggacggtggttttaaaatcgtagagatgcttttccgtagcaatatactggcacttgttggtggtggacctaactctcagtatccttcaagcaaagtactaatttgggatgatcatcagagccgttgcattagtgaatttgcatttaggtctgagattcgtgcagtgaaattaagaagggatcggattgttgttgttcttgaacataagatttatgtttataactttatggatcttagacttcttcatcagattgaaactcaagctaatcctagaggattgtgttgcctttctcatcattctaatacgtctgtgttggcttgccctggtctcaatcgaggagagattcgtgttgaacatttcgggcttaacatggtacaaatcataaatgctcatgattcaagtattgcgtgtatgaccttgacattggatggtttgttgcttgcaactgctagtacaaagggaactctgattagaatcttcaacacaatggatggaactcgtttgcaagaggtaaatatcagatactggtttgctttgatcactgtattacattactaacaattcaaaggtgtttctttataggtacgaagaggagtcgacagagcagatatatatagcattgcactttcaccaaatgtgcagtggctggcggtatcaagtgacaaggggactgttcacattttctctcttagagttagggttgttggggaggattcttattccactgaaaatggagctctgttgacacaacaaaattattctaattctctgcaaggccttgtttctccaaccattggtaccaatcccggttcgtcattgtcgtttatgagaggtaaggaaaaattctatgtagtagctctaagtccaagagatttattgactatgtagtagctaagtccaagagatttactcccttcatagttgcaggattgttaagattatacatttttgttaacgttattctttctcttgtttattatctcttccatgaatgtagaaatgggaagaatggtgtttttgaaatgctactttgaagccttaaaaattcgttcgctctttcttacctaacatgtacactcttgttgcaggtgttctaccaaagtatttcagctcggaatggtcatatgcacagtttcatgtatcagaagtcacacaattcttcgcagcatttggcagtaacaacacggttgctattatcggcatggatggaaggtataatcccaaataagcccattcactttgtatttccatcacactaccaggaatctttaaccagagcaagtacactagttgtgcatctataaaaaccactctcagatctcggcttagtgcttacttgtgttttcttgtctcagtttctaccgatgcagctttgatcccgtgaacggaggagagatggggcaactggaatatatccactttatgaagatggacaaccgcccgtgataagtcagactcatgcttcactcactcctctaagcctctgtacataaccatgtctatgtaaatagatttggtgagactgcataagatttgattattgcatattgctacttcgagtgaaagggcctgcattactgattgagactatgtgtacatagctacgtagcaagattcatccacaacagtttgcttcgaacactgtattatgtaaattttcagataacactatagaaaagtaataacaatagaaaaaacagttcaatcgaattcccaagaaacccgaggccttcattttatatgtttcttgaatctgggatgtcttatcatatcaaatacgaatcatctacaatgtttcagataatctcacaatgcagccatattgaatcgagctgttgctgcatcaaaatggaggatcaatggaaatggggacacttgggtgaggtaagcttgaaggtaagtcgattcctgacataaactcgcttccatataaagctgcaccagctccaactactgcaccagctcccactcctacagcaaaccctgggccagtcctagcatatcctcttcccgcccctcctggtactcctccagatgatgatgacgatggaatgttcgtaacattctctgaattagggatgtatgtaggcatgtaccctgagttcataggtggtggtgctggctgcattggtggaggatagtaaggttgttgcatttgtgggttggtgttgttcattggagggttaggcattgatgagtcattcacagatttggggatgtatgtaggcatgtaccctgagttcataggtggtggtggtggctgcatcggtggaggatagtaaggttgttgcatttgtgggttggtgttggtcattggagggttaggcattgatgagtggtggttatatgatgggggaactgagaatgggtttgactggtccattggagcaaatggatactgcgatgaaccagccatgtaatcctgtcctgaagtgttgtaatctgagttgttcgagagcatgactcctccaaaatctcctgcacaaaagaagaagagaaagatggtgagcgctctccttcagacaaacccatcttaaaaacgctaagatctcgaaatcggatattcggaaacccaaatttaaggttcttcaagaattgagttacaggaaacaaaagcagcaccaaagttggtttctttctgcaaattgacacaacccattcacatttgcgtctattgttgttcaatttacatataatctgattgcagacaaaatgcaaataaactaaaggcaaaattcagagacattaccagtaaaacccccaaaatcctctcgctctgcagatatacgtatcgacacatcgacaaaaccctgaggcttgctcgagttcgtcttcctaagctgatagcttccagtttcttcaattacagctttcgaagaactctgttgttgcttatacttagtcagaaactccttcaaagaaacagtagcagagccatgaagcctcttccttaagaacaagggttctctgctataaacctcgacttgcaaagccaacttcgaatcctgaatcgtggaatcatcgagcaaagtagcaaactttgttctccagacaggattgtctgctcttgaagcatcgattgtggtgcagtatttgtcttctggatcaagccaaccaacggcgtaccattggtgtttcagtagagaggatccgattccaattcccacacggagccctcgagctgatatcatacagatttccacaaggatcttccccatggatttggatttgaactcacgagaagacaaaatctcggtcggacgatggactgaaagagtgtgaaaaataaaagaggaacaagaaattcggacaactataaaggtagataatgttccatctatttctctatatgttaaagtattaatttgtcataataagcttaacttaaagtatctacatatctgtgatgtcccaaaaatattcaagtttctttaacatttggataattttgcacccttggatagtgcaaaattaaatatatgaaattggccattcattattattatttttatttaaaagaaattttcattttattacattaattaagattgaagagtagaatgtaatattgattgaaacactgttctgttattagataccaacaaatcttgattacaatttttcacaatccaaaaaataatcctaattagccaataatggtccaaacaaatcaaacaaacaaacaaataaaatcaaatcagaaaaaatgccaaccacctcaaaccagtgatcatgccaaaaaaaaacacaaaatgtgttttctgtctaaaactatgcagcaacacttgtgtttcttcttcttcttcttctttcaaccacacacaaacactgaaatacataacagtcgatatcacaaaactactcctttcactacctcaatcatctggaccaactagagtgacctgcaggatgcgaaattgattcaaaatggttgcttaattacaccaaaactatataatggagtaactgcatattaaaagggcaatgcaaaacaagagaagatagaaggatcagaaaaagaaaatggatctttttctggttacttttactcacattacaatcatatgcatatgttcgtgcgagtactatggctgcattacgttcttgctctgactcgaaagttagtaagaaagttagaccctttctaagttgccagaacaatgcctttgcaggaacgttagcattgcctctcactccacagagctgaaatgttaccaaaccatttaaacttgaagaaaaagaaaacttcaaataaagctaaaggaagagacagagagtgaattaagtggcaatcataggctctagattacctgcatggaggttgaatatatttctctagcctttgtgatccatcctcgggacagctttatcctcgcctttccaacagtaaatacatgggatcgtgatgcatggtcttgtccattcatctgtgatataaccacctgcgaagaatttcaacatttctagttttgttagagcaagaaataacaactgttttatgcaaaattctcttccaaggggaaaaggaaagttgtaaacatacggtgaattcactgttagatttgcgcaggagtgattcaacgcgtgactgcaagccagcagctgtagaaattgtgattcagttagccattttgtttatcatatctccattataatctgtatttggactttgcagaaagtacataataatagcaaactcttgtaacaccaaccagtattaattggaccatcggttgtaacggtgaacttctggccatttgaaacaatgtctgcttgtatcactcgcccgacatcaaatggttctggagcatatactgaccggttggcacctaagattggaaaaatgtgaactgctcagtgctcaagctaaaagctcatgtcctataagttattttgagaacataataagatttgccaaatgatcagggaaagagagaatgcgaattaccagatatagcttctcttcgactagactcagatgctgcacggtaccaatggattgagcatttggaaatatctataccactgtctgaggaggcacggattcttaggcacgagccaagactttgtgcaccatccagaacatacggacatgacttggacccctcagctttcttaattattgctatctatatggatatttgcaatttttagagtcaagacagtttgttgatgaaagaataacaagaagtaaacaagacacaaaacctacctctctttgaagtttaacggaatatgcagacttctcttggatttgactctttaaatcacgaagctcatgttgcataccgatcacctagattataaaccatcaaaatcagaagttttgtttgaacattttggattccattgtcaaaaagatgactaatgaaagagatagaaagtcttataatggaaaatttatgtagagcacagaaatggagttggaccatggttggtttatgcaaccgtctaattcgtctagcctcctgaacctcctcaaccaatttctccacattctgtgaaaatggaacataagtttgattcagaatcctactcctatgtcataagtcagagcataacatatgaaaaggaaaactgaactcaaaatgatacataccggtccctgatctctagaagctttagaacaaagctcctgttcttcaaatgcacctccaagtttcatcacaagagcccgtgcactctctatttcagcacaagcaaacgacttttcttggtttactaacttcttcgcgtcgtctgaagcctgaggaaacacaatgaatcagccttagcttgactgtctacaaatgtctaacaaaattataatgtattaaacatgaaaaggaaacttataagaccttcttgaggaagcttgccagtttcttcacttcaaacttatcatgaattagttcaccttcattttgagttaacttaacggctagtgcctcaacctgcaagacacaaaacactgcatagttttattcacacccttcacagttgatacaatcatacaagtcattgtaaaggcgtaaaaccgtaaagaaagtgattctgcagtaagaaaagctaaccatggagatagctttttccactgcttctctgtttcttccatccatacgacctctcatggtttctaaagcatccctaagtttctttagcataacatgtccttccaaagaagtcacatcgtttaactttgccttaaatattccagcaaacaaaaaacacaatgttgaaatttggttttaagaccatccatatctaaaccacagacacataatcataggaggatgagaaatagagtggaacctcatcaactaacttagaagctgcagctaaattcttgtcaaatttgcaagcgagatcacgaacagaaagcttcttgtgctgatctgacaaatctccggtctccttaccgacgacatctttgacagatggaactttatcatcttcatcaggttcatcaacaatctgatcatcaggtcctaacttgtacgttggaaaatgattagaagcaaagctcacatctgctgaaattggttcaaccacagcttcagacaccactctcttttcttctgttttaggacatactttagtcattgtcaggatcttgtctgtttacaaaaagaacaaagaacaattaaacaaacatgtcttcttataatcatcaacctgaaactctgcattctcgtgactgcatctatttaattctttttttatatatcttttataattaaaagaaacagttcaagaaattactgtaaacaaaatcccaaaatggaacttgcactaatcttaaacttaatttcagattaatttttgcttcaacggtaaggaatcaacgaattagaaaaagatgcaagaacacggaaacaaacaaaaaaaaaagaaatggtgacactaaaccttgaaattttttcaaacacatgaaaagctagcaattaatataacatgtaagattatagtttacagatgcaagaattatctaattcatgcaacaagaaattaccattgaaaaatggagacaacaaaattcatgagaatgcaagaagaatagattctataaaacttcttcttacaagtttttaagccaaccccagaaacagagagaggcagaagtaggaagaaaaaaaacagagaagagtctttagtcttcagagttttatttcttctgcaaaagattgaagatagaagaaaatgcagaagtagaaaagagagagaaaggagacgacacctttagtcttctgattctttagtctctcttcccaaaaacagctcgcttgactcatcatcatttctttaatctctctctctctttctttcacgccatcatcatcgttaaagagaagaaaaaacgtttaaatataaattcgacacagtctggtccgcctcttgtttgctggaaagtgactacgcgctctctcttttcgtttgaaattcacgcgccgtcggagctaattgttttgatggaatgtaattatgattctttaacgaccattttataaatctttaagccaagaatattagtttccgtgtttatctaactaattatcttcataacacatctctttcattcgaaaaaattgtattgattttgctctggtgggatcatgtcctttttctttggttatgatagtaaatctttaattaatcccaccaatttttttatagcgccaccaatttagatagccgtttaaaaaggagccatccatttacatttggtctgataaaaaacagtgtacgtaagtgaatatatattcatattgaaggtattttctgataacaaatttgagaacaacatattcaatctctagttagacagaaaaaataataatttatttaccaaatgagttacttattgcattattttttttcttcatgctattttatttacatatataaatctgagaatggttggtaaacatagacaaaatgctagataccaaagatagtattgtattttggattgaaagtagaacaattattgataaaggaattagatttgtagaacatgcatatgtattcattctattattacttctacatttcttatccatggaatctaacttggtaggttcagaaaaaagagactttaaataattgtttttatgatagcaaaaaggaacctttatgttgattaaatggatagttgcaacttaccaaactttcttttaaatctttataatcaacatcaatgtattgtccaagtgtacatgtgataaataagaggaggggtcgtgttagttgacttgaacggttatattttgaaattaggtgtttacttgatttcaacactgtaattcaaaattacaagtgctaacgattgttttggtcaacaattttgtagacttgtagtgatgggctatatagttgcaaagtataaagtacaaaccatattcgtgtagtatatactaggctccaaatcttaggttacgatgtatatactatgcatgatatcaccatacacaaaatgcacatcatatttatatagatgatcatcaataaattatacagatcatacatgtacaaagaaaatctatcaagttaaatgtttcttattacaaaccatcaatttcaattgaaaagaaatgaaatcaaattttgataaacgccttattagatcttccaaatatatatcaagataatgctaaataatatgataaaacgagtttaacaaaacaaataacatgataaacgccatctaatatatagaaaatattatttatatttaaatccattgaatttagacgtagtaccatggtcttaggtggaacaaaagccaacctagtcgtttcgggttgttttcataaagacggctaaatagatatccacaatgtcaacaatttttaatctaatacctatatatatgtttcaacaatgcaaatgacaagaaattgaacaaatttacgaaagatgtaattttttttggatatgtaggttagagagtggagtcgtgataaattgataaaacagttggtggaatctttgtcttgaggagccaacgtttcagttgaaaggtcaaaaacacaactatattttgatattttcaccaaaaagagaaacactatcaatcaatgcggtgaacgtgaagaggacttccttctactattcctccaacctaaggaagtcgttgtccgatacagttttacattaaccgttctctcattacctcattttgttttattttatagtttcatatatgtgtatgtgttacataaaatataacagaaatgaaagtaacgtttatgaatgagtccaatccaggaacaaacatgagctgtgttttgttgtcttttcacttagaagttctaaaacgtggctcttacttccttgttccctaatttggattcccgtttaaaaaggaaatgttcctatcctttacaaaaaaaaaatctcaagacaaacattttataaaaattataactgagtacacattgtctatctatctcaacaattgcatctgactaattaggagtacaattctctcgaagtttgtatatcgcttggaatttggatcaagacaatttgaatctctctcaaaactaatctcttcaaaacccatcacatgctttctaccactaaaacaggcccatcacatgctttctacctctaaaacaggcccatcggatatgttcctatattttttgtccgataaagttataagaagcgcaaggcccataatatttttagttattaaaaaaattagcagacgtagggttgacttaaaaaagactcttattacattagtcgacaagtaaaaaacacgtggcatatattgtgcgttcgtagagactgtaataaagacggagagattcttctagagtcagttcttcttcttcatcctcttcttccccccaaatcctctctcgctagggtttctcattccgatccataattctagatgtcgaggtattcttttgattgagctccgcttttaaccaaaccatcttagattttgttttcatgattggatcactgaattgaaattcttctcttctgtctttagatttcttctcaggtaattttgctctgctttgtgaagcgttttcattgatcggattttagcttctcgtatttaaattgatacttgtgtgcatctgaaattcgtttggattaagccattccgaattttgagttacttgtgagttgtgagttgttacattaccctctcatttattttcccactccataaattggtttcagttagaaattgtagtagctacaaggtgattgattgcatcattatttgaaccttcgttggtttgtgttggcttatataagcaagttccgtcaaaagattaaaactttgggttcagtctctgtgtgtttattagcagctagactttgtattgcctgaaaattcatgattgagggatatgctttatgtactattataagttctgagtttgtagaaacaatattttgtgttttggggaaaacaccacaataactttctattaatgtattagaaaaagaaagttggaacctatgttttagaaaattttttctctatatattgaagtatgacctataattgaatcttctgatgtgcactaaactgaggcaagcgggatttcctggagtctttggtttgcttacttggaaaaaactgtagataactgattactaacttatacccacttttgcaggtttttaactgagacctgtcaaataagctaaagcttcttctaagagcttcaaggaaagcattgcattgttgtggtcttgtttgtgtccacagaaggaaagaagagtgagaagctcaggatgtcaagcagtcgaaatacccactggtgtcacagatgtcagcgtgctgtccgccttcacggccaagagcctgtatgcttttattgcggaggtggatttgttgaagaacttgatatggctcaagccagcccctttgatatgtttagatcccacaggggtgttgtagaacgtgatcagacttttgatctcatggatgctttctctgtgtttatgaggaaccgcttagctgaaaggagccacgacagagaaatcagaggaagaaccatcagttcaggtcctgaaaactttcctggtctggcccctttgttgatctttggtggtcaagtcccttatagactaactggcgacaatgcagtcgaagccctcttcaatggcggctcccctggcattggcatcacacgtggtaacaccggcgactacttcttcggtcccggccttgaagaattgttcgagcagctttcagctggcactactcgccgaggcccaccacccgcaccgagatcagcaatagacgcattgccaactatcaagatcgcgcagaggcatcttaggtcatcggactcgaattgtcccgtgtgcaaagacgaattcgaactgggatcagaagcgaaacagatgccgtgtaaccacatctatcattctgactgcattgtcccgtggctggttcagcacaactcttgcccggtctgtcgccaagagctaccatcagctagcggaccttcaagcagtcaaaacagaaccacccctaccagaaactacagaagcagtagtagtagtagtagtagtaacagtcgtgagaacgggaatgaaagaaggaatcctttctcttccttctggccattccgttcgtcaggttcaagctcaagctccactcaaaaccgtggaggcacaagaaactcggatacaagcgatgagaaccataactaccatcaacagcaacatcaacaatcatatatgggttacagtggctggccttttgattactaaaagtctaaaagtgagctaaaacaaatctttggtctcactttggtctctttacttaaatatgcttgtgattctgcatatgccttgtgcttcactctctatctctctcactctcttttatcaacataaataatggagaactgtatttgttactgtagattttctttctctgttaaaaacgagttcatcattttctatatgctttgttaaatatgtcattttagttgggtttttgaaaatggttgaaatagatttttgagttgatcgataaataaataaatgaaaacgtctggacactcttgagcgatctatcagtatctcgtgatcttcttcaatactaataaaaaaagggaaaagaaagagaagagagtcgtgctcataaattaacggtgcagagcgattgaacaaaaacaaaaatatcttccagaaaaagccatttttgattgcgtataatgaatacacgaaattaaaatcattacttgccatatatagtacactatttctcagcttcactcactctcgagactcgtgtatgttgatttacggtttgttcaagcaaaggtgatcatcaattcccaattttttttacgtcactattttcgattcactccaatggcttgcgtgttgctgatttcttgattttgtggttcttgagttagtctccatctgataagtaagtaaattatgtgattgtgatctgggttttgctaaagttttgatttttattattgttgtttagagaatgatgaatctaggatctctttcgttgagtacgagcaagtcgagtaagccaatggttagcatcagcttttggataccgtatttcactcactggggagagagcctgctggtctgtggctcggctcctggacttggttccgggaatgtgaaaaaaggtttgctgctaaagccatcccagcaagatgatcagctcatctggagtggctctgtctcggttccacctgggtttagctctgactattgttactatgtggtggatgactcgaagagtgtgttaaggtcggagtttgggatgaaacgaaaacttgtggtgcctgagacattgaccggtggagagtctgttcatcttcgtgatctctggcaggtttgagttctttgtccttttcgagtgtattatacaaattttgtaatctgattttgtagtgttgtgattgatgttctgttcctttaattttagagtggggatcaagctcttccatttagaagtgcatttaaagatgtcatcttccaccacagtttcgatgtgaaagtagaaaaacctctaggggtctttatgaataagtcagatcaagatggtattcatttttttatctaatcctatcacaccattgtctctgagattctctagtttgtgattgatctctttgctaactgttgtggccttatgactttaccatgtaaacagattcagttgttgtccaattcaaaatctgttgtccagacattggagagggaacatctgtaagcctttctctatgatctttggttttctttcttttcatgtttgagcctgatgtggtgttgtggccatcattcttacccttgattatgacatgtacaggtgtatgttctaggcaccccagaaaagttggggaattggaaagttgaaaatggacttagactcaactatgtcgatgattccatatgggaagcagattgcttgatccctaaagcagactttcctatcaaatatcctttctttttactttcttccagactaattagttgaacatagttgacacttcacttctcatatgctttctgcatgttgggttcttaacgattctttcacatatagatactgtaaagttcagaaggaagatagcatagggtttgaatctggtggtaatcgggagctgtctcttcactccatcggtagtaaacaggaatacattgtcatgtcagatggcttgtttcgagtaagtaacagagacaagctatgaactagctctaatgtgacagaatcaatgttgtcttactattatttaattttacttgtaggcaatgccatggaggggtgctggtgtagcagttcccatgttctctgtaaggtcagaagatgatgttggtgtgggagagtttctcgatctgaagttgcttgttgattgggctgtagattccgggttgcatctagtacaacttttaccagtaaatgacacatccgttcataagatgtggtgggactcgtatccctacaggtatgatgattacatttatgttagttttgcaggagttcaataaaggacttctgtcacttacttaacggatggaaacaaatatccagaatttttgttattattctttcttgactactgaattcataaatagttcattttttgcttcaatttggttttcgagaccttgggttccatatactttggttgatgattagtgactgagcctgaggctctgctgaatattagtctctactctctacttagtaaaatttctatatcaactcattgaactgtgtgattcattcttattgttcctttcctcatttggattgcttctcttgcagctcgttatctgtgtttgcattgcatccattatatcttagagtgcaggctctctctgaacgtctgccagaagatatcaaggtaagtttctacacttattgtatcctggaagagactcctaagcaatatattggctgacctttttcgttctctttcaggaagaaattcagaaggcgaagaatcaactggacaagaatgtaatgagtcccttgttagacgtttcatagattttcttacttttacgtccttgaaaaagatagcatcagataaacgggatatagtatttttaaatggtttgtgtctgtatcagcatgatgtgtttaaacgcctgcaagcaattggttcatatgttagttcgtcacaatcagagtttgagtgttgtaacctaatcctttaaagattgttacgtgtaggatgttgattatgaggctaccatggaaactaagctttcaattgccaagaaaatctttgacatagagaaagaccagactttgaactcaagcaccttccagaaattcttctctgaaaacgaggtatgcttcaaaatctgatattgtttccttgatatctcttgagaattgtctgcatagaacttatgcctccaaaggccacgtcagcgttccattggcttacggatttttgttatctttgaaagggctggttgaaaccatatgcagctttctgcttccttcgtgacttttttgagacttcagatcatagtcagtgggggaccttttctgactatacagacgacaaggtataatttgcttttatgttgttcaagtttaagttgtgatcgaattagttcaagctttccagatgtatttcatatagtttcagtaatttctcacatctccaaataacatttgccacagcttgaaaaattgatatccaaggacaacttgcactataacactatatgcttccactactacattcagtaccatttacatgtacaagtaagtatgttctgatttatctagttatattccattcttgtaagtgaagtcggttactggatgtttcatctaaagtgtgttctggttccattttcaaaagttgtcagcagcagcagaatatgcaaggaagaaaggagttgtgctgaaaggagacctacctattggcgttgacagaaacagtgttgatacgtgggtttacaggaatctgtttcgcatgaatacgtcaactggagcacctccagactattttgacaaaaatggtcagaactggggatttcctacttataactgggaggaaatgtcaaaagacaactatgcctggtggcgtgctcgcctaacacaggttggaattattgtccttaccagccacatcctttgtagatctgaaggctgaccacattgcatacttgctttgcagatggggaaatatttcacagcatacaggattgatcatatattgggattcttcagaatctgggagcttccagctcatgctatgactggtttagtggggaagttccgtccatctattcctttaagtcaggtacacaagctacatgcttacagttaaaaaaaacttggctttgagagttacttgatgataaaactgctgctgatgcaggaagagttggaaaaggagggaatatgggattttgaccgcttaagcaagccctatatccagaagaagtttcttgaggttagttttccatcacatttattatgatctgcctctgtcacagcttagttagtttgtgagttttcaatctcattacctatttgttgataatatgtcattgttctgttccttcaggagaaatttggagatttttggccttttattgcatcaaactttcttaatgaaactcagaaggacatgtatgaggttagtaaaaatcctcatttagagatcgttttcctttggagaaccaagtcttacctttttctgtccaaaactctgtggtgttttttgctaagtggatgtattaaatctttcttaattggtttcctttaattgtactctagttcaaggaggactgcaacacagagaagaagattgtagcaaagctgaagtcattggctgagaagtctttgttgctagaaaatgaggacaaagttcgacgtgatgtctttgacattttacgggtaaactttcatgcatcacaagggctttccagatttcttctccttgttatataaagtgactctgtccacttcacgtctctctcaagtccactgtcccaattgtttatttctgttgaacttgtgtccctagaatgttgttctgatcaaagatccagaggatgcaagaaaattctatcctcgctttaatattgaggatacttcaagcttccaggatttggatgatcacaggtacattcaaaaccttttcccagtcacttcccaaatagagtagtctgctcttgttcctttgattttatatcgcccatgaacatttacacagatcctctcttgctattgtatcgtgctgtatttttctacttttcatcaatatgggaaaatctgattaaggttttctcatacagcaaaaatgttctgaagaggctatactatgactactatttccaacgccaagaggatctatggagaaaaaatgctttgaaaaccttgcctgctctgttgaattcatctaatatgctggcatgtggggaggatctgggtctcattccatcttgtgtacatcctgtatgtgctctgttttctttctcttggttcatccaacttctttataaaacttgtgtagaagcatatgctaaaattaatagttactcaggttatgcaagaactgggattggttggccttcgcatccagcgcatgccaagtgagtccgatgtgaagtttgggattccgtctaattatgactatatgacggttagatatttttcctcagacttctgtctttcttacttatagcttcctaccgttcattttctgagaattttgtaatgggtgagtgattcactgcataattcaaactatcgtcttaatattttaggtgtgtgctccttcatgccacgactgctctaccctgcgagcttggtgggaagaggacgaagagagaagacagcagtacttcaaggaagtgattggtgtagatggaatccctccaagtcagtgtattccagagataactcatttcattctgaggcaacatgttgaagctccatcaatgtgggctattttcccgcttcaggtaatcatcaccactgtccgacttctcagatttattagaactttttatgaggctcaataacagtatgtgttgtttgtttttttcctctggaacaatttaggatatgatggctctgaaagaagagtacactactcgtcctgcaacagaggagacaatcaatgatccaacaaaccccaaacactactggagataccgtaagtatttactactaactaacacacaaccctaagaactataccagttttaacttagactgttttttgtgcatataggcgtacacgtgactttggactcgcttctaaaggacactgacctgaagtcaaccatcaagaacctcgtttccagcagtggaagatctgttcctgctaatgtttctggtgaagacatcaacaaaagccgaggagaagttatagccaatggctcgactaagccaaacccataaagcaataagccttctgatttcctgtttggttccacatatgttgcttattagttattatcattatcactcaaaatagtacaagctctcaacatcattgtccataagacataaaactctgtatttgttgttcctgtccaaaataaaatcctcaattttcggtgttaacttagataaggaggtagcttttaagttttttttttttttttaacctttcttttttaattatagcaaaactctgattttcataaccgaaaaacgcgggaatatcagaaacgtaaataaagaagagacatttatagcataacagaaataaatttagaggaaaagggttttgaagaaagagaaaaaataagaaaacaaaaaaaaagaaaggaggaagaagtatcgtttcgaaagaggggagtctcaggaaaaaaaggacagaatttttttccggtgacagtgtcggtgtctctgacgctcctctctgttttcaatctttctccgtctctccctgaatgccttcgtccgtattcagggttcgtctattgattcttctccaagcaatcttaatcattctttaaggcctgcttccatgtgaatcatcttcttctcttttgtttctgcagaaaattgcggcgattcatggttggaggagcgaatacttaaagggcacaatggattcaagcgaagcaaaggacacaccatcttgtggctgtatatagatccaagttgatttgtaggtttttgaaaaaaaatacgaaattttgttttagttgtgtaaatatataaataggagtgccaaagagttttggcatgaattgcttggctacgaccataatcatcacctgcaagcccacattgatctcggatatggccgtggctattgatcctttcagtgacaagttcccttactttaaccgatcctctcaaagatgcagacttcaatcccttaccaaccttgacttcaacttcctcgcgcaatcctttaatcatacgtttgaagatgacaacatccatcgtagtgtttcctctccttgcttttccatagctgcgtctgctaatatggaggaagatctcaaagcaaccacggctccacggattgagattcttggtggacagagagtgcccaccgttcgtgctcttgtggctgaggtgaccatggctatggtttctggagctcagcctttgcttttaccaagtggcatgggaggtgcttatctcttgcaaaccggaaagggacataacattgctgtggctaaaccggttgatgaagagcctctagctttcaataatcctaaaaagtctggaaatttgatgctcgggcaaccgggaatgaaacattcaattcctgttggcgagacgggtatcagagaactagctgcctaccttttggattaccaaggcttttctggtgttccaccaacagcattggttagtatctcacatgtcccattccatgtcagtgatgccttctctttctcctccatgccctataaggttgcttccttgcagcgatttgtgggtcatgattttgatgcaggagaattgggtccaggaagcttcacggctacttcggttcataggattggaatacttgatgtgagactcctgaaccttgacagacatgctggaaatatgctagtgaagagatgtgacaaaaaggaagcttataatcgacttgggaccgctgagcttgtgcctattgatcatggtctctgcctccctgaatgcctagatgatccttactttgaatggctaaactggcctcaagctttggttccattctctgacactgaactggattatatatccaatcttgaccctttcaaagacgcagaacttctgagaactgaactacactctctgccggaatctgccataagggtcctcgtcgtctgcacagttttcttaaaacaagcagcagctgcagggctctgtctcgcggagataggcgagaagatgactcgggatttctccaagggtgaagagagtttcagtctgttagagaccctctgcaccaaagcgaaagcaagtgtctttggcaaaacaagcgaagacagtgactatagtcatgaaggaaatgaagtgaacacagagttacagtgtggaatgtttaagtttgacggtggagatacaccatgtgaagcggagatttcagaggtatttcatgtatctaaaccacctttggttccaagagggccacgtgcaaacaccatccctaacgatgtaactgcttccatgtcgtcatcacaaaaccagcggattactcatcaagagaaaagtgcaaaagaaaagaagagaggaggcaagcaagaaagatgcaccgtgaggagcaagagcccaccgatcagtccaaaccatgatgaatcaaaaggagtttccttcgtggacatgacaacagttgaatgggatacgttcctgcagagcttccagacacttttgcaagatgcactgagcaaagggtcaacgccaagattaggatgctcctgcgaaatttgaggaaatcgattaatagaagacaggaaaacgacaaccaaagagataaaatctcataaggttaactttcaggtgtttatatataggtacaagtgtgcattactgccaagatgaccatagtgcaagctgtaggctaactatcaataccttagaaagcatatggattatgagacgagcagagtaagccgtccactccaatacttcttatttttcttctttctgatccccttttgtatcatgttattctgaaacatttaagtaccaaatgtttctatacaaaaaaataatcaattataatgtaactgatgtaatcaggagtatatacactcaagttaagtttctagtttacatggtctatgtactttctggttgagagcaaatataatactgtgggacgataacataaggttcattttgataacacacatgaattaatttatatgtaaagaagttgaatgttgaataataatgtgcaagaattggatactactagtagatcctttcggctgtagacactggccgcaggaagactacaatgactgtgatgttgtcaccactaccacgtgctgcagcttcagttgctaatctctttgaacacattgaaggttcttttacagtatccctgattataccaataacttcttcatcgttcataacatcccagagcccgtcgcttgccattacctaccacattcaacctattattattctcaaccgtctaataaacaatcaaagttgcatatatatgacacgaaagtaagatacaatttaccaagaactcatcgtcagctgatagaattgtctcactaatctctggttctgctgttacagctggcttcaggtcatcatcacctattgaccgagtaacctgttacaaagcaggattttcaaaaaatggaccaacatcattttggattttcctctaatctcagctattactttgatatcattttaaggaagtctatcaagtacataacgaccaaacctgaagtccagcaggagcaactctccatgtgtcaaccaaccattcaatacgtccaccttctccaatcacacgatttctttcatcaatacaagttgcaagatgtgcctgagtaccaatggcgaagttgatttatgcggggagatggaaaagagggcaccaatagaatacaaacttagctcactttcagtatggtagtctcatctcaccttacttagagcaaaagggtgaccggcgcggcataaaattgccctggagtcaccaacattcgcaacgaaaagcttattctctactaggagagaggctatagcagtacaaccaggatgccagtctttctgactcaccctttttgactgacgatgggaatccagttcttgtctgaaagctaaatctgtcctaacaaatgcttgtgacaatgcctcgccagcgctgaaaatgaaacatgccaatgggtttttcgaacaaaccatgctgagaatatgaaaagattgaactgagcattaaccttgtggaacataagctttgaactagtcctggcaaaacttgagcagaaaattcagcagctgcagcgcctgcatgtcattcaagatgctattttatatcctatttgatggatagctaaagaatttggagtaaaaagagagagggcacaagtaagaatttggagtttaatgcgtcctggataaaattggcagttggtatacctctatgaccatcgaagatggcaaataagtggatgctttcctcattacacatgtgcggtatgatgaagtgtgtatcttccatggattctcttcttccacatgttgcaaaagacccacaagaaattactgggacatatcttgaaggttcatctgttgaactagaccataatttcacatcaaagacagtggaaacagacgatttcttggataaacactccccttgactaaaccaattaacggtgtccctgtaatctcctgaatttttaatgatgtccgccccatccgtatcactctgggaattagaagttttctcaaggagatgaccttgctgttttcctctcacttgttcccaaattgattctagttccaaaaccacattgtccgaagaaggtcgtttagacggatcagattcccagcagttttgtatcagagatagcaaactctttggaaggtgcaatccaatttcagcaagagctggtcgcagaccagaagacacaatggcaactgtaagttgctgttctgtgtaattcatctctaaaacagtgtgagcctgccatcaagatatgcaaagggaaacactatgtgtcatgaatgaaaagaacaagaatgcattcatataaactgctatatgtccataaaatcatatatatttatcacagaaatcgtaagaattgggcttgccaagatatagcaatatcattgaacggcaaatgaatgcaattcaggagcctgaatatatgaaaatacagtatatcgtatataaaggcttctcccagagataataatgtcaaaatgcgaaatgaggaaagaaaattttaacctgagcttctgcacgacgatcagtatatggaacaactccagttaaaagctcactgcaatgtaagatggaaaaaaaattcataaccacagggatcttttaggaagaaagctaaatatactccaaacgaaatataagatctaaagaaaagttgaatgtaagaaaatacgaagaaaaaactttacaatttctactcaaagataattcttacttgatcaaaatcccaaagctataaatatctgctttctcagtatacatgtctttcctcagtatttcaggggccatgtaaataagtgttccgaccatattctttttgtggaatccaccagttggcttcccagacgatctccaattctgcagattaacttcgcgcaaattcttcttgtattcagctaaaccaaagtcagccagatatgggaaaaacttctcgtcaagctgcaacaacaaaagctcacttaagcatcacacacaaatttcataaagaaacagaagaagtacctatcctatatgaaataagcacataacaagatagagaatctagagaatggaagaagagaattacaagaacatttgctggtttcacatccctatgaacaatcccgttgttgtgaagatattgcaatgcctttgctgaaaaaaacgaaacagatagaatcagatattcaaattagtaaccattgaaaagtttatgacaagaagaagaaatcgtcagagtcacacacgaatggcaaaaaagaaggttcctttgagacaagtagagtcacatacccaagtgaagcgtgatcagtaacacttgatcaatactcggagaccactcctcgacgtgtaacttctcagctaaagtcccagactcgtagaagtcaaagaaaaacatgtaatttggaggcttcgcatgtgctgctagtaacttagccacaccaggatgattgagattgcttcaccaatccacagcaaagtaagaaaaaaacaacattttgaaaatggtacgaaatttaaaatggaaatggaaaatgaaagagagaccatgagagctgcaaattcctgtggaacttgtcaaggtcatcggaagtagacaagataggcttcttcgctgctactcttcggccatcgagaatcgcttcataaacaacactctctgatcctgaaaatttctccagacaaatcgaattcaaacgaatgaagattgcgggagtgagagggagagggggaactggggaagagaagaaacagtacctttagcgattggggagagaagagtgaaggaagaagaagggagatgaagagggatcgattcactggtgcaacatcctctaatgcatgtgtttggtttcacaatttccatcaccatttttctccaccggaaaaacaaacgacgaacagagaaccgatcgagcgtgatgacgacgacgaattccccaatttcgcagtttcaacagtaacctcgtagaatgcataccgttttcatgtgtttggaacgctctcaaattaatataaaccacacacagcgtgccgctttttgtttttcttatctctttgacctttcagagagaacgaaacgcacagcctctcaggtgaagacacgtgtcatttgttccttgacttgtcactttcataccttaatcgccaagtaacgtaaaagataccgacatggccaaaacctacgaatctgaaatttgaagaagcataagtttgtctattaaagatggaatcaaagacgttctggatcgttactcttcttctctgtggaacaattcaattagcgatttgcagatcagaagagaaaagcacagagaagacgatgatgctaggaggcgttcatgatctccgaggaaatcagaacagtggagagatcgagagtctcgctcgatttgccattcaagaacataacaaacaacaggtttttaaatcctctgttttcgatctgattataataacctatgaatatatctttatctgattagtttttgttttttccgggtaagtacagaacaaaattcttgagttcaagaagattgtcaaagcaagggagcaggtagttgcaggaacgatgtaccacttaaccctagaagcaaaagaaggtgatcagactaagaattttgaagccaaagtgtgggtgaagccatggatgaacttcaaacagttgcaggagttcaaggaatcatcttcttgaatttcacttgttcaagttaatgattacaaatgctctgagagtaattaattatatgtgtgtaaaatactttgctatatgcgaaacctaaaaagttaatgtaatcaagaaacttgttcttatgtcctgcaaatatctttgtatgtttgtttcctgtttattcttatgtttcaagttacaacattgcactgattgaaagatcgtaaacccaatgacaaagaagatggcttctttacttctccttgagagaattgatacaacaaatctcatcaaaagtttttcgatgataaaccacaagaaacatgtctacaaacaacaacaagagcatgagcagcagcaacaaaaggtagatcagagtgacatttacatatcgtaaggcacgcgtttgtacagatccgaaggcaaccgaggcgttgcaaccgcttgcacaggggtacgcatgtaagtaacgagtccagggttttcagacatgtcaatctcctccggtttagtcccttgaggaggtgtccaaacaaaatggtgaagcaaatgactcatcatcgaagttaccaaattgataccaagttgtgcaccgggacaaacccgtcttccagctccaaacggaagcagcctaaaatcatgacccttcatgtcaacatcttcttccaagaatctctctggtctaaactcaaatggatttttccatacagccgggtctctagccacagcccacacattcacatgaacgtttgatcctttgggaatatcatagcctccgatcttgacatctgcgttgcttcggtgaggtagcattagaggcgttggaggatgcagcctgaatgactctttcaccacgcattgcaagtaaggtaagcgggagaaatctgcctcggttaagatccggtcaagtccaaccactctgtcgaactcttcttgcactttttgttgcactcttggattcttgatcatttccgccatcgcccattccgctgttatcgctgtcgtgtccatccctgccgtgatcatatcctgcacacaccatttaccaaacgtgagaaacaagaaatctacacaaattaggtcaactgatttcataaaagcactaaaactcacccatagaagaccaatgatagtatcctcactaagatcatactgatccttcaacgttagcaacgcatcaacgaaatgctgtttcgctccactagacttttgacgggccaaagtatgctcctccatgatagctcgagtgaggcggtcacgacgagccccgtgctcagcaaacgccttctcatcagccggaaacatccacctgagccacgggatgtgttcagctattgacagtgaagcacctagcttcagaccgttggatactatggccttgaactcaagcccttgctcgtccacaacaccttcagcgttcataaaacgcttcccaaaggctagccgcgttatgttgttgaacgcaaccgctcctaagtacttcctcagttgtaaaccttttgctctgttttctgaaaagataaataaccaaattcagtgttaagaaaaacaattagggtttttgtactaatgaacataaacttttattgaactaggtaaataattatggaccttataatttttgaaaatataacactatcaaattatactatttcgaaataaattttcttaataaaaaatatcacttatatgctactatagtagtactattaaataacaactaattattattttaaaaaagtcatttacttaatacctactcaaccaaaaacatttattgttaccatagaaagatttaaataaaagtcgaaaattattcatgtacttaaataaaactaatttgacgacattaagcatagatttcatcatttctgacgataattagtaaaggcaacgtgtggcttgcgtaattttgtataaaaagacaaatctggcataaatttcgttctttccaaagaacataaattacgattttgagtaaaaaagaaaaatctttccgattttgtataaatcgaactttccttaatcagagcattttactacaaagtcgtattttatatggataaacttaaaacttctttaatggcagataatgttcctctctttcatcgaaaaagtttgacctaaacaacgaagacgtaccaggaaggttacagtctctgaagacggattcaaccatggcggtgacttcatcttcacggataggtctgagagactcgagtcgtttcggtgtgaagagctcaagcgtgcaaacttttctcaccttcacgtaatgaggcccataatcggcccatataagatcctgaccgttgcggctaaatgcttccgtcgatctgttccggtgccggtcggcgagtttctggtcgtgttctttcagaacttcttttgctagctcggcgctagatacgaccacgtttagaattgaaccgatccagaccgatatgattggtccataagattgagcccactcgtagtaacatctgaaccggaccggttttatgtcgtagaggttaccgacgatcggcttggggcttgggcctggtgggaacttgtatcttagccgttggattagcttgtaggatacgacggcggcgattgtcgccaccgctattagaaaccacgacatgaagttttgcttctatttttattttcgggtcagtgatttattaataaaaaaggacaaaaaaaagtgtaaatcgaattcacttgtagaattcttctagatatatgtggtggagactttgatttatattagggagggggttggtgaaccgatttatctttttttgtttttaaataatcaatttcagacatatatatttgctaccaccaaacttcttttatgtaaaacaagaaactagtatgcaattaaattgcaaagttcaagacaataaaaaagatggataatgtcgattattgatagtgataagtaggggaaagttggtggagaaaaaaaaaaacagaggtagagaaatatctattttcagattgaacttttattccaatgagaaaatttcttggatatcaaattttcaacattcagatttgaggttttaatttgactggtataaactactgaggaaaatttccagagaaaaggtaattactttggattttactggttatttactaagttgaggtgaaatacatgtacctgacctggatgttttttttcagtagctttcattaattatagataaaacaggaatatttacgcgatgtaaaatgttataaaatttgcatttttaatgtaaacaaaaaaaaagtagagaacattcgcaatctgtttagataattatttacacgttccagagtcagaatagtattttcttaaattatatgtacgacgactttctcattgtcatcttctccaccccacaaaggtaaaacgcttatgattgttgagtgttcaaacggtgacatgttcacaaacttttattcgcagtgaaaagaaatctatgaagaataacaatcagcttagttatatgtcttcttcgaaaatagaaaagtatactccacgaacgttaaacttagtgttgttggtttcgtctgctgccatcattaaaaatgtcaaatcatgttttcaattccaaatttttataaaacacgtttgatcactggtccaacggtaataaacccttcttttcactcagtgatatatgttaatacatgtccccgtaagccatagatttgggtggcaagcgttttgagagcgagtggggaaagtggtttggggttggtgagagagagagagacgtcaccttttattggcaatcacatgaagtagagagagttggtaacttggtatagtccgaccagacgtagctgcgtgccatagataaatttaaactcactcattacaacttcgtctatatgcccagtaaaatttccaaaaagaaactagtgactttttcttctttttttgggtcacctaaggaaaccagtgatattattgatgttcttttaaccctttttttaagtgactagtgaaatgatattatcttttagactcatctgaaaacttggtgaatgaatagtatatcttttaaccaaaattaatcgaatggcaaaaatcggaatcatcccaaattttgtaaattttgatttccccacgcactaatcatccgtcacaaaaaaaagaagaagataatagattattcacgaattaatcagttggtaagaaaaaaaaatagatagtttatttgttttaaaacgccaaaaaaaaaaattggtgtgggagagagtcggtgttgtatgttggggtcagtgggaccagacgggtaggtgagtgtgtttggtgagaggtaaatttttatttgtttttgtgaactttttcttttaggtgtcttgtgaattcgtgttattataattattataggtgagttcaatgattcaatgtttggttcaattataagacgtaggtgttatttcctttgaacaaagagaggttatattttgtgttaggccctactttttttgggttaaatttaaaatgtctggccaaacttctctcaattcactttatttcaacaatcatgttacatgcaacggcaagtcggcaactagaccttgcgtgcaaagaagtccactttcaccttgagaaatccaataattgattccttaaattctataagaaaataaacaactctgacgtgcattgttccacacaaaggaatacaccatatagacatagtaatacacacgcatatgtaagttccgttactgatacatacccaccaccatcttttatgaattacggtaccagtttataaaatctacatatacatcattttcttgtaagttgtaacattataacatcttttgcaggaaataatatcgaacttttataatctacatatagctatgtttttgagaatgaactaagaattctatactatttaaggttagcacttagcagtaccgaaagagattccatatttttctgactaaagtttttgtcaagtaatatagtcattttcttcaatatgaattgagataggtgttaatgggctctgggccgagaatatttttaagcagaaggcctgacactaataaaaagcaattacattttggtttaattcccggttatgttattgtttttgacttttgttatgtttgcatttgttggcagaatgttttcgatatacgtacatcaaaaatatggaacagtgagtagtgagtacattgttaacacacacacaaaaaaacttacgatttttttttataatatagttcactaaaaccgccgtaaaaatggtatgtaacagatgcgtaccaataccaaatgtagtgattacacgggattgtatagctagtcaacgatcaaaatcgaatcccttagttacaataagaaatcaaaactataaataaaatataaaacttttgaagcacgggaaaaggaattcaaacttacaagtatcaaaaaaagaagttactcttctccccaattttgcttctaacaaaaagtaaaaaaaaaattgaaaacccatctagttaggtcgtgaaacgctatgcacattttcactacaaaaaactaccaccaccacttccggaactgacgactccttctccgacgtagcctttccggtttcaacatcctcctcatcagcttcgtcgattttcggcattatcgttagaccattattgccactacaacacttaacggctacaacgttatcttcatggcgtgtttcttcgccgtcatcatctacatgtttgccccataacacggcgtagactcccaccatcaaaacaaccactccaataaccctgaaaaaagaaaacaaatttcggtttgattaattaacaagacagagccaagactaaaccgggaatatatcataattaaccggttgttgttaacgtaccctccaaggtagattccttgaccgagaacgaagaagctcatgatggagacaatgacaacgataagagggttaaaagcagtgacaaagaccggtccttttcgctgcatcataagtccttgaacgtagtaagctatgctcgacgacattattccctgtaaccgttaccaatcacaatgttagtatcaatatttttgtaaactgatctttttgttatttgtgaaagtggcatgatgaaataaaggacgaaccgcgtaggcagaagcgagaaggttcatgtcaaaaccgatgttcaaagcagaaggattgtgttccattacgaaggctagggctaaagactgtaacgttcccatgaaacacaccattgttgacattgagagatgggctgagtatttcttcaaagtcgcagcctatttaacaaaatataaaagcctaattcgttaaatctatatttttatatattacgaaaacagtgaaaaaaaattccaatcatattattattttagatatagttaacccaattatttttttaaaaattatataacatgaaaaattagaaacaacatcccagtaacattattaatactatatctaaaatttcaaattttttatattacttttacgtatcccctacatggtttggtgcataaactatattttcctatgttgatggaaatttaaaactaatcctaaaaactatattatacgttttttagtgatgtaagaagtgagttatattatacacaggatcaatatataattgatacatacctgaagaacaaagaacgacgcccatgagagggaagcgaggagtaggaagacggcagccttaagatagtcagccgtcggcggcgaagaggcggccgtgaggtgagaccggaagaaattaatgaaaggacctttgtagaatatcatcaatatggatccaaccactgtcactaacgtccccatcacttttaccaggcatcttacttttctcatctccactttctccatcctttaaaacaaatatttacataaaacacacacatcaatattcataatttatgacatcgatcgtcatacactaattgtactactatacatctacttttgaattggtgcatatccacgtaccaaaatataataaaacgtatctttttctttggttaaatgaataaatgtaaataataaaaaagttgctttttgtatgttacctgaaaagtgtggcaaggataatggtaattgcaggcacgatgttgctaacggcggaggaaaacgttggtgatgtgagttttagaccgatatagtataagttctgatcaatcaccggcctgttcaaattaaaccttccatgttagccttaatcgtaattattacaaaatcttcttgatatcaacggttctgttagaagactaacccgagaagagcaagaagaaatattcgcatgaatattggaaacgtcatctttgatctcactttcctacaaaaaaatccccaatacataattattactaccaaaaaaaaaaaaaaatctaagtcttgcgagaatcgatttctttagaagaaatatgtacctttcggagagaagagcgaagggtgcgatagcggctgtggcaaaagcgttgcggtatgcaacaagaacgtaatggctcataccgcggtctaggacggttttagttactaagttcatacctgcgtatccgaactgaagacagaccattgcaaaataaggtttagctgattctgacatccttaatcccatcttaatattttgtttttgtttttgttttagagcaagaaaaaccaatcaaagttttggagttattttaggatcctcgaggacaaaaaaattgtcaaattagtgttatgtatataagaaaactgagttaggaaaagagaggagagaaacacttggagaatgtgctttttcctgagaaccaagtggtgagaggttctttgtatatatagcatattattcggatatgttcagtgttctctgatttcttcctttgtatttttgttatttttattttattttttttcggtgacgttagcgttaattattccggtttgattcggcataagaattgggtgtcatgaattcattatctctaaagtaagtggataaaacattctacatatatatattctgtttatatgacttcgtgaaaccaatcatattaggattttaaataaaacttgtggctactaaaagtcgaggttaaaagtgtgatcagtgtggaacaagtgattaattaacatcacctcatttcttaacaatcaaaatttacatgtttatagtagtatatgttttagttgcacaaaaaacaacaacattagtatatgttgtagttgcaaaaaaaacaaaaaaactaataagtacatatggacactaaaacgtaattctaacatgcatgtaaattattttattcatgcaattggctttaaacatggttttttttttttttaaactgtggacttgtctataaaatcacaaaatccaaactgaactaaaattagccggatcggattagcgtattgttaaaagattaaaagaaacttgaaagccacagaaaaattgttgcgattgttagtctaccgtggttttcgatatatgtggtctcatgactcatcaccatcataagctaattgctttatttaatatatagtagaatatcttttggttaatgtatagtagaaatttgacaaatcgaccgacctctgcaaaaagattaactcattgtaatgctaatatggggttatatacgtgtggaatctgacgtatgtccacctctatcctaattactacattcatggtcataaatcatcgatctttaataagaggttaaatcaatgaagaagcataagtggacagattgagttccacgtggcagcaataatcaattgggttcaatcctacgtacattgggaccggccaatatctcaaaactacatttcatgtttagaaatttaaggtggacaaaatatgtgttacatgtcttgtctgttatcgatctcttcacaaagaaataaaaccccagatatttttagagttacgtaacaaaataattatgagttatatatggttaaaagttaatctaatcagaatattattagaacaccttaccaaaaaaaagaatattattagtacaagaaaatcttgaatatatgttctgttttgggcacttaattatatatgttcatacctgttgtttacatttcggataagcaattatatactcaattcttgaatacatctatacatgtttgcgtacatatcatcgatctgcctagaattgcttatccgaaatgtaaacctcatatattatacaatatataaattcgtgaacaaaagctaaccacatagcataactcattggattcttttgttttattatatatcccaaatacttcacttatgtttagttgggcatccattatcttttatagaatatgcattaatgtcactttaagtgacaatagtggctactttacttagttggagaaggtttgtgtggaattcgtatcttaattttttttaaaaaaattagatagattcaactgtattatattaggtcgcatgactttgttgatatgtatatgcacggtgagaatgagaacaaagacgaattattttattatgcaatccgaaaaagtttgatggttcgatcggttcaacatcttgatttgcattgttttaattggaggttctagtctatccatcattattttttttgttatttttttgaaatttaaactatccattatgttaataattaataattcaatatacttatccaaatagaggaaatgtctcacgctcactcgtctgcatgtataaaaacataagtactttagaagtattatgattgaaccaactgactagtgttgtacaaatgatatgatgttgattatttaacaatagtaacaatattggaatgtcttcatatatatatatatatatatatatatatatgatcattctatgttatattcgagttcaagatcatataaatttatagtgaagtataccaaccactgtatcatgcatgaactcatcataataggatttctattcgtgtattagtgtaaaccatatgtttcatgatcaaaatttcgttccaattatgtaatgatctcttgcacattttaatattatagttatgtatgtggctactaaaattagcaccattgggtgtaaaactttcaaattaaaaaaaaaaaaaaacagatgaaaaggtgcagtttgtgtcatgcaagtgcggatgtgtggattccacgtaaatcgactctggccgctgtcggagacaagtgtcaactccttacgatttagttaacgaatcgaatattttacgtctctgcgattgggaattatatgcttacacaaaatccttctgacaaaatctggcatatgtatctgacttttgatttgtcacgtaaaaatcattcgtaactctaattaaataactttgagttttcaatatgattcatatatttttaccaaactatagaatcaatgtgacgagctgaaccatgcacggtgtcggacgtctgtctccacatttttttttttttttttttttttataactaaatatccagaccacacagtaatcttattatcttactgggcctaaacccgcgattagggatttttaaacctccacataaaaatccgctggaactaatggtctgagacactagagcaagtacgcatgttaatttcttaatggccaggaatcaaacccggatgatgggcgcctcagtcgagtttcctttaccaataaaccacgatgcctgattatctccacatatttttctatccactttttttagatgatcaaatctattatttcctatcttaacttttatatgatcatcgcaggaaacaaaactatatgatcattaataaaacaattacgtataaccaatttataatagtattttttttctctgtaggtgcacatttaaacatttaagttgctacattatactcttatagattgtattttggtacaaactatgaaatttaaccaaacaatacatgtttggctataaatttttagataaatttatagtgtaataattggttgtcatacatatagatatttagctagatctcctaatacatattaacctgaatttgagtattttaatttttaagagatctagcttaatatttttactttaaaatgttcggactataaaatatgatataaacttgtgtgtctatatgtgtatagacataaatagccgacataaattatactcaagattctaaatgtttaaggggtgggtttttttatgaaaaaatattcaaaaaaaaagaaaaacgcatgatttgataagaaatttgagaaagaaaaatagagaaagtgggtgtgggtcaaaagtgtgggtgcgtatttgggtagtaaagagaaatgggaaaaaaagagggcaacaaatcaaaatggtcatctaatcaccctcccgcaacttcatttccacactcaaacttttgggcctacccaaagttcatgtctttttttcttttgtttcatctttttcctttttttcttattatttctttgatgaaaatggtattttgagcaatttggtaatcttattggactccagtctcttataactgtggtgacgtgtctataatatatcagagatattgatcagatcatgagttgtttttgagtctctgtctctgtttaaactaattagtttaagcctcacaccaacaacagacaattatgacagacctaacaaattaattgtgctaaccgagagacatgcttgtagctagaaaagatcatatatattagtgaacataagatgttaacattgtttgattttggatgtattaaaaggtcttgcatgtgcatctgtccaaaaatatactccttctcttttgtgttcatgattgataaaataaacgatcacgagttcaagggactaatctctcttcacaacaccaaacaacctattttgatcacaagctttcacagaaagattctattgttcttgagatgttatgtgactgcttgtagcaaaacatttaagtaaagagactaatttaagctcgttctgagaaacattcctttgcaaattttaaaaattaaattaactctctgacaaagttcaaatttatttttaactcagttgtttaaacagctagaaaaacaaagtcaatggtcaagtttccaagtagatgacgtcctcactctcatccagagagtacttcaagtcgaaatagcactccttatcaaaccaaatgtctggtactcctttgatttcaacctttcttaggtcattgcttcccatatcgtaacacaaaatatataattgagaacacatgtttaccggtgccaagataaccttgccatcttgagttgtaccttttacgaccagttcaatgtcatcatggactaaatgcttttgacaaggctgtaaaaccagcctcttcttcgaccacttcttcatcccagcgtctttcaatacccataaatccaccagaaacttttctttgagatgggtgtgatcgaaaacagctatttccccatgatactgtataagacccgccttcatcctacctgcaggcagagccacatccccggcctctagagttactatgatggtagtcaactcttcagacgtaatgtcgaaactcacaacagcacaagtgtccatatcaagccaagccatataatatactaccgatccattgataaactgtcctactgtggaaggagcatgaggatggtaactctccagcgtacgaacctttctccacgaacctccagcttctagaacaaagacccaatgctctgactttagatttgtgaaaaatgcagaggatatcccaatcgtgcagactagtttgtactgatcattaacaggatcgtgcccgatataataccggatatccttcctttcatcttttagagctatgatgtcggattttattgcgggtaaggtcaagcgctgtctagtggtggggttatagatacatgccttttctctaactgagaaacacaacaagccacggacaagattcaagaagaagcctcccattcctgtgaggctcaaatcttggtcgaccacataacaagtgttgtctggagacgttgatgataatgatagcagcacacgttgcccgccgtgatccactaaacacatgtgtatatgtggttgtttttttcgtgtgacagaagtaaataaactgttgcaaaaatatcgacaagagatgagagatgaccactgcttggagatgcatttgaacctcaccatggactttgctggcaatctcataacaatttccatcaagagatccggaggaatctcgcacgtgtattttcttctctcttttacaccaaaaaaaaaaaaaaaaaacagcaaataagagagatttgtacaagtttgagagaagaatcaagcaaccttgttaagcaagaaaagtacctcgtgtgctacacatgcgcataggaagtttggcgggaagcaatgctaatgagttgtctcctttttcatccattatcttcaaagagacaacaaaacagcaattggaaactcaaaacaataacatgaaaagggaagtaaaaattcaaactttcatgcagtacataaatacaacaaactaagccaagccattgatcccaaggaaaaactacgaattagggagattgcataaaggaagcgtatttatacctgaagttgatcggaatctctgagagagacgacctggggaacgctctgacattcctcctgctctgactccgccgcttgtttcagatccctcctccttctcttcatctttttaactcttcagctcaaatttaattcaaaaaaatccaaactttaatactaaagttacgaccaaacaaaagaaatcgatattagggctttgaagttgcgcagtcggaagagagacctactttgtgtagtctttatctttatgaccaaagacaaaggtaacataataaatggtagaaaaggaaaaggaaaataaaaaggaaaattaaggaagtaataaattaatatttacataatcacaattcacaagctaaccgcttggttcacgtgctaatttaccactatccttaattggtttggttcattctatgctcggatttgcagataataatgacacatcgatttatgctatgagccttgatgagttttacaacattagtgtgtataagtgattaattgttggcacatgcttgtttgttagaactgacatcatcttgttgtctctcgtctcaacaaaagatggtgaaaaatgaaagcagtcccttttacaacagccattcatgaaaccaagataagcattaactatcaaggctaaattcgaatcagcagacgtgatgtacccatttcaaatacaagctgagaagacagaagaaactatagcaactacagggagagattgggttaagaaaatggatgaagtccaaaaacaacgtctgcttctcttttgtgttttgcttgatggaaaaaagtttcttcattcattattttaacaaaatgagttttgaagtatggagatcattatcaataccaaacaactgactgaacacatcgtgctgataatgaaagagaatggagataacgttaaaaataatctgctaattccaaaatccaaacttctacaaaaaagattctatcctcaatatgctactgcttgaaaaaagcatttaagcaggagaccaataaaatcaagagcatgaagataaaatttattcaagtaactagaaatatcatttaactcggttgtattcttaaacaacaaacagaaaaaaaaaaaaaaaaaaaaaaggaaatcaaacgtcttgccgtcttggtcaagtttccaagtagatgaagctctcactcttatccatagaattcaagtcgaaatagcattctttatcaaaccaagagtctggtactcctttgatttcaacctttctcaagtcattgctttgcaagttgtaatacagaatgtagaatcgagaatgcatctccaccggtgccaagatcaccttgccgtcttgagttgtaccttttacgatcaattcaatgtcttcgactaaatgcctttgacaaggctgcagaaccagagtctttttcgaccattcactcttcccagtgtcttccaaaacccataaatccgcggaaccctcgtctttaaggtttgtatgatagaaaattgctatcttcccaccatactctataagatccgccatcatcgtaactgcaggcacaacctcgtcaaggtggatctccctaggtactgggatgatagtcaactgttcagacctaatgtcgaaactcacaaccacacaattataattatcaggccaggccatataacgcactactgatccactggtagaccgtccttccgtggaaggggcatgatgacgataattttccagtggaacaacctttttccacgaacctccagcttctagtgcgaagacccagtgctctgacttcagattacccaaacgtggcaatagcgaggatatcgcaaccgtgcagactagtttgtattgatcactaacagggtcgtgtccgatgtaataccggggatgatgcttcgtttgaccttgttgagctacaatgtcggactttatggcgggtaaggtcaagagttgtttggtgctggggttatagatacgcgccttttttctgcgagagaaacacatcaagccacgaacaacgttcaagaagaagcctcccatccctgggatgctcaaatcttgctcgaccaccacgaaagaagtgttgcctcgagacggtgatgatatagatagcagtacacggtgcccgccgtcatcctttaaacacatgtataggcgtggttgttgtcgtgtgaccgtagtatataaaaggttgcaaaaatatcgactagaaatgagggatgaccactgcttagagacgcacttgaacctcgtcagggaggttaaaggaaatctcataagaatttccatcacatgatcaagatcaaaattctgcagtaagtattcacatatatcttcttcttctttcttgttgggtggcggctagaccaaaaatagtagcaaataagaacggtttaaacttataacatgaaaaccacaagtcaaaattcaaactttaagccaaagaaaataatcgctacgaattggcgtatttatacctgaatttgatcggaatctccgagagagacgacctgggcaatgctctgacattcctcctgctctgactccgccgcttgtttcagatccttccttcttctcttcatctcttttaactcttcagctcaattctattcaaaaccaaaattacaaccaaaagagcaaaggggtctcttattcttgtgtgcttttggattttgaatacggaaatcgacgatattaggggtttcgaatttgtgcagttggaagagcaacgcattacagtttgttgataagaatatatatatatatatatatatatatattacggttgggccacgatgggccttcttatctcttttacgtgggctgttatttattttgttagcatgttatataatattgttgggccaatataggcctcgttatttatgaagtttttctcgacgaaaaaataggaaaaacaaaataaaattcgtttttttatttttaaatagattttatgagaatagttacatttttatatagaaaagatttttcatatttctatttacataatcacatgctaaaccacaatttataattggtttggttcattctgttataagcagttggccaaagctcggatttgcagataataatgacacatcgatttatgctttgagccttgatgagttttacaagattagtgtgtatagaagagcacagatgattattttttggcacatgcttgtttgttagagcaggcatcatcttgttgtctctacaaaagatggtgaagaatgaagcagacccttttaactttgaccatataaacaacaactgtcattcatgaaaccgagataagcataaagcgctttctcaaattagtagagtgcttctcttttgtgttcttgattgataataaatgttaacgagggttcggtggatttatgggtaggagactaatcttgacagaagaaaaaaaaaaaacttaactgtattcttatctggtacacaaacaaaagtcaaaagtattggtcaaatttccaagtagatgaagctctcactctcatccataaacttcaagtcaaaattgcattctttatgcaaccaaaggcgtggtactcctgtgatttcaacctttctcaaatcattgttttgcacatcataacacagaatgtagaactgagaacgcatctccaagggtgacagtataaccttgccgtcttgagttgtaccttttacgatcaaatcaatgccatggactaaatgcctttggcaaggctgcaaaaccaggatcatattggaccatttcttcttcccagcagcgtctttcaatacccataattctaccaaaccctcgtctttaaggtagctatgactgaaaattgctaattttccatcatactctataagatccgccttcatcatcagtgcaggcacaggcacatcccagattttccgaggtaataggaaggtagtaacctcttcagacctaatgttgaaactcacaaccgcacacttgtacaaatcaacccaggctagataatgtactactccatcgatagaccgtcctgctgtggcaggagcatggggatgataatttcccagtggaacaacttttttccaggaacctccaagttctagtgtgaagacccaatgctctgagctcatgtttgcaaacaatttcgagtatatcagaatagtgcagactagtttgtattgatcattaacaggatcgcgtccaatatagtattgggtagtcttcagttgaccttgttgagctgtgatgtcggattttacggagggtaaggtcaagagttgtttggtgctagggttatagatacacgcctttgttccgaactggaaacacagcaagccaggaacagaggcgaagaagtagcctgggatgctcaaatcttggtcgacgagtacaaaacaagtgttgtccggtgacgttgatgatagtagaacacattgcttgtctttggccactaaacacatgtatagacgtggttgttgttgttgttgtcgtgttacacaagtaaataaacggttgcaaaaatatcgaccagagataaggggtgaccactgctttgagacgcacttgaacctcataaaggactttgttggcaatcttataagaatttctatcatgagatcaggagggatctcgcagtcgtgcctattgcacatatctttgattcctcttcttcttctcttcctcttcatactcctctctcgttgcatgactgctggacgaaaaaccaaacccaatagattttgacaaagcgctacccacaaacttatatcaaaaccctaagtactcttgttcttactaattaggaagaggaagttctttcatgtttcccggtcacggttggtggagatatcaaggaggctagcgttgattttttaagcccattcgttcaacaaagcccattaagaaacttgtctttttgtttttgggcaaactagataaaaaaccttgtctactacatatttagactgagtcttgtgattatgtgtcagtgacaataacagtactgctattatgccaaacacaatctatacagaaactgacagagaaggagagacaatattcatctctgttaattaaactactcagaacccaactccactaatttacaatagatctaaacctaattgtcactcttatgggttccaagttgcagacagctgtgtagagattactactggaacctgcaagacgcgtaaacacaagtccacaactacgtttcagtgatctaactaaacttcttttaagaatctttttagaattaaatttggtatttgttacctcggagattgtcgttttgagcagacttatgtcatttttccgcctgcatcagacttcctcctgtagaagagcacatatgcagcacctgacttcacatcatcttcgtttatgtgtgatatatggctatcatcgaagttataccacctactgtcgtccaaaagctgcagaccatattcgataataaacataagaaaaacaagcaagaaactcagaaatggaaacagaatgaaaaagtttagttgttcgaactgaccttgatatgtgcagtgtagtgtccgctgcccataccaccataatggttggtcaaggcatagagctcatatagttgaggttgagataggtttttgttggctacatactttgttagatctaagtcatgaatgggaaagttaacaaatgtttccaacttatgcttcatggacctgctgtatgagaatctctttagatgtatgactaagacctcaggaagcctccacagatcaagctttttgcttgcctgccttctttcattgcattgtggacagaaccttcaaaaaaagagaaatgataccattgattgatttagtcagctaagtagaagatactggctaaaatctactgcaaaaatacagtgtgttcaacttccatccgtagtagacactagcaatttctgaacatcattcatcatcttgtagtaatgcgtagttcaacttttaccacaaaccataaaaaatgagtctcacaggaaggataaggagaaaagactgcttaccacatttcgtcaggtaccaaaggctcttcgcgtagaaacgcttccaaacatgcatataaagaaagaggttctgaacgagccttcttggtagtaggtccgtatttgagtacttcaggcaaactctccaggcaagttatatcatacataccagagagttctggtgtccaatccaaatatatagttacagtagctgatgacggtaatttcatagcttctgcttcattgtctggcagattaatcgttttgttgtcttcatcaatgagttgcagggataatttagaagcacccaagtcggaggagttgcttttcttggcttttttcagtccaccaactttatcttcttcctcagtattattaaatcgagctgaccttctctcggggatgctagaatcagaatttccttttttgcccacagattcttccctccgaaaaggtgaaagcatattctggacgaggcaatggatttttcctttggtgagtgcatctccgcatgaagctgatgagagaagaggtgttccacagggtttcaattgtactgtactttcacgttccccagctttcctaaaacatggtacaagaaaagataaagaagagagcaaacagaatataagatacctttctcagatcagcattaatcaaggattcaaaaattattcagaaatcaaagactgaagaagtgaggccttaaagaaaagaaagtcttgaagttttaagaaaggaaatccaaagatgttgagtacagaagaggactttgttgtttcaaactaatccccagaattagttcatacaaattagactgatatttaacttactgatctctgcggcggagtactagtctaagcaaagtcgtattctccgaagactttgaaagtttgtatgcagcaaggtggtcatcatctttgatacttgacaacggaattaaagggtcttcaaataatctatggataaaattattccgaatctgcgaaaaacatattaaacttagataagcggaagccaaaagatcaacatcttactcaaaaacgcacttgaagccacaaacctctgcaagtttcagctcttcactttgcttcaaggaacaagcatttgttaatgcctggatcaagtctctgcaacgtccctgctttgaaacattgactgtgatagtggaaggtaaggcagttttatcacaagaaaaaactgtgactgttattgctcgtgttgtgttgaactgcagcggcaaagacaggtacatgaagggatcaaacgttacagaaaccttgttgcagattggacacaccaatgttgacttatattggccctgtgagttgacaaacagagtaggagaatgagattccccacagtattaaaaattaaaaccaaaacaaaaaataacaatataccctgggtctgaatcacaagctaaaaatcagctacatataaagctgatacatgatggatgcactcacacaaccgagattaacataaatatcaagactaaattcaataggaacagagacaagttatgtaccctcttcaaataccgtgtttctgtgaaaattgcaaatgtatacagtatttttactaggccaatttaactcttctgatataattaactttctacagagccactaaaaagcaaaagggactggaatgtcggttactcgtgtctattagttgagtgaccatacagcagattcctagacgttataaccaaatgcaagcctaatccacaatactagtatcagtttcaatgccatgagttgataaacagagaagcgttggattttctaaaagatatacagctgacctgacaaacatcaactattattgagtcattacgagcaatatgatttttccagaactcatcagcaacttcttcatcagggcgcccatctgcgtctcgagaatttatatatggtttgtgtttaacacgatttaggtcctcgtgaagaccatccagcagaaacgctaaaagctcctgcaaaatgaaaaactcgaattccttgagctacaatgtaaattcaggttaaagaaaatatctggctagtctcacaaacctgcgaatcatgttgattgtacccactaaattgaggagcaaagcgagcaagtttagctttgaatggacgaggtgcaattggtgtccgcccaggagcccataacttcctgagcaagtcaccaaatgcgagagctaattccccctgtgcaaaatgatttcaatacagtcaagaaatgatctgaaatcaactactcaatatctcagaaagaaacaatgcttgtgatctacgcgagaaaataacactgattacctgccaaggaacactaccctaatcaacttctaatgtaacttctgatgatataagatgtcttatatattccaacgttattccatttatatgcaaaattaagcctatcaagaatgtttgggacgaaagcacaaccccaaacatacaatactgcaaaagattttacgtgcaacagggaaacacaagtgaaccaatgatgtctaagcatacctatacacttaaacctacacacacacttatgtatccatcagatttatgagtagcaaagaacttcaagaggaacttaccaccattccaagagggttttgccaatttatttcttgatgataatcttcttgaaagtaactagcaaactcaggtgtatgaaccagacactgaatcgcactattcatgaaacaagtattcccaagatttagcagccctgtcaagccagctgtggatcccctagtggtgacgccagtgctactgtatgtgttatcaaaagattgtgaaacttctacactaccagttctgaatgcattcctgcttgaagagaaccctcctgcggcagccaagctcgatttagaaggctcaatgagaatagaagtagagtctccatccaccaatccgttctcttgagcagattgaatgtgagcacttgataatgtaccattgatgtcaagcacctccaccaaaatctgtttttaaacgacagacacaaaatcagtgggaaagttaacgagtcagtaagaacaccagaaaagataaaagtcagagagctataaaaccttaagcttaggctaactaaacaatcggactgaagcataaaaaatttatattcaaatagctaataactttgaaagcaaaaagaagaagaagaagaagtgaactcacatcctgatccatttgtaggttagcatcgtccagtgtcttatctaagtcattcatcaaagaatacttttggtggccgtagtaatcccaaatgcgtacctacatgatagaaaatgctcatgtaagaaagagaaagggaaagaaaagaataccaaaagtattattgaaacgggctgtttaataacataggaatatcagatctttacatgctctgagtcgaggtcaaaaatttcacaggctcttcgatggagctctctgatagtttcctgcacaacaaagtttgatagttcaatgaagtagcagactaaacgagttcagattttcaagtaatgaacaaagaaaaaaaaagaacagaaaagaggataacctttttgctaattcttatggcactatggtcactttttggcatcagaagtagctgaagacgtaaagggtaaacctctacagccaattctgtttgagagagacctgagctaatgactctccgtgccagagttggaccacccccgtaccttataaaacagaagcaatagtccataagaaccatataatcagtttaagtgaaaaaagccaaactatagtgtagtaaataagaaaaccaagagattgcgttattagtttcatattatgcattacaaatcaacataggagagaaagcaactaaataacatcaggtgcatacaagatgaacttggtagagctacacatctgacttaaccttagcattatccatttgaggaatgttagataaacatgacccaacataccaaagataaccaaggaaaatcaaaagcactagaatagggataaaaataagtctagcccacataagatgaagagacgtaaaatttaatatcagttcaattcttctacacttaaaactcaccatgaacgcaattggttccacacttcttgagggagcaaaacataatcacgaccttcctgaagtgtttcaataatctcactggtattactcgggtcctccagcgaagaatcatagatcaaatcagagttatcaatcctagaaggcttctttagagtgcttgaaccaggagagtcgcaatgctctgacagtgaagacccatcatttgtgttacatggttggtcttgattcacatactcaatccattcttgccaccatctggacagaaaagagagagaatgttctcagcagaagtaccataagagaaaattcaaactttatcacaatggttgtaatctaatacaatacccataaacatgagtcaataaaagacagttctttggaaaaggttatgaaatgctcaaactaatctcatcaactactacagataacccaatccctaatcgtaactctaaccctaaccaagtccgaaaccaaggcaaccaaacaagacgaacagatagatataactcttgggaatttgataaattcaagctacaagtgaccatagggagcaaaaatcaaagctttataaacctctgagtgatgagataaaatgtatcgccttctttactattagcctcagcagcaatagcaatgtctctgatgaaaactcgctcttcctcgggagacagatccgtgctgctactgctgcttcccatcgatacctccgccatatctcgaaaattaggagaaattcgtttcagctaaagtcagctttcgcgaattctagctatgaagagaagaatctaaagctgagacaacgccgaacaaccgtgcttcgccgtacgactccggcgagagtaaagcaaggcggtggatatgataaaccctaacggcttttttgggggagacaaagtagagtgagccgctcgctaacaaaaagtcggaacctcttttttttctctctgaaacagatccttgctggcttcgctccttagatagtcatttcgaaataggtccccaaaaaaatccaccaccatttataaatttaagaaaaaaaacaatttttgttgaccaacattttttttttttgctcttgcactaattgaaaaggttgatttaaaaagatatcttaaaattgttagatttttttttttttgtaacttttattttctcaaattgttagatatgaaactttaaacaatggttggaaagaaacattttactaataatgaaaaatttattaatgcgtaaattgatgttttgagattaatatataaataacatgttgataagaggcctggtcaatttactcaacgtggaaactccatctctcttcttctggaaccaataaataaaataaaagtaagctctttctcgtgaatctctgagttaatgcgctaaactaatctctccgttgagctcaggtaaagagttgtttctattcacatgtatctgattatttcttcttgggtttaaagtttactcttttatctcgttttcgctgattcgtcttgttctctcttccgatcctttttttgtctctgcttcttgctctgttcgttcatttacttatcttctccatctcactacctttttgatttagctgctgttgtagtaattgtatatatgttcattttgatgcaattcaaggtacagatgtgtttcttggtgtcaattttcaggctctgtggtaaataaagtcctgttcttgatattggtggtttcatcagaattaggatgaaagagaagaagggtcattacgtgccaccatcttatattccattaacacagtcagatgctgatactgaagtagagaccactactccaaatctggaaattgctgtttctgaaagcacaaaagatgatccgagacaatggtcatctggtatatgcgcttgcttcgacgatatgcagagctgtatgctactactctctgtcatccaaaccttcttcattttactacacgaatcaaatttgttaaaggtgcctctttgcattgacctgtgaaattgccatgtgttagtgtgttcagatatgttcataaagataagtgtggttctggttgatagttcttgcagagttttttttggtttagaagaataaccaagtgcatttcttgaataggctaggaagaaacttagattgcttatgttttgagcttccttgtgttacttctctaggacttgattctgttttcttgtttatgctgaagatcatttagacaatggtttgaaatgaacattacaacttactgtggtttgtttcgtatgcacaggttgtgtaggtttgttctgtccttgttatatctttggcaaaaacgcagagcttctggggtctggaacatttgcaggaccctgcttaacccattgcatctcctgggctttggtcaataccatttgctgctttgcaactaatggcgcattgctcggtctaccgggatgctttgtgtcatgttatgcttgcgggtaccgcaaatcattaagagccaagtacaatttacaggttagaatttctcaaacgacacatatgtggataataccattaggtatgtatgtggcgcttctgactgatttaacattctttgattcaggaggctccatgtggggattttgtaacacacttcttctgtcacttgtgtgccatttgccaagaatacagagagattcgagaacaaagcagtggttcatatcctcttgacatgaagatggctatcaccaatgcccccttggctcaaaccatggaatcagctaactgatcactttgtctcattgagcttccttgtttattttgtagaagacatttttcttttcatcgacttttgcaatgtatttgagaagtttgatgagtaagtaaaactttctaaggtaatttatcatatataaaaaagaatttgtgaatctgccacaaccacaaaatgttgctcttttcgtgaagatttatatcgtttatttagtagtgaattccaaaacatattctctaaagtaatgttcaataaaatatagtgagaacagataaggtacctctccccgtatataggatttttattttacatattacatccaacaaaatccaataagttagatcacaccgtccggtcatgtattttcttctttctcttgctgctgtgtagttaaaaagtctcacctcaatacaagtctttccaacgtaatgtatcaccagttccacggtctggtttgtgatttagctgcaagatgtagcgccattgaaccactgctactgcttggaccgttgcagataccaagcctgatgatgaacgaagctgtgcagcctttctctaggccttcactttctatccacatgtatcctcccattagcccgacaaacctaaccagagacatccatcaacagaaacttgccttttagctatttgtaacaccatctgcttataacttatatatacttttgggttgttaccgtttacagagagctagcccgagtcctccaccggaatggttcctctgagttccggtccgaggctgtacaaatttggtaaagagcaaaggaatgtcttgtgtgtgaattccacaccctgtgtccttcacctgcaccatgattataacagtaagaacacagtaagaagcttaactttgtagtttagtaatttgtagattgggtctaacctgcacacataggtagaagtgactgtcactgagaactggaaaaaattctggagatggtaattcttgtaaggactcgggtttcatgatagaggctattatggagatgtagccttccttagtaaatttcacagcgttgcccatgatgttaagaattgtttgcatcagacgtttctcatcaccaatagcataagttggtaagtctgcagacagaatcagattcgttgatagtttcttcactgatgcgattggctttatcaaagagatgacctgcagattcaaagcgcccatgttattcatgtaagacatatataatggacttcactggttaatcagggggatttagttacctcttcaaagatcgcttgtagactgaatggttcattttccaagagtaagctcccatcttccaatctcgaaagatccagaacgtcgctgattagtgtagccacaagattgctgcttttcagtattgtctcgatcataactctttgctctggagacagctcagtctcaaggagaagagaagaaagagagatgatggcatgcatcggtgtcctcatctcgtggttcataacagctaggaaatcatttcgagcatgtactgccatctcagcctcttgacgagccttgtctaaagcaaaattctgctccataagctggtcacgagcgtgcatggattcttccaaaattgcagcatgtgagagagccacagccacctgaatgaagtgagagtcaggggacaaaacaaaacactaaaagctggtaaagcaacttgacacacaaccaaacatatacaagtaaagagatggacctgatccgccacgttttctacaagctctaactcatggtctctccattttcttgcaccatcggttgggagaatcaggaccatgatagcgtaacctttgccagagagatccgaccagtcactgccttggaaattagagagatgtaaaagaggaacacggacagaaacaacctcaggaggtgaatatctcccaaccggaggcccaatcttagccaaaggacaagaatgaggtatgtgcatagcttgagcgctattgaagagttcattaataatcgggagatttatcggcacactgcttccaacttgtattttatgactcaaagtatgagaaagctgcaaatataaaccactttgagaaggcatccacaacgcacattcctcaagacaaagagttttaccaagctcaacaagagtggttcttaaaatagtatgcctatcaagagttcttctaattccatgagtaagcatcctaacatgcctaccagtctcctcttgtgttaaaataagacccatttctctatctaactcatcagctttcttcttgagaaacaattccctgttcttaacactgagaagatcaggaataatatgaaccaacatcaacgcggtagcacacgacacaaccgcgcaagagactttagcaatagtcatgacaatggcaacggctttggaatgcatgaagaacatccataggttgatgaaatgcgtagctccacagagaatgataaaggctccaaactgcataagcacccatttgtaagggaagaaagcagacttttgcacgaaatagataagctcgagtgggattgagaagtatgcaagagcaatcaacgcatctgagatgtattggtacttcactaacagatcatcttgattcacatgcgtctcaaaacaatcgcatgactccatttttggagctctgacttgtgttgacctggtcaacaaaactcagatatcagtggagactagatttggactagagctatggaaaagagatacaaaatctatccagaaaattgaatctacaaaatgagattgattcctcgataacacaacacagatcgatcagatgaaatgttactaaagtagtgaaatcaatcttcatcgatagatagatccgatcagaagagaataaatagaaagtttgttatcccgagacggcacagtacctggaagagaaggattcatgacggcggagctattggtggtgtgagcctcatagctttgggtaatgatgaaaaaaagaaagttcaagttcgtcttcctgattgatccgagcgttatgaacttgaagaaatgagaatccaagcgtaacagtgtgataaagaagaaaccaatgagaggtaaaagtttttgatgattttttttttgcaaagagggaagttcacgtgttataggcctacttgttacatttaaataataatattattagctctctttttctgacaatgaaataaagaaattttaaaagtgagctcaggttcatgaatctgagggttcatgctaatccaattctctctccgtcgaccttcaggtaaagacttcttcttctgtcacttgtgtgctcatattctcctgctatcaccgatgcccccttggctcaaaccatggaatcaactaactgatcacttttgtctacttggatttcagcttctattgtagaatgacattttttggtcatcgacttttgcaatgtatatgagaggtttgataaaactttctaaggctatgagtttataaaaggtaaaaaaaaaaagttacagcattcggattctacatctggaaacaaaaaccggacaacggtattagctaaggatattacgtgataccagagagcaggtatttattcttttacatacaaagcctatatgagagaagacctgctgatatatgtttcaatcctcatatgtcttcaagtggtcacaagatgaggagctcctgatcgaggtaggacacaggagtatgttacatactttgcactgtccagaagcacgactacaaaaactcgagacagtgattttggtcccccaatcatcccatctatatctccatcacctccttctctgggatcaacaagcacagatacaaccattgatgaagcaggcttgatttctttgctactgctgtttctttggtgctctttcgtgaggttaaaatctgatcctgggagtggaatgggaagaccacgaaggattcttctgttctgttgcttgtgtgtgtctgtggtgttcttaccgtgttcagcagagacgttggtagctgcaggaatgatggctccagaggttgaggatacatcaaactgaaacacttcagtgcacatccctgaactaaacatgggacctacaatatagtcatttaacaaacaaaaaaggtgttattatttagtgaacaagaaagatataaacgctactactgcgcttacagcttctgccgagaaagatgaagaaaaatatacaatatgagtaacaatttcacatgttccttattagtgtttagtatctaatccagattatacaatacatctactcatgaccagagatttgctgaaggtaagttaagcctcattaaaatgttcttgtgtctaatatcaagatatgataaggactagtatacctacaatgcctgcctacataaccaagtcaagggaacagaaagtaagatcaaaaacccatgattacctgcaacaccttcacggaaccattgctgcatttcaccgttggctgcttttgttttgacttggtctttcagagtatcagcagagccagaggatagagctttctgtttttcagccttagatctatagagatgcttagccaattcctctgtccttcccacgtcaggtagaggcagtgcaggggtataatctttagagatcatcaagtcagctttcctctcctttgattcagaagcctttctcgaagccacggctttctcactcgccaatatagaattgataatcaaattcccatctatcttcacaagcttgtcattcctcggaacaaagagtgatgcaactagaggctcactaccatttccaggagtgacagaactctctgttgcagatatatttttcctagctcctcgatcagaatctctcccacgatgcatcccattactattagaaaccccagtaccagcaccactacgagatgtatccaaaactctatccctatgctgactgtaaatctggtcagtaatataattagatctatagttcccataaaaagcaccactaattcctccataattaacgttcacaattggagctaatgcaccaaacaaaaatagacaaaacagaagacccagaaaactaatactagccaccttcttggtcttagcttcactcttcttactctcggacttcttagccttggatgttccaagggtgttctgtggtttcaacctaggaataggaatcaaaggcacttgagatccttgttgcttcaccatataaggaggacaaggcatccatggataaggcattggagccataggtggatacattcccatcggaggtggtggaagatgcggcgggcacattccattgccacccaattgctgccttagagtagcattctcagccatgaaatacgatatcttaccgttcaaatccgtaatcgtagaatgcatattcctaaccttttcttcaagctcctcgacgtaatgcttcttcctctgcctagaaagctgagcactttcacggtttctcatgagtctagctctctttttctcatcttcttcaccggtaacagcactagcgtcagcatcctctcccgatctcctgtacttactgttcctagactcgtcagtcaaatcctcatcgatctctttcttcctcttggtaatagacgtcgtcgtcgtagcagcttcttccactttaaccttctggtcgaccgcaacgtttctcgatttaggcgacgattcatttgtagcttccgaaacatcagaaccgcaattacccgaaccctgagaggacaatggagtcggtagatctaaattatggtcagcaccggagcaacgatcatcggaatctctaggagattcccggttaatgcaaccggaagttgtaatagtcttatctgcatctttgggaacaatacaatcaccggaaattccagaactttcagactccggagtgaaatcaccaaactgttcttgattggacgtattgatagggatgagaaacgactcattctcagcagggaagtaaagatcgtccataccgtcgaaagtgagctcgaattcaccatcgggaaaccccagatcggacattagttcaccaatcggagtctgatcggagaaatgatcatctaacggagggatcgagatggaatcaaaatcggacggaggagggtaggtggaattagggtccggagcaggtggaggaggctgctccttggtgattggttcagccattttgaaactgagttttagggttagggtttcgaatttggggatgaagaagaagaaggagagattcaaaaggaagaaaggggttatggaggaatgaggttagaacacgggagaaagacgacgaggggtttaaagacaaagaggaagaggaagtagaaggtgcttgcttccgtcttcgtctactgcgcgtgggtcttacgctccggaatcatactcgctaacttacactagtgattcatgaaacttataatatccaaaattaatcgctttccaaaataaatgataaacagcaaatctagaaaaataaattgggaaatttattttgaataacacttttcctaagagtagctaaattaaattttatgatgtgctagtgggttttttaattttgaatttgtttttgattgactattatatatgtttaagatagtaagtagtaattttgatcttcaaaaaaatattaaactgttatttttaaagaattgacttaatagttcatttaatatttgggaaagcagatttaaattattatttttttttcataaattaggatatcagttttaagatttcttttaaatatataattgacttaatagttcatttaaaataatttacgtaaattacttggggaatatatcatttatctcccaaaaaataaacttagtaataatttttcgcgattcgttatatatcttttttttttatataattactttcttgatttcacaaatctcaaatagattgcgtttaaggtgactgcaaagatatgaatttctcaccatacataatctctacaattgtcttgataccaaactatacgtgtttcgtaatcgagggggctataaaagtaaaacaaagcatatggattagtttgacgttatagttatagtagtgtcgatttggtagtgaatacagaatactcatggtcatggtgcatgttgttgactttttgggatcgagctttgagacgggacaccaccaagtgattagttttgtgtatccaaatttaattcttgggcgtctaaaatatcttagtctttggtgcattatcattctacatagtcgtcatttcacgattatgctgaatatatatttgggtacaaagggcaaaagacaagggcgagtgtaaaaccaagaagcagaggaagagcgtgggagatatcggtatccacatgttaaaagcacgttgacttcattgtgttggagtgaaggaagggtttttgtttgtctccgttaatctctttctctcgaaacttctctcttctgatctaaaccctaaaaataatgctatattatctcctcactttccaactgtgtgtcgtttttgagtctcttttccgtcacgcatgtctcctctcccctctgcatcgctcatcatttcttctctctcacctcatactatcacaaatagagtattgtttattgatgcattttaaatagatataactattggcttttcgttcacgttcaaagttcaaaactatgaaataatgaaatccgctaggaaatgagaaggtgtatattggtataaagcatcattttttcacgagagttttgaaagacacaagccaaaataatgaaagactacattatattcttcacaaaagaacacaaactcatcaaagactaacattatgaaaaagtaaaccctctgatctgatatacgtacctttcttgggaggtgcttgcaaagagaggtggtggtgggtgcaatgaaaatctaatccatactttgaccaccgttgaaaatagacaactttgtagaattagagataaacatgtgactgtggtccgttataagaaattagaataaacaggttacagactaaatgtgtgctcgtttacatacatggttttataagttcaaccacaaataagcttacatctatcggaatttttttttccaaaacaacttcgacttctctcttatgatcttatctaaaccgactagtaattccaatttaatcttattcgagttttttttttttttttttttttggtaatagaaagaaataagatcaaacgttggtcgcaaacgtggaatgtgttgaaataacccatcaatcaaacactcaaggtgtgaatggtaacaaactaacaatggtaataagctttagggattttcaatagcatcatattatatgcactaactaaaaatagctcccacaaggccacaccaatttttttataaaaataaaagcaataaggtatttttacctttttaaaattcattaaaaaaaaaaaatcaacattaaaatagttatcttccctctccttgggttttgagggagacagagataagatttgcatctataacgaagcacttctctcttctctctcgtcctcaatacttcggtgtcaatctgatataggaaactaggcattgatatatggttagatacgtggcaatacatgagtggagacagtagctgtgagacgtggcaagagaagattggtcgatgggagtgttagaggaagaatcgagatgcagagatatatagctaatgaagatcatttgcagaagataagaagattttggatttgttgtttatagtttccttttggattctctctgagaatcgttcctcatcgttcgccggagtttcatgttgaactcttgtagatgagaagttgatatcgcgtttcatgaacgttgtatcaatctgtcattttcattaatcgaagcattctatttcgttactctgttttccgttatcactggtatcagagccaatcgtgtcctcggtggagatcaaagctacttgcacgatgaagagtcgtcggcgcatatcgtgggaagagataaacgagagctggttgaatggcttatgtgtgttttgcaaagagccagaagctcctgatcaccacatgaaacacaagaacttagggcttcttatgatctatggtaatgacgatcatctctctaatggtggaattggtgaatcaattgatcatcgttcaatgaatttggtacatgaggaacgagaggagcactccaagttggataatcacaaagatttagtacagagaactatcatggaggaacgagaggagcactccaattctgagattctgaaaagtgttgaacctagggaagtaaatttcgggttagaaaatcttgattctgtggtgatgaacgagtatcaggagcaagattgggttaaacagaacatgaataagaggtttgaggttgaagatgatgttgataggggtcagaaattgttgagtattacagaaaattgcagtgcacaccaagtgttcggtaaaacgtctcaacatgaagaaaagctggaaataaagaagaaagcgaaaggattcaaatcatggatgttcaaattcaaacttgctaagaaaacaataaggaaacgagacaataagggttggttccacacttggagcagaaaagtgggttggaggaagaacaagcctatgaaattgcagtttgtttcacatcaggtgaaagaatcatcacatagggataaagactcttttgcgggaaaaaagtcaattaagcaagagatgtgtgttgaagtggagagcttgttgcagcaacaggatttaagacgcattaaagagacacaagcggatcagggagattcttatgttgttgtccggaaactgttgccgcatcttgaatcggtttgtgctacaaaatcgtttttggacaatgattcaatgtccaaacttgaagcggagttaactgactcaaagatgaggacggctggtgttacacaacatcaggtctcaatttttgtcatggaaactagccatcatcatcaagtgttagaggattttgatatgcatatggtcattgaggatcaacaacctatcgtgacagaagctttgcgtctaatctctaatgatttccactcggacgtggctgagttgtgtgagcagttaacatgtgacgagtctcataaaccgaagcaaagactagctccaaagtcttggatgtttaagtatagaagggaccataagatactacacagccctactatgtctaggaatgtgagaatggttgttttcagaaaaatggaagcagcagaaaggagtcaacatttggttacacacaggtttcatgtgggtccactagaaatggatactcaagactctgaaattggtatcatagaggttttaagaagagtgatgatgctgttccaaaacagtattgtacaagccaagatgatggtgacaaagagaaagaaaacgttttacaagtctaggagattcaagttcaaacatagagttgtaccaagagctttacaatatggttttgaagtcaaaatgaagcaaaaggtttctacagagtatccatgtttgttcttgatcggcaaggaggcagaacttgttcatattttgcttgggtatagggacgtgatgtttaacttgaagaaaaaggggagatttagactctttcagtcattttctaaacaacttctcttatggctgcgacatgatgcattgctaataaaaccgtttctgcttagtgatgagaggttccaaataaagcatacatggagaactaagttcatacactccgtttcatcaattggtgttgggcattatgaatattctatttggacacagagtgacaaagggacgcagctcttttacagcaggagattggttgtttacaagcttggaagtgaggccaagaatgttgtagaggtgtctcaacgtgtgtatcagcttgttaaactgaaatttgccaaagacgaacgaaagcttgaagtcatacagagccaaacctttgaccctgggattggaattgaatcacaagagctacttgagaatacctattcgaactgaaccttgtggtcaaggttcttccaacaggggagttttgatataggaaactaggcattgatatatggttagatacgtggcaatacatgagtggagacagtagctgtgagacgtggcaagagaagattggtcgatgggagtgttagaggaagaatcgagatgcagagatatatagctaatgaagatcatttgcagaagataagaagattttggatttgttgtttatagtttccttttggattctctctgagaatcgttcctcatcgttcgccggagtttcatgttgaactcttgtagatgagaagttgatatcgcgtttcatgaacgttgtatcaatctgtcattttcattaatcgaagcattctatttcgttactctgttttccgttatcacaatcatcctcttcctctaaattctcttcttctctttgctgctacagaaaaagaatcaagctttagaggcaagcaaggactcactcacccacaagtatcctcaccccatctactcatggacacagcattgacctcagaatcaggctgtgccgttatagccgataagggattcaatgtggatccttttttggtcgaggctcttcaaaaccctcgacatcgtctaacgagtaagcctttttcttttgccggtttatttttgtctccgattcgtgtcatcccctagtttcctgaagttacaatctgtgtagaattggaacttttgtttatctgattatcgtaatttagcttagaatcaactggtattgaggattgtttattctctgcctatctgtataggcctaggttgatttagatcttgactagtgttattgaagttggaagcttacttagcagaagatgaatgacaaactccataactagtaaagtggttttgcaatagcaatgtttttaatctgatgttctgattgttaaatgtgagattgtttagatttggagttatctctccttgatgtgtacaaatgcttctttcttttcttaatcgttttctaagccatttttgctcttgttatgtcagttttgcggatggaacttgatgttcagaggttcttgcagagccctgatcagcagcaattcgagttccagcatttccctacatcatacctccgttttgcggctcatcgtgttgctaatcactatggactaattacatcagttcgagatggtggtgcagatggtaatgagagcagaattgtcgtgactaaatctagtgatagcagatttcctgctgctcgactatctgaaatccctgtgaaacagtcagaaactggcaagtttgagcatatgaaagttgttataaagccaagacctactaaaggatctggaatggaaggtgatgaactgaaaggtggtcttctgaaaagtgttgaagagaggaaagaagattacgacagggctcgagcacgcatatttaacggtcttgtgaacattgattgtaacgattcttcatctgaaactaatccttggagggtgaattgtagttctagcagagatgaaaatcaagtgttgaagaatggtaatatcgaagcagacaagaacaatatctctaggaagagcaatcctgcatctcgtattgcaattctcagagacagagagaaagatcgatatgaccctgactatgaccgcagcaattacaggtatgtaaagcattgctaaaccattataattgtttgtggataaaaatgaatagttgaaacttgttctgtatctttaaaaaccttttggctttcaggtacattagtaacctcccagtcgatcaaaatttatgcgtggcacacttcaacattcagacaatggggacaccaatctatgatatgggatttagagggtatagtccaactgctcctccatctcttaacttgggtcaacattctgtcatgagcccctgcgtcaccacaggtttaaaccagccttcaagagatgctgctatgtacatgcaatggccaaatgcagcagctgtgatgtatactcattcatatgaccacttcagaaactccccttttcaggtaaacaaattttttccctttttcctctcttttctttagcctttttgttaattgtgtaaatgttggttgtcgaccttcctagatcacaatgtcacacttaagagtgaatgtggattttatatcacatctgaattagtgaatatcaagttttaaaagtgattgttgtctctgcaggcgcagttctatccgcagccccttagtttcgattacatgcagaaccggtaattacttttctcatcatggctaaggatttgtgtaatccagattttgagacagtttgatgtcaaaaatagacaaacttaaccttttgattagtgtcattgccttgtctttttgtttactactatttatgcttcagctttgacgtgacttcaaattaggcgcaacaaatgataatcaaacttgtccagggaaactaatgaatagacgaaagaaataaaaacaagctactgtgttgtagtgaattcaaatgataacatcatacaaaggttaaattgttcgcgtaacaaataatatacactaacaatagattattgatcctgacgacaaatgcaaattacagagataatccacataccttaaacattattacttccataaaaatgaagttaagaattcaaatatttcattaatttccggcagggaagagcttaagcatcttcatactaccatgaccatattccgaatcttcatacctcagattacgaaccacttggttttgctgcgtaatcacatgtttccccatatacgaatgctctaatggcggcatcaagtaatccgggctcaagaaatgagctggaaccggtgagctagcaaatagccgatcagtagccgaatcagagacgatgacgtgtcctccagtgattccgttaccgttcccgccttgcattctcctaaggtaaagacgatatttctgaagatgactcgcaacgttctctctagtcaatccttcaacgctcataagctgcattatagtctttggaactgcgtttttgatccctaagtgtccaaccgcatccacgaaacgtttgtgtagctgaggcgtccacactagacgcggccgtttcaacgttcttgctggctctcctcctattgatcctgaaccaagatccgtggaatcgccaccgccgaaatcagaattcatcatcatcggtggaggagttggagttggagttgttggagtggtggaggattgaagcttctggtgataaatcgcggtggttctctttgatccgagatgatgattaggacttccgatttggaaagcgagagctagatgaggagtgattaaggtttgagagatagggatgagttcttctggagatggaagctcttcttcccatctaaggaaccaatttggattatcttctctcattctagctgcggtgatagtgacggcggctgcggaggaagacggaggagagaggttcgaggtggatcttttggtaaggaaaagaacgaaggaagtagttattatttgtgaatattggctagattttatatatggaggaaagagagtgattggctgattccatttctctcgaataatgtgttcatggggttatggaacacggaataaattgttgagtctttattaaaaatacaaagaggataattgagaaatcataactcaaaagtagtaagaaaatagtaataatgtgagcatatgaactgtcattgtcattcacggttcggttcatggcatccaaattgccagtttttgttttccatgcgaattgtttgcctctagtttttttaatttatttgtagtgactaaattgcaataattcttaggtagaaaacaataatcgatagtgtgtgagtatcaattttgatcaataaattagtaacataagaattgatcgcataagaatgcgccaatagttgagccgacatcatttgaataaaaagtatatgattagattacaccgaaggcagagaaccttatgagttatgacagaaagaagaaatctcaatcttacattaaaataataatcattgtgtcctcattaagacgaaaaccataaatcccgaatatttctctaagtttaaagagagatgattattaattaaggatatctcaagctgaaagtgtgataagaaagaaaaaggaagacgacaaaaacagttaaagttgataattgaaggggattggttttactttttgtttgtttggatctgtcattgtcttatgtgtttcggagttatggtccgaaccatcagaaagattcttggttttccacgtggcgcgtggtttttcacgcgttcattttgcgggtggagtaattggaaacagcaccctgtcgtacaattggtctgaagtacgcatgagattccacgcgcagacatggattaggttaggcaactttttaaatgattttaaattaacttcatttagtgggttagttgtccgtaaaccatgcgtgttagtacttttttccatttttctttttttcttactagtatgaactataataatttttattttattttttgtaatatccatattgttacttattttagatatcacaagcttcaaaataaattaaacacattttgttttaggtattttgtagtattggtttttcataaattgtgcaaaataacttacagtaaaatttcgagatgcatgaaaatttaattgtataaatgaactatcatatacagatattataatacaaaggtatgggcagagagtgggacttgtgctgccataacatataaatcagagacctttttaggtatgaactatgtacaagtagtagagtgttgtgaaatgattaatattccaaatttaggttcggcgtgtgatgtgaataaggaagctaaatctgatagctaaaatgtcaaattgatttctttaactacaatgatccattcgcaataaaaaaggtcaaattgtctttgtttaattaaaatgatttttgttaaagaaactatccgttctatgtgaaaaacaacgttccaattttatctaggaactcgcacaccatatttgattagaatttctcaaaacattatttttatttttacttaaatcaatttctcaaaaactttatatatgccaaatgaatagagcataaagttttatttttattggttttagtgttatggatagagcatattttatacattatttttgagtgaaagtaaatctagaacccaaaatcctaaatggtcgaatggtcggctgatcatcggagagtcacttttcaataagcgaactagcaacttgtcgacttggtaaattgacctaatttttcttttaaaacaacttggttttctaacctaaatatttttccattcataacattaaaattttagaaagaaggccaaatttaaatagactaaaattgtctagtggccaacccctcagcaccatctcgtatactttagaaaataagaaaattgagataaggaatcttcttccgaagtcacgaagacaataagtgaaagcagacaagaactgtccccctgatttcttttgcaccaaattattatggatttgtataagggaacctcacttaaggccagttaagcacaaaagaaggtttttatgcactatcctttttgaactaataatgttagctttttaaaacaacaacttgaaaacttttttaattcttgaaaatacattgcgaaaagcagaatgatttttaaagcggggaatcttttttttctttttaattgtgggaaagattaagataattcatgaaccatgtgatggccatgttttattacaactgcatgggctcggggctttcttttttctttatttgttaagggtccaatttcgagagtagtgtaaatccatgtttatgtcctcgatcagtgacaataaaatgtgtgtagtttcacagacatataaatagtcagagaattcattgtttctgttttgttttgtagtatatattgtatggaaaaagggtgaattgtgtagtctagtctcattaatatagtaagtatagactgtatagttgtttttaattcattgttgttgtttctaagaaagtagaaacatattattgcattaatcaataacaataattatatcaacaaaacaaaaatagtcaattgtatcattgtatgatacatatatgtatatagagtattacgaatatggaatttcttgtaaagccagatgaaagaacatccatgaagaattctcttccatatgtttacaaacaaacctttaaatgccatcacatcatctctttgacccaataaatatgaccttaaagatcttcggttaggaaaaaaaaatatcagttcgagttggagatcttgatcagctgaatcctgatgtgggacaagacaagtaaaggagaagctgcacaattaattccataaatttggagcataagtgggccgtcattgggtaagatctgggcccataatctctgaaaattgtctaaagtatttaactaggatctcaaatgatttgatgattctcaatcattttataatgttgtttatattttggtgttaatgttttcctttacaaatgaaatgaaatgttaaaacaatgagaaaacatgattgggatttattcataaaatgtttcagattctgcaaacgacgattcaatgcctaatttcatattacaataaagttggagaatgaatgaatgaatatacagtaagaacgaactaagaagaccgcagtctttcatcggcccctactaattttattattggttttttaataattgttattgttagtgtttcgtacttttgacctgtcttgtaattaaaatatatttatttattccccaaacaaactacccaaataatttatttatataaaaaaaggtaagaacacaggtcagcgagttggactcatcaagcttagggagagaagaatcgtagaagaaaactcgaagacgaagcaattggtaaagactatcagcagaagaagcttgcggattggggttttcattttctgtaatggaaggtttgttgctctttgttcatatctcttcccagatttcctttttccccgtctgagaaaaccctagatttggcttcttcagaattggattcctcactaatctattaatacacacttgtgtttcttcttactgtcagcattattgtctctaccctaaatctgatttcgttggtcaatctcatacttttaagagacacccgaattaaggggagatttgaatgttgagattgccactaacttcagtttgaaatcttgcttgttcatgctcattgcctgatttagatctgatgagactaaagtagtcttctttagaaccattatagtaacaattatgcaaagaagattaaagttttttttgttcttacaggtaaatctccagacctggaatcgatagggtctggtacaacaacaaagaggtcaagtgtttcatcaggaagtcgatctcgtactcgtagagatttccttagcagattcactgactctgcacatttcactgaaaagcttgaagattggtttgcttcaacattagaaaactcggcgagcgaaggaccggtctttgatgttccttttgagttggttgagcttcaaaagtttgattatgcattagaagggatttctttccagcagcttactcggatgccaagtcctgtttacgcttcttcgtctaatgctctggaggctaaggcttatctagctattgaggattttctacacgccactgttaagagcttgtgggaggcgttttggagtcaggaagagcctgttcctttctctgttggttgtttatacaatcagaatcttaagttttatcaggctgagagagctttagctcttgggaagcttgaaggtctttccgccacaggtattttgcttaaaaatcctcggcatcctcacgggaaatgggatcacattcttgaacttgctcttctaaggtctgacattggaagctt

SEQ ID NO: 359 - DNA, 91539 bp, Arabidopsis thaliana
aagcttgactgacacttttgccttggggttgacctgattataattttttgttaagagggagcccagattctaaagttggcaatatatttacagccaaagtaaaatacctgatggagatcaaagatcaactgtgccagatcctctatggaataaatatcatgatgtggaggtggagaaataagcggaactcctggtttagaatttctaagtctagcaatatatgcgctgacttttttcccaggaagttggccaccttcacctggcttcgccccttgagcaactttaatttccaactggtccgcattaaccaaaaacgtcggagtgacaccaaaacgccctgaggcaacctatgataatataaaaggtcattttgaaaactggaaatcattagaaaagtacaaattgataatgtctatgaagacaacaaaagaattcccaataacttccttagagtaagcaagactgtacacatgaaaatatgaaatgtccacaagtcaagttgacttccagtacctgcttaatagcacttgtagccgtatccccatttcgaagacctttaagatgtggcagagttgaagaatacccatcaacaacatctgttagcggcttccagcggatcggatcctagcaagatagacggtgaatctttagctaggtaaatgcgttttgaagttgaacaagatctgaactagacaatgaacaactacctcgcctccttcccctgagttggattttcctcctaatctgttcattgcaatagcaattgtctcatgagtttctcttgagattgctccaagagacattccacctgtacaaaaccgttccacgatagaggaagcaggctcaaccttcccaacagggatagggttacggtcacttttgaactcaagaagatcgcggaaaacctacaacaagaatatacaaagaatcatattcacttgttccagaaaacagacaatcagatttgaagatgagattatagcactcaccgtaataggacggttggctaaatgctgctgatagactgcataggctgtctcactcttttcgcggacggctttatgaagtaatttagacatttctgggttgtttccatgatattcacctttcatataacaaaatatactaaattagagataatactggaaagctttatagggataatgaatggtagcaatttaatccactaaaaggacagtaaaatagtgtagaggaaatgtgtctgtgcatatgcaacatttatgtaagaaaataaacacttcaaaagctctacttaactagacatagttgtacgtatgatacacgttttttttgtaggcaggagagtatgtatttgtgcatagacatgcaaggtcattaccaaatgcatttccagtccagaaaagtacctccaggcctaaactgaatgaaaccgaagttctctagccgtttggctgtatcctcagaaaatgccctcacccagaaagttaacgtctccctagccagctgcaaaatatagcacttacgagttagaggcccatagcatcgttttgtaatataaactattttgcattcgaagaacatataatatgagaagcattcaacagtagacgagaactcagacttttatcagaacctttgacatgcaggtattcacaaacaatttagggagaaaagtacagttactgccttaatttttttttcactgatttaaactaaagcaattccaagaagataaaaagaaaaacaattccaaacatataaacctataacagaagccaaaaagtacacacatttttgagaatgtgtgcatatattatatgctgctttaaggttataacatatatagatgaaactagcatctaaactgacgtccagaaccttaatatcaaagaggtatttagttaatagctgaaaaattgctccaataacatatttgtactcaaacaaggcaactagtcgagtatcttagtatgaaaaactttgggggatattcttacctcatctaaagttaatccaccaatttgagatgcactaccacggaacgaaaattccacaacctcatttcccaatccataaatttcaaatatttgtgctccacaataactgaaaagagagagctcaggtgttaaatcggaagtaaacagatacagtgataaggtcgaaaaacgaaatagatagttcagaaactgaacctagagaataacgagatgcccatcttagagagaaccttaagaagaccagtgttaacagcctgcggaagcaattcaaagaatcttaggatgtctttcttccaatacggataaagacagtagcagtgttacaatagggaaatattacaatctgtttagcaaacactataggcatgcaagaaagagatcgaacggcttatcaacactcaaaaaattcttgtcaacgttagaaccattaatatgtcctgaccttgcggtaattcttctgagcctgttccatagttacagtaggcatttttccgtttctcatcatgttcacggtcttgttgctcagacgccactgtctacacgtctccagtgctaggtgcgggcatatagcactgaaattggttatggacatagatccgtatcattttctatagatgcaatgtataacagttgaggaaaacagtctcatatcattacctaaatttaaaattaagaatgtaggtgtattataaactacataaaataaacatgagtctattatagagagtgctattatttggcatgaagaaccgcaagagacaataaacaacatacaaattccacatgacttgctttggtacgataagaaacagcctaacaaaatgaaagattcaatgaaaaaagtcgataccttgctccatatccaatcaaacaggcaaagtgatgtgtactaaagcactgagctgtatctgcaattatcgaagctgacatccgaagaccgttctggatcagatgttggtgaacagcacccacagccaacaacattggaattgcaggtcgagttggttcctgaaaaagggataggctgctgaatcaggaatagacagtgaagttacaaagtatgtaaagatagatagaaaagaaaatatcatccaagtgagacacaaaaacacaagcaaaatgagcttcaatttaagggaaaatttacaataactcaaggaaactggaaagtagcagcgcatacaaagacttacagcgagaatacataatagtgcaccattgtaacgatgccaacaatagcactttattataaagaaaccaactatgccaccagttcactaaaaagaaaccaacaatttatggcaattatattttcacattttaactttcttttcctcaacagttccaatctttgcatgagaaaagacaataatgttgttagtccagaatgagagcctagagcatagttgttagtagaccaaaacgtagatgtaaaaggaggacactgtaaaaggtgataatcatacatctacatattatatagttaaaatcacaattgaaagcatacacttggaaactggtatgtaccggattatcagatctgtctgagagaacaagtacttgggaaccattacgaacagcttcatctgcagcttcacaaagttttagaagacccttcttcaaagatccttcaattcctctacgaatgtcaaaaaatgtgggcaagatttgagattttaacagtggatcaccaagcaaaccctcaagctcccgttcatttagcacaggaccagacaaaacaacctgcttatgaaatcacaagtcttgataaatacaaaatcttgcaaaagccaaataattctaagccagtacaaaatttaggcactccgacctgtgaaacattctgaggcccaacctccaatatatttccacgctttccaatattaacttcaagggacatgactaatccttcccggagagggtcaatagctggatttgtaacctgtaagtacaccatgtgaagaaccacaaggggaatcatttcaaggacagttcattaatttctataaatcatgtaatcagttaacctagatcaaaggaaacaaccagttcaaatcgtgcccttctaatgaggtgaacaaacctgagcaaaccgctgcttgaaataatcataaagcatatgtggcttttgagacaatactgccactggagtatcatcccccatgcaaaacgttggttcttttccttgtgcagccatcgactcaattaccatttgaacatcttcactcgagtagccaaacgccctagtccatcaaagtaagatacatcatagccaaaattagtgtcttgatcgggaaaaagcaatcatcgtcaaaaatgcaaaccattgaattctactggtgaaaaccattgataaactttgtagtttgaaataatcaacttatttaccctcacaccagatgtatgtcaagtatacaagaagataataacagttaagaaaagttaagtgttttcataaatcaccatatgatttgcatgtagcagatgatggaagcatagaacaagagaaacaaaaaggcttactgttggcgtcttaaggtctcatcagtctccaggatcgctgacgagagataattagaaggcttcaggtttcgcaggttttcactaacccactttccatatgggttatatgatgcaacccgcttcttcacttctgtgttctcatatacctgaaaatatacatattactaatgggatgcaacataaacaaaaattatttgtcagtgttaacaaataaagagaataatcgaccatgatctggtgcaccaacctgtccattctctaagtcaacagatatcatcataccaggtcctagacgacccttcatggtgactttcgattcatccattggaagaactccgacctgtataaaggcatgacttaacaattcttctgagccacgatataaacaagattggtaacagatccccttctatccaaaccaattctctcgctttacaaagtattaactcggtttccatatgtcacacaaaacgatcaccatgaaactatcttatacttggtcattttctcccaaaaatcagttcgtataactttgtcacactaaatcaaaaaagaaaaacgaaaaaacctccaaagtgattaaacgaattggtttttctaacctgtcaggaccaagccttaagattcaagcataagccaaatcatctgctggcaacaattaccaccatgcttagatgataaagagcacatacataggggtaaaagacaaaacgcacctcagaggctacatagacaacattatcacttgtccgccaatatctagctggtcgaagtccattgcggtcaaggcaagctccaacagtctttccatcactgcaccaaacaaaaggtgacgatgttttggaatgtgcgagcagacgaaagatatgcaacagacttgctagcaaaactagctatcactttgagcgacaaattatcaacagggtcatttgctctctcgtcgtccacaactatggataccaccaaaaaaagagcaggaaagctctgagtgatcaagacttacgagccttctagaacagttgtaaattctcattattcttagttaagtatttatggaggaataagggcaactgaaagcttaaaccttacgcacataattaaaattctcaagggtagaaaatctccaagcaaattacctgaacaataccaaagcaggtccatcccagggctccatctgccccttgtaatagtcatagaagtctacagcctacagttggaaagaagataagggaagcacttgcaagatgcaaacatccataaagactaaaaaggcaaacacaaagcaatacctcagggtatttaatcattaaagtcgggtgatttttatacgcctctgggacaagaatcataagagattcctctggagtccggccacttcttatcaatagctgcacacaccacaataacataaaacacattgaattcttgcagaaaaaaaaagaagactataacttagggtcttgaggttattctgaagagtgtataaatgtatgtacttgcaagatgtattgcttttttcatgaaatgctcgttacatgtctgagaagtttatttttctggtcaacagaaagacaagtattatgtatgcagaataggactattgcttagttccaaacgcaagaaacacttatgtgcctcttcaattttcctccaaaaggaaataccacaaagagcatcagaacagaaaaaatacaagttaggaggttagatgactcgtacctccgccgcactgtcaaggttagcagagtctgaagcctttggattgctaattggacgaatgtcattttcacgtccatgccagacaggtgatcttagagatgcttctcgagacgtcatccagtttaggttcccctgcaacacttttccggtttcagtgaaaaggacctagcttagtctaagtttcaacaaaccaaatgaccagaagagaagcataacctgtatggtattgatctccccattgtgcccaagaaacctcatgggctgagcaagatgccatctgggactagtatttgtgctaaatcttcgatgatagatggcgaaaggagatttataaagatcattttgaaggtcggggtaaaataacccaagaacttcagaacgaagcattcccttgtaaacaatggtctgattggacaaggagctaaagtagagctcagaggcccaactttcagaagcaactgctctttcgatcagcttcctgcaaatgtaaagttctcgttcaacgtcgtctactttatcgtctttgacaattctaacaaagacctgttccgtgtttggcatcgtctgttttgcattatggccaacaatggacgcttccacaggaacatctctccatccaagcacctccaggccctctttctcaaaaatacttgtaatcactgaagagaagtttcaaacattgacttagcaaggaaaatattacatgttatatacatcggaaaaattatagcttggagtggtatgcatacaactattctatgttcacctttcttggcttctttcctaatgttgtcatctctcggtaggaacagcattccaacacccgtatgcgtcctatcaaaagaagcgattccttgcttctcagcccattcgttaaatagatcccaaggaatggaagtcatcaaaccagaaccatcaccagaagtattatcagaaccacaacctcccctgtgttccatacaaccaagtgctataagagcatcatttacaatcttatgtgtagccttattctccaagtttgcaataaacccaacaccacatgctcccctttccgatattatatcttccaaataagccacctgcgacgatgcaaaacaaaattaaaaccccgcaaaataaaaacaaacgtccataactaaacctcttgcaaatgaaaatttttaagtatacccaatatatacacaccagaactaaaagtgcaaaagtcaaaacctagatcaacagcagataaagatgcaagcttttatctgattgcagagaaccacgattacctgaggtttcagatcagaaaaggaagacgatgcatcaccagcggctcggtcagaattaaggatcgctttcaccgaaaacggagacctcagcgaggacttgagcagtggactgtagccgcgaaagccggagagttcgttacgccgtttggttcctttagaaatacagtaggatctgacgaagtcaacagagaagatagtcttagtagagcttaatttcgcggaagagagaagccgggaaacggaagatgaagctccggtagctccgggagactgtagagccatggaatgaagctcctgagaagaaacgccgagagagaaagcgatcgatcggatttcgaagtttaatctctctgcgactgttgtagttttattttcaaaaagtcaaaatggaagcagagatttatccactgcggtgaagtgtacggtgcaccggaatcgtagagaaaacccaaccggtgatgttttctcagtctcagatcacggcacgagctaagagtgatcagtgagcacgactacgcaggactctctaatcgccgtcgcttatttggttgttgttgtaaagttgatgaaagtgctagttttattagctttcttttgtcttcaaacgcgatcgcgattttctaagatttagcggtgcgtttggtgacgcatgtctttatttacagattgtactttagaacaattgaatgaatatagactacaaatctaatgttgaataagtagttaatatgtaaataaatggcaagtgcttggctcaatttcaagaatacgtaatcaatttaaaataattaaatagcgtttgaagagtcgcaaatttaattttgtaaggggacaaatggcagaagagaacaaagagattctctatacgtttaccacataaagcgacaacaacagcgagtgttaaccttagaacaattattggaatcttttactcttatttctttattgaagaaaacaaaagatatcatcatcacctacgtaactaacattgcccaaagttgtctatcttttataaagttttgcttcatgtctttattcagtatctaattacctgaccaagaaactttccaccttttagagaaataaaaactctagtttctttcaagaatctcttttgtttttgaacgaatctttttgttggtgcatcaaatattctttgttcccaatttagaatatacaatcacatttgtaaattctataaactttaaaccacttcaattttttatgtagttgtcgatgaagtatttttagtggaaaagtatctgtaaaagaaattatgcaacttgttttcttttatgttaactacgtcacattgacaacactatactgcaaatgtatagttaaaatataaaatgaatcaaccaccacgataattaaaatcatttcatttacaagaatttccagacaagaaaatcttaatcatattatgaaaggttacataaaaagtatacaagaaaaaagaatattcattgctatggcttttagctgattacaaagcttgatacaaaatctataaattgaaacaaacgaacaaacgaaatgggattcgtcgaacttcatatttgcaaggtagcctatttgcagagctcttacttgggaatcaagaaatctaaaaacgccagagacaacttgagaccatctcaattgtcatctgtgaagaccttgaagataaagtcacggaaacgcctagagtattgtctcggatcaaccgcagatatagaggaaggatcatactgtatgctcttgtaagcgtgttcaagcttcttgctgatatcataatcctgaagaatgtcaattataccaaatatcatcaccacttcgtagaactctcctgtaggctctcccacaagctgcagctcgctgtcgttttttctcatcgttctctctgcacgtgctggcatgtttgtccccaatctaatacttgcccacctgcaagaacacaaccatattcaaaatccatgtttctgtgtttcggttttgagttttgaaagtgttgttaattgatatcttatgttgtgttaccttgagggatctgaaagaagctcatcaacctctgctctagaaagacgagggcctgattcttcttctgattcacctgtagataaacaaacaattactttgtttctgtgaatgatacatttttgctgatgggaaaagtagtttttagattggacaaaagcgaaccaatgggcgttcgagctccagaaggaatcagctctccagcgacagaagcttctctgaagtgaatcccaactagaagactgtaatccatgattctctcctgttctagaaactcgcagtctttatcgatttgcctgtgatgtaaacaatgaaccatgagaaatgaaacaagcacaaacaaactatggatagagtaaagtataatggtttttacctgatgaattcttggtaccatgctttctgcaatctgaaaatgaaattcaggtcgaggtcttttaagatcgtgtttgaatcgatttctgattcaggtttgtcagttgtacggccaagagaagatccttttagatcaaagcgtctgtgaacagagtacttagaacaaaacagattacccataatgacgaatcggacctgcattatatgcaaaccaagagagttaccaaactaaaccaaacgtttcaaaaccatgccacataaagtgttaattttttgtatctaccttcttttgggttggtccattcaatttcacacagtgtagaccaaagaatctgattaccaaagagttctcaaatgctcgaacatggttataatatgctgcaagcatccccagaagcacctacattaagaagacaaaaaagacgctcagtaattgcaatctgaaaagttttggtaatagccagccaacactctctaaccggtaacttgaaaagaactcacttttgtttccgacttcttcattgtttttatcatgtaacgatcatcgtttgttaaataaaaaaaactcccactttttccaggggatgatagttctcgaagggcatcattcccacagatcgataacatgtaatcagctgggtctactttgaatagcttcctcaagctcctggaaaattaaaccataagcaaaacatgtcaataagtaagacaggatttgtagcaatgtgaaataggtaaaggaatttttttgtctaacctgaaaactagtgggcaataatctttccatttgaattcagtagattgatgtggaggtgtgtacttggttccttcgcgcggaaacctcctccatatcttatcttttggatcgaaagctgaaggcttcagatcaagagatgccgctggagcttgtcttccgacagaatgcctgcggaaataaaatcactaaacatgacaccaaaaacacaagcattgctcgatatgcgcatatatataccaacaaatttcaaattttacctgattcctaactgtagattaagcataagctcgtaattgcgatggcctttggatatcgtctccccttgcttcctccctgcctttggcagtttcataggaacagggctcgatttcaggctctgaagaccttcagcgtccaatctcatcaactctgcatccaactccttcctcatatcagcacctccttcaccgatttcgttcccccacatattcatcttctcaaacgctctatcaacgcccacacttactctcccatcaactgacgtcctcctaggtttctctatccgcttggaagagttccaaacagatagtttcttctgtgaaggcaatgtaggaaccctctcgccgctgcagatcgtgtactcacttagattattaaacaaatctttaggatcccattcaagattcccttcatttcctgacggataatatgtaccattcatttcctctggatccttagaccaatggccaacatagaaactcccattatcccatttgaaggtcccattccctctggggaacccttcatcccaaaacccgtcgtatctatttccatttgtccaaacaaaactccctttgccacagatcgtaccattcttccattcgccgatgtaataactcccatcgctccattggtactttccttgaccttcttgcaaacctctcctccattcaccatcataggcatctccatttgcaaaactcttgacgccatgtccatgcttcaggttcatcacccactgacctttataagcatctccactcggacccgtgtatgtcccaataccatccatgtaaccacttttaaactctccttcgtatgtggcaccagatggccacccaaactttccattccccatggttttcccattgtaccagtcaccgatgtacatgcagccgtctgtccagaggtatttcccatggccatgaggaaaactatcataccattgccccgtgtagtagtccccattgggaagcactctctcggcatggtagaattcctctaagctgctcctgttagtggtggtctcatcgtcattatcatcagttgtagtatcattatctgtatgtggagctaccgatactgttccaaaaacgctattagcccgcttcttcgcttgctgagtctttcgcacggtcacctcccatgcttttagaacatagctttggtccttgctcattatgttaaactaaggaaacgtctatctaaaaacctgtatattattagtacctagataacaatcctaaaggtatcatcaacaaacatatgtgtcacaggtcatttttcttttgcctctgtgaatctcggaggcaaagagcttacttttttcttacaaattgcagcattactggattgaatgtttctctagaccatgttccaaaccaaacaaagaaaaacagagaaaaatctaatggccaaaaaaatagttaaaagggaaaaaatgtctccgagatttcatcttttcttatcagttttagaaactaattttgtcattcaaagaaaggactcgttcatatcctcaaaccaatgaaagccttgaaatttagagaaacaagcaagaccctcgaattctctatatttagcatctccttgcttccctctagcacaaagacatttatttcatattttaaaatatggaccaatttagacgaataagttcgttagttaaaatcactgaaaaaaacagagttaaactcgttgaggcattctgtcgaacaacataagttcatttttttttccttttcatcaatctagtaaatgaactcaaagagtgaaactttaagcttctccgtgtatcaaacacatataatcaaatcaccaatacaaatttagcaaacaaagcaaagctcgaaaggatcaaacaattagtagagacttcatatcttattgagcttggcgaggaggaagacggtggcggaagtgatggcggggataaacaagtcgttgggaacggacgtcggagctatacggttcttaatgaagacggcgatcgcaggaactccgaagatgaaaagtagaaattcctttactcctccgacgccggtgaacccaactccgattaaaacctcttgaagaagcttctgaaactcgtccttcgatagcttcttcccctgcccgagattgtgtatctgctcgtttcaaaagtataagagacgaagaagatgataaatctttgatcccagtaattaaaccaattggttaaaacattgtgattcaattgtaaaatcttattttggtttatagtaaaccaagtctaagcctctctatgtaacagagacttagatttgggcaaaagcgttgaagttattttttaatgtttatcgttgcataacaatacttatcatattcgctaatcgctaggtataaattatgttttgctcaagtatatatttcatttttaatattcttttcgtgttattaaatttagaaaaggttaagagaccaaatgtttacaaattccttacctaattttatcaaatcaaaagaagtgtcattaaacttatataatgaagaatagaaattgaaagaatttaatacctcataagcttgttgtagtttctcaacacttggcaccttaagttgagtgccaccgagtcttctgttaatttccctgtcgcaccaaatacataaaatacgaatatcacatcacatgtaaatatcattaccataatcataatatcatggtgccgactatatggctcgagtctttatcgtttatttttatttcttaaatcattgacttataaaccgcccatgagcattaaataatttgtctcaaaaactcgaaagaaaatcgttattgaaaatggtttaataaccaaatctaatcctttccgactcatattggtttcattataacacttaacaagtaaaagaattttactcgactgcttcagccacaatgcggtagaagtcgccaaaggaccattcttgatcgtcatttttttcttctaagcgtttgcggtagcaattttcagccatagcttccaagtctttcgcgtctacctctcctttaccttttgcttcgttccataattaagtataccaaacaaaaaaatgataattttattaatgaagtgaacatcaatgaaagacgtgattttgggggagaaagagaaaggacgaaccggtattgagagcttgacccatattgtgataacttccttcttcttgtttttttgcatatcgtaacaaatttgaaggataatattgagaaataaattttggagaccgtgacttgtgacttgtgaggtgggatcagtatcttggcatttcctgatcgataagccacgtaccggaagcgtgacagtttaacttaaggatctagagaaaaagtgtgagtctattcatttcatattttacatatagcatataaatactattttattttcctttgtttacagtttaatagttttagactcacaatatgacttttgaaagccaaaatgtagcagaacaattaagtttttttaatattccttttgaaatgcaaatatgtttttaacctatataactggcaacattaaaaggaagagattctcatgatttgcaaaatatcaaggtggaaaaggcatgtaaatctttatttaatatatatctttgtttaaaaccacattggagataattgaccaaaaaaaatacaattttgtcaaaaagcttaaattattggattgttaatgagcatatggaagtttgacacttggagaaaattcacatgtcaccacatagagataatgtatttctatgttcactaacacgattacatttacaccccattccctcgtcgaccttgagtcactcccatctccttctttggactcttgcgagacacttagatttagaacaacaaatgagtttaagtaagtactaagcctatgaaaaaaaaaaaaggtagaataagcttaagaatccagcaacattcatggtatcattcgccatttatatcttaaacgtgaaagaaataaagagagaaaggttatgaattccttttgtcaatagatatcattggaactaagcgttatgaattctttttgtcaataggctaaaaaccgttttatatattttacaagaaacatgatttttccataatattgaaactttatatatttcttaatattctaggcatttataaattattctatgttttgaatatttattttaaatttttggagaatactagaacatataactttccaagtcctagtgatcccggctacggcaacacatccctacgagggatcaatatatcgaaccatctcaacgcaacacttgtcgtcgatcaaaagtctaaaaacattgcttctcaactttgatctctttcctctagtctctatcatcaccgccacgtcactattttcccgccttataactaggggcaatcaactctcgcgaacagagagagacggagaacaagagcaatcaaatcacacaaatcctcgaaaaagtaaaattcttgattaaaaaaaaacggacattttgtgctcagacactcagctttccttattagtcttttgccacctctctgcaaagttctcgaacccactctgtaaccaaaatcaatcataaagatttgatctttttttttcctttttcggtgagatttaatcctctaaggttcttgatactctctagatctattcttacttgggtttgttcgaaatatggaggacaagaacaatgataaggagaaaaaaaccgacgttacgttcgaagatgacgaagataacgaagatctagaagacaacagcagtaagtacgagaacgacagtgaaactgatcaaagcgatctcggagatcttcctggtgatgctgttgatcgtgacgacgacatcgatgaacctttcatttcccaggttcaatggcctcaaagcttcaggtaattaattgtaaagctcgaaactttccttgtaacccatctcataaagttttgttatttgagattttgtgatgaaacattgacaagttttgtggttcttttagggaaacgactgattcttatacgattgcggcatcaccaatcttcgggtcgctcaggagtaatcctccgagtttctatagagccagcagaagtaatttagatgttgagtcaaaagcacctttgcttcctgagaggcatgatgattcagacaaagcctcagctacacaatctgcttggtctcataaaggctcatttgctgaggaattgcccattggtggctatggatgcagcgtcattcaaaccattttcaatggtaactaaaaactgattatgattcttggcctaattaagaaaacatgtgtaactctatattggttgcagctattaatgtaatggctggagttggacttctctcaacaccttatacagtgaaagaagctggttgggcaagtatggtaattcttctcttatttgctgttatttgttgttacactgctactttaatgaaagactgtttcgagaacaagaccggcattatcacttatcctgatattggagaagcagcttttggcaaatatggtcgtattcttatctgtgtaagtggttccatagattttatcttccttttgattattttgatcagttgttctgttttcagttgcttatggtttctgcaatgttatgtgtcttttgtgcagatgctattgtacacagaactatatgtaagtgaagattttttgtagccgaattttactcatggatctagagcttgtttctgtctctataatttaaacttactagattcgctgtccactttctgtagtcatattgtgttgaattcatcattttggaaggagataaccttaccgggcttttccctggtacatccttggatttgctcgggttccgacttgactctaagcatttatttggaatcttaactgctctcattgttcttccaactgtttggttgaaagatctacgcatcatttcctacctctcaggtacaatcaactgcatttttgttttcttcatatgattgaattctttcgtcaagaatattgaatcagttcacttgtttttctttggttctatagccggtggagttatcgcaaccgctttgatagcagtaagcgtgtttttcctcggtacaacgggcgggattgggtttcatcacaccgggcaggctgtgaaatggaacgggataccgtttgcaattggtatatacgggttttgctattcaggacattcagtgttcccaaatatataccaatccatggctgataaaaccaaattcaacaaagcagtgatcacttggtaaaaccaaaaactttactcttatattagcttttgatgtttaataatccaattctgaaaccaacaatttttgttttgttgctacattgcagtttcattatatgtgttttgttatacggaggagttgcaatcatgggttatctcatgtttggagaagctaccttgtctcagattacactaaacatgccacaggaccaatttttctcaaaagtggcacagtggacaacggttagaaaacaaaaccagtttttatttttctctccataatctttggaagttccattttacactaaaacttcatcttggttctgttttctccttttctcaggttgtgagtccgtttacaaaatacgctctcctgatgaatccacttgcaaggagtatagaagaactattaccggaaagaatgtcagagaacatatggtgctttcttcttctaagaacagcactcgtcgcttcttctgtttgttctgctttccttattccattttttggtaagaacattaagctagaaaggttgagaactcactcgtgtgtcgttttactagatttgctccttaatggtctttttttgcaattggttttattttccacacaggtcttatgatggctcttataggatctcttctcagtatactagtggttagtttccatcatcctctttaatatcttaagaacattattgttttcaaaaaatgtgacactcaaaacagttttacataaatgtatgtatggttcaggcaataataatgccagctttatgcttcataaagataatggggaacaaagcaacaagaacacaggtatataaattgagccttgttgttgtcctgttatcaatttcttgaaattattatgggatgatgagtttctgtatttggattcttaagattaacactgagttgtgtactacagatgattctgagttcgatcattgtggccatcggggtggtaagcgggaccttggggacatattcttcggtggcaaagatcattaggaactatcagtgaaggaactccatgacaaagagacccatagtttatcccctgtactttgagttgaatgtttttgttgaagctaataaactcttgattatgaaagattattttggacttgaaagttaataaaactagtgaaaggtttactttctcataggtgtcacatttgcttttgtatttttgtgtatctactatctcttcatttttctgagcatctttctcatgtttagatttgggtataatgagctcgcctatttgataaaggcattaataataagtattaacaacacaaataaacaaggaggtgttaacctcaaaagatagatatgtaaaacaaaaaatttaaaatttggttctcatgatgttcaaaaatctgcttttttgagtgtcacaatttgattatcgggtcacaactatttaacacaggaggaaaatagacgactagttaacagtgaaatttactcaatttatcgaaaatataggcaaacccaacgggaaagaagttagaggaaaaaaaaacagtttttacaaggttaagattgacataattctgttgaacgatattgtattaattagtatcggccatttagtgacccaaatatctcccgtctcgtcatcaccgacttaacaaggtggaaggaaaattacgagacttgaggtttgtcggtcctgctaaagtgttttaatgctccctaaaaacattcttatatacaattgtttttttactttttttttcttaaccattgacaaaaatttacagcgaaacttaaggaagaaaaatcatattagttttctctatgtatatggaattggttggttcatatacctttattgactataaggtacattaagtcgataataaattagttttcttaaccagtaataatatgatagatggtgacaagtaaacatagagatcacaaacagaaagtaaacatatagaaaataaattatatattaatgtgtcagttcttgctgacaattgaaattgaaaggagtcggtctattggccgtgcgaaacaagcgtcaaaacattagtcatctttttagtcaaacaaacctcagaagataagattgttccaagcgaatgctaactcatgtgtttagaacaaaatatttttgaattgaaaatggctatctcataaatcgttcaggttttttttcttcttctctttacatcgaaccatagctcacaaatcacaattctagaggaatttaaaaattgtgaagcgttgaatatttctacaatttaagatatcacaatagtcaactatacgataaacatttcgtacgaaataagttgttgttttcattaaatgttgtttgtatcaaacgaatatttccataagatagtgtgtttgtagattgtaaatataaaataatgtgattaataaatgataagaaaataacaaaactcttctatcattcattccaaatttccaaaatataaatgtattattgcgtctattatacagagatggggtcatcctaaaaaacaaaagggatacatcatacatctatccaaatgttcaactaaagtccgtgataacttaaaagctctatatggattattatttcttttccgtttgtgatcatttacaccagagattaaactgatcacaaaatcactaccaccaaattgggattttgaggttaattattacataactacaccaataaacccaactaaaactaatacggtttgattattattataaaataaaaaaaccacaaacaaatgaaagatttctatatatactcacaaacgtaaataattcgcgagaaaaaaaactatatatgtaatatatccatatataggttttgatgaaaaccctaaaactatagatggtttattcttcgtgatcggtgtttcagtgccgaaacaaaacattcatagtttaaaattcagagagaaccaatgcttcctaaagcgttaacattgtaaaatccagacgagaaaaaaccagaaagacctgccgacatctgaggagcattaaacacttcctcatccaacggtgaataatactctccacggacctctccatccaacggctctaagttcatctccgactcacacggacggtggagatctacggcggtaaaagtggtgggcgacggtggtagatcagcggcgtcttgaccggtgagttcttgaacaagctctctgaacttagaaggacaagtctcgactctcatcggatttgatatgtaacggactttgatgggtttgtgcgtagtcgttgacttcctcttctgcttaggtgggatcctagtcggagacgatgatgactttctctggtttatgagcaacgttgatgatgactgatccatcttctttagttcttttgtaatatggagaaaaatttagatgtgtgagctctctcttgttttagtccaatttttaaatatatatacaatgaacacttttttttatgtatcgtttttacttttaggaaggagagtggaagttaatgagaaaggagaagaagttactgagaattaagggaagagagaagaaacaaacaaaaaaattaatggcattgaaaaaagtcctcatccgctgatagccgacggcgcgtttagcccacgcgcgtttaagttcatcgtgtctccatgacatcttttacttagatgacaagtgtgatttgttactctttttgattgaacattctgttggaccaaaaatatatatatacggtcggacacaatgtggagtttttagtattaacttttataaacaagactaaactgatgatagtcatatttttgttattatagtatatctacttgaataaccccttaaccagtatttaaataattgacaacatagagatatctataccatttgaacattcaatggttgtcgtcaaatcggataaataatgactgttttaattttttctgagtcccgggcgtgtgttgcacgcgctgaacaatcacgtgatggaaaatatgaggataagtaaaaaaaaaaagtggaagccgccgtcggctagttagccatcagggcatcaacaaaagcgccacgtcaagataggtgatgtagacatatagacgccatgacgtcacttgacccgacgatattgatctcaccaagtataaaagacaaaaatctcaaaataataaacaaatggaagaagaagaagaaaaaactaatttaactaaccttcgcgggaacaatcgaaggatccattacactgatcatagttaacccaaattttatcccaaaacaaagatatcaaccgaaacattctaaccattttatcaaaaatgaaaatataatacaagtgtaagttattatatattataatttatgtatggatagggatagtcattaaaaaaaaaaaaaaaaaatatatatatagagagagagagtcaagtcgatcgtttttcatggttaaagagtcaattccaattgttgagcacggaatatacagtgactagagtctagctatctcttctccaaattcaagtatggcaatacagataacagatctaacttgggtgcatgatttagtttagtcgatttttcaagaataaagggtattgagtgtatatgtggaagatttgaagttaatatttgtatttaaactcctaatactgctttttagttacattttttggcgaagtttttctttgccgactccaacaaaaaaggtgttatttggtaaaaaaaatgactagcatcatctaatactatttaagcataatgccaatgttgatctcgtaatgtaataactgagtagaaaactcaaaaaaaaaaactattatactaaaaggttttttttttaaagacaaaatactaaaagcttataattggaaaataattgacagaaatgaaggcaaaaggggtccatatggacaagtgggaagaggagggtagcacagcggtatgtgctgtatggtctgtcctaattaaagggtctcttaaaatcgatctaatttagcgagggccctctaaatgcccctttcaaaactcctaattttaatgtcactttatacatttttccattctattcataaagttgatgaggttaatcatcatatatataatatattacagtgggttctaaaagaataatatttgggaattttggtgttagttcactatcaaaagaaagttatcaaaagcttcgacaaaaattttttaagtacttttttaaaattgaacttaatcacatagatcttcaaagaagtcaagtcacgtgtacgtacacagatattcaaattctcatgacaaataagataattccaagtttacgacttagcttgactcgatatatgtcaacaaaagttgtaagaatctcgtatagtacgagagtcatcaattttcgggttttcccataaagaataaaaatacctccctttgtcttttattcattttataacaaagtttagtttctctaaggcacccatatgacatggtatgtaggagaaaatgattatacacactatttcatatcgcagacttgaaagaagaaaacttacatacgaatatacgatagatggattttttttttccattatgttatgaataacataacagatgtactcaatagtggcgaaagtcatatttttatatctagctacctagttcaattcttggtttgaaggaatttatttagatgtagagacataaacaatgtaagaaaatctaaacacaatttcacaaagcgaagtattcccttggttcaaaaataactatcacatcttaatatttatgagtctcaccaaatacaaaacgaatcatattttcaccataaccattatagaactcgaacctaaattttttgaaaattgtcggcgacactattaccaatctctagctgatgagttggggctgatgaacgactatgctgatggcgatgaattattaattttggcctaattataaaaattgcaataataccataaccgaagaaattggtgatccttttgaacactaacgacaaaagacaccaaaaaacaaacaaaatttattcgttgttgcattatccggggagcacgtaagtgggttgactttggaagtaaacggacccaaacgacttctcacttcttccaagacaatctatcaagtagatacgtatttatggagttattgtccatgaagatatccattacacatagaaagagaagttctctggaccaatttgttttttgttaaagtccattggaccaaatttcaaattccaaaagcaacacttacaagttacaactttcctcatcaacgattctcaaaatccgtattttaaaaggataaataagataagcccactggaccaaattccaaaagcaagccctcgtccaatgctttacgttgcccaaagattacgaaatccatgagaaaaaggcttttgtgaggaaaagcaaagaaagtttggttacatgataggtactagaatgagctcttaagtatgtaaatttacaaataatttgtaatctttatctatttctcttcgatcaatttgttcattgttggcattacacgctgattgatgatcgtgagtgataagcttagttcaacaaaacaaagctgatggtaaaaatctcaccctacaaaaatctcacttcctgaatgtgacttggggagatttttttttgttctcttccggaaaagcagaatcttcattaaaaacgggctcaacccaatgggctttagacccgacatagagagggtttcatcaacaatgccacatctgttaattagtaactgagtcaaatactaacaaacaagttctaaaaatattaaggcactgggggttttggaatttggtttgggaccgtgtgtgcctgggacaattcaccctaaggtggggctattatatctttggaaataaaaagacttcaattttgtttttagttcacatcttatcaactgcatgtcgtatagcccacttcactttagttgaactaccaaaaggagttgaccaagtcggtgttggtttcgtgagattttggctttaagactttcaagattattatgtggatacatcaataaaccaacttttgttctataatctttaaagtatttttgtacaaagtagttggaaagtttggttgaattaggctacggacaaaaagagagagtagttggggaggtaattacgatttcaatacattctttgcctcaagtgagatttgattttgttgatttgagtagttttaagattgaaatggatcaacctaaaaatcggtgcaacgagcgccagctgttacgcacgacataacctctataaggtcactttctctgtaactagaagcctctcatgggattgtcacttgaagtcttcttatgacccaaccaatgtcattagtggttttgcatctgtttccacctactcctaactgtatttattgctcacccaacttaatgttgcaccttctattaaatagcctcacaacgaatcttttaaaaccctaaacctcattattgttcacagttcgatgtctcttttagtgttttcttattaaaatgtttgtgtttataatgtcttcaacttcaagcttacttgcttaatacttgtaaatatatatatatatatacacagacacatacacaaagcgtgactacatgagacagctcctcttgaattgcgtgtgtaaatgactaaaaaggcaaaaacaaattttcttttcttgagccgtaaatcaatcaatctctctctctctctctctctctttagccactaatctcactctgttttctctccctcgtttcttgctttcaatggagaaacagtacctcactttcatttctttttgtttctccatcaccatttgtgggttcctcatagtttcttggctggcaagaagcataatccgtaatgggattagaacattaacatggagaaaggaaacgaagaggaagaaaaagaatcaagaagatgaaaacaaaatgtctctcctggatttgccggacttaaccttagactgcatattagagaagctctcaccatcagagctctgtgcaatgactagtgtttgctccgagctaagagataagtgtgtaagcgatcatctatgggagaagcatatggagacaaaatggggaagattgatgggtgatgcagcgattcaagagtggaaatctcacgttgctacgataatgagatgtctcacaagtagtagtagtagtagtagaaagagtaaaccaaactggagttcgaggtttgttgcgaatttgaaaccctttgcatggttaagttcaaaccatggttgtgaaaacagaggatcatcatcatatttggcacctatagattctgtgatgtattggtactcgaatcttgaaaatggcaagttttggttccctgctcaagtctacaatcgcgaggtaatcatgcttatgatcgaatcatgaacaaagatttcgtcttttttttgtgtgtggttttggtgttacccatttgactgaattggagaaaaattgcttcttttgatttctaaatttgcagaacggacatgttggattcatgatgtcttgttacgatgctaagatcagatacgatttcaagactgatacatttcaagctaggtaaagaaattcttcccggaaaatgtgatatttttctgaggatttttcattaaaatttgaattactctgttttttttcaagatactcggcacatggccggcgagcggcggaggaaaaggtgacgtggcagaggctgagaccgtctcaagacgacacaaagtcacgtgatctgcacgtgtcagattgtttgcacggacttcgacctggtgaccatttcgagatccaatggcgacgaaccaaagagttcccttatggtgcctcttctttctctctctcttttccaaatatattgttctaaattcgaattaaaattcgattacttgtgcgtttgattcgtctgattttggtgaatttctttaattttccggcgtaggttggtggttcggaatcgttggtcatctacaaaactgcgacggcgtacaaaattgtcgttgcgactctgacggtaacaatttaattagtgtttttattttttggtcagaaacagtcgattcgttaattaaggaaaataaaatgtttaatgggatattattggcaatggcagagaatgtggtgatggagttcagacaattcagaccggaatcaccgtggagaagaacggtgataaagaggaaagaccaccgtgagacgggaaatgaagaaaacggtttctacggcggagtaaagaaattgggtacggaggaagagatttctacgtggaagcaattgtggccatcacaagccttggagtagtgttgtaatgtttttggttttcatttaatactttgcttaattgtaaattggttagggaagagactactatttcgatattgtcgcagtagtagtcttaattccttccgtcgttgactgtaaacagaattttttaatcgaaacaaaaaacgacggaattatttgtataaaatagcttaaagattttaaggaaaagtgtttatggccctaatgcaattgctttaagactttaagaatttaggacttttgatgtgaaatcgttaatgatgatggatgcaacaacaaattgggtttattatttatattaaaactatacggtaaatattgtaacaaaatgaaaggatttgggctttatttgcaataatgttattatatgaattagtttaatgcataatgctgataaattattaaaatcagcaaacaataatgaaagattctggattgttctgtttcagctgattatttacattagatatctgagttgttgtttgaattcgagaagttcccggaaacatccctccgtagaaaattcatcggaggcgacttgaggagaaacacggaagctccgatctcacaatttcgcgacgaactcgcttcagcgattgtttctgttcatccgattaagatgaacggaggtccttccggtttcagttacgtatcgaaattgaataacccatttctcattttaacagcttctgggtttttggattaatgtcgaaatctttgaaatttgcagataatgctccggtcacgaaagccttcgtcatcgcgactgctcttttcactgtgttcttcgggatccggggaggttcttccaagctcggcttatcttaccaggtcatttctcatttgattttgctgtattttttattatcgtttttgatttttaagctcttctgggtatatagaagaatgaggatttgaatttggctcagatttgttctctattcgatattcttggtaccaattgtttagctgcgttcttattaccaacattggcactataaaagattacgggttatgcttaggtttccactgcagtgtgcaaggttttgactttattaacaggaagcagctaaaccgataaagctttagtcttggcatcatactgtatagtgctatactttgatggagtttttactaggattagtcatcagacagtggtgtgagctgaataatagatgggtttcttaagcaaatttaggctccaaatatttaatagttcgataatttgcgtctactcgtctgattgtgtatgtcagtagccttgcatttggaaagatgttttgattgtttcagagatctttgtttgtgtggtacaagttcagatttgtttcttttgagaaacggctggtagctgctatgaaaaggtatctctttttaaacttctgccaatctcattgcaggatatttttgagaagtttcggatttggaagttaattatatcggcttttgccttctcgtccacaactcaattgctttctggcttatatttgctatacttcttccgagtctttgagagacagattggttcaaataagtattcggtaagggatagtctagctcagttttttcttcatgacctttttttgtctattattttggtaaatagcaagatacctgctgatatttcctttgagattgaaattctatgagttaatatgtgctcattctgcaggttttcatcttcttctctggatttgtatcactaatactagagaccattttgttatcattgactaaaggtaaaccttcctattttcagatagtctcttcaaaaactagaccggtttgatatgatttacctttatgatatgatttgggggcgctaatgcagacaactatatgggattgtagttattagttagccttgttactagtctttccccactcatcgaaggaaaactgtgaagggaggattgggatattgtgacgatctttgttggtttcaaattctgacctgcaatttccttcactcatactattgaaaatatcttataaagaattcccttggtccatcatttaaattatcaagaaatgctttttgtgcattcttaataagcatttttgatatgaccttttatacactccgtatcacaaacactttacagttattgatagtgggtatataacaaactgctgtcttttttgtagatcctactgcaaacctactgacatctggaccatacgccctcgtattcgcttcttttgtacccttcttcttggatattccagttacaaagaggtttggtgtattgggcgtccacttctctgataaatcattcatataccttgcaggtgtccaggtaaacaataccatatgtttatttgtaggacttcttattcttcttcttattttcattgataattgtctcggtttcaatatttgtagcttttactatcatcatggaaaaggtccatctttactggaatttgcggtataattgctggttccttgtatcggttgaacatctttggtattcgcaaggcaaaggttataccttcccaactcttgcttaaaaacaaactacattcatctcctcaaacgtggggcttttgtcactttagtaacacagtggtactaacactagtttttgttttaaatgtacgacagttcccggagttcatggcttcgttattctcccggttttccttaccctccttgagcagccattctcaaccaccaagaaggacatcacccaacttaggtcgccaagcagtggcaagtctttatctctgcaccatttatattttgcctctttagccaaactcttatcacaatctaaataacacatcttcatttactgatatgtaatgtttctgtttctcagagagcttatcgagctccaatgccgtcaactacagagccatcagaggaagccatagctactttggtatctatgggatttgaccagaatgcagcgagacaggcgcttgtacacgccagaaatgatgtcaacgctgccaccaacatccttcttgaagcacactctcactaaaccttctttactaggaagtttcagaaacattgttgattcgagatgaagacattgtacaacagaggtattcttctgctgcgttctaacaacggaaatggccttgcattgacgataatatgtccagtaaatgatctgatttacatcctctttatctttcttttaggttttcttttggcctcttttgtttgccgttgtagttttagaacaaagtgcctaggttatgttatgtaagtacagatttgaaaaaaatatgaagaggcttatctgattaaaatctactgatccatttaacctttcacagaacctattctctttagaaaagaaagaaaatatgaaatttcacttatattggattaggatatcgaaagtggctgcagaaacttgcttaaaagacgaacgaccataccatgtaactcgaatgtttttaaaaaaccatttctggtgcaatgaacattgaagtgaagataaacagattgatttacacaaaaatgagtcagccaagtagcaaatctagtctgttagtctctgttagagactctggttacacatacacagagttcctatgcaatagaatcttcagataagattaggcttttaactccaagtatttgaagagtaatgagactcttgtctgaatcgttgtgtagactttgctagtgcctagtgagatcatagatagtttagcttgctgcttctttgccttcatccatggtgtaaactggtatttcccagttcttgttctttttcggatcatcagtcaaagtgagatcggtttcgtactctctaaatgttttgaagaatgtctttgcacccatcattatcaacctctccaccatgaacaactggtaattgttctcgatgatcggatccaaaatctcactaaaattcgatgaatacgccactttgtatctgcagtgtaacaagagtcttacacgaacattctacatatataactaaaaacttgaatctaaacattatggttttacctgatagctagaggtgaaaagaaatcaggggttctttcattagaaccgataaaaagagtccgtcctggtgggatttgtttctgaattctgccaatgatgaattctggccgtgtgtctctatctaaatgtggaaactggcttctttccacgcgaaatctgtcttttcttgttttcagtttgtcacctcgacgaacatggattgcatcgtaatcaccaagttttgcttttatctgttcaaccaaaactggtcataaataagctataaggcgtcaacagtacattaccatctggtcactctttcctgaaagctagattatgtgcaactccttcaccttttctgcagcatctctcaatcttgatgctgccatagtctggagaaatgaataaggaagcatgacgtcgctacgattacctcgatccttgcattcaacaaacctacaatgaagatagatatatgatctgataatgatgatgcctaacacaaacaagataagaaaataatgctcaaggagcagcaacttcccaatctattggaaacacaatttcctcagcaatgcttaccatgcaagggggcttgcggttcggttaatgagcaaaagatttgtaaagtcgctagagtcatttagctcatgcctgtttgccccatatacatgcgcactcccacgttctttcaatttcatactcgtcgatagcattatgtgccatgtttccgagtcatccaagatcacaggtattttctcagagatgagatcaatatcatacaatgattccattgcacaagagctcacttcccaactaagaacatacaaaggagagagagagagagacctcttgtgttcaaaagtgggaaacaaaacaaaacctaagtttttgaagtagtttaaagaaactctcacctttcctctctagtttcattgttggatcgattaagtatacccttcttgttatgtattggattgatgcacatccgagatggcattacaaaagtcctgcaacaagaaaattgcaattacagtgaccatctttaccaagagagctgcatcatttattcaactaaccatctcattgaaccagataggctaattgccatttcaagaacttcatcagaaatctcaaaagtttgacatattggtggattttgcaaaagttacctgttcagaaacatggcttcttcaagggcacatctaaggctagattcttggtgacccaaaccggcacaggtctcacagttcttaccaggacaatcgattctgtttccccagtacaagtacttgtccgacaaactatgctgtgtcttgtttcgagttgacctcacaaaataaccaattagggttgtccgatacggtaaagccaatccgccggtggagatcaccgaagtgaaaaggaggagaaatgcaactgcgactatacataacagaacaagtctttgagatcctggagtggcttttaacttatggggtttgctcattgtcgccattaatgaaactgttgtagtgtctagatcagagtaagaagagagaaagaaagaatctttgcgacggttaggtagagattaagatgagatcagagatcttaaggtcaaagtcacgtggttgtctctgacaatgtgagacacaatcacgtgtcgtatcattgctctgatccaacgatggcacaaagacaaattgttttttccggctgccattaaaagagtgcttcacacgtaaacatcactggattaaaaacaccaatcggatatgtctcattctgtacattcctcttcttcataaacctttccttcccaccacacacaaatacactcacagacataattatcgaatctttgactcagaagcttaaccatgaatagaaaaagaaaactaaaaaaactatcaagaagtggagaggaaagaagaaaccagatctactccacctagttgcatcttttctcatctaacaatggcgttactctaagctttttgtaaggtccgagaagacacgccatgtagcaatctgacaaaccctaagaaactaagtttgccatcagaatgtcttatccaatcctgaagaacaacgtgcaccggcactgatggccctagtccgagttcctgcaatttaaaacatacagatgcttaagatcaagcatgaccaggttttttgctcttcacgagtcttctctagcccctaggtgaattaaaaagggtaaaacttataccgatgcaagttcttcaatcatgatgggcctattcccgtctttctcaaacaactcgtaagcacgccgtgcatgttgctcccatgtctccattgcttcgagctgataaacgcttaatgctgaagcacaaaactcttcaaagtctagtttcttgtattgaagacaacttatctgcatcccaacagagattacaacgttaaaccaccaaacctaatgattaagcttatagtccttatatttatagctttcttaccatgtgaacaaaatcaaacactcgagaatccttcatagcatctgttgaactctttaggattgcctgagatttgtagaggaaagttcaataatcacagaagatcgcaaaagaaaactgaagaggttgatggaatcatggaaaaacaactcactgttttgtaattctgcatcgagatatatccatttttgcttggccccaacaatgtgaattgctcccgaagatacgctaactgcggtacagttaatgttttggcaagagcctaaaaccatgaaaaacaaaacccattaatcataaagttttcattcaaagaactcaacaattgaaattgttaagtaagtagtatatatgtcacagcttctgtggaatcaaactcaccgctaaagccgattttctcaatgaagttgacattatgtacacttttacaagcttgtatatgatcatatcagatggaatctttagttcatgcgagccaaccagccagggatgacctgaggaaaaagacaattgattactcagatgttcagaatataagaagtgcagaaccatgaaaacaaaataatgatgtgttaaacctgttatagagatcaaagatattatacttacacaaagcctgggccgcagttagtcttttacggtaatctttgtttagcaatctcttcacaaaatctacagcttcgggtgatagagaaggccaaggagcttcttcaaaattcggttctgcctttagtacagctcgaaagattccggattcagtacgggcccaaaagggtcgactgccacagagaagaatataagcaatcactcctatactccacatgtcagcttctgttccatatgtacggtgtaaaacttccggggccacatagtaagcactccctacaatatcattcaacctctcgtctgcagaattgcaaaacaccgtcaaattttctatttaacatgaagatgagtttgatatgagaaatcttgagtcaatttcaacatctctaacctggcttgacatagtcagaaagaccaaaatcaattgctttcagaggagaagtctcatccttggtagagaaaagaaagttctgtgaaaggtaaacaaacaaatagaaagaaacataaccgtcattatcactctgcataagttagtggaactcatttctatgtgtacaaagactgcttaatgtgatgggacctagaaagtgaagtgtcaacaaaagccaaaatgatttacaaaaaaaaacaatgagagaacaatctagaaattaaacatcaccatggattataaagtacctcgggtttaaggtcacggtgaaccacaccttgtagatgacagtaagccacaacactgagaatctgaaccataacttttttagcatcatcttcggagtattttccacccctaattagatcaagctcaaccagtcaaagcacgattcagaagagaaaatcaatcagatacagagccatgtgtgattagcaattacctttgaagtattttgtccaagagttcaccacctttgcataatctggtaaaaggagattacaatatatttattgcaatcctggaattgaaaatcaaatgatcttaagacatctcactgagaaatgtatacttactccatgacaatataaacattttcatcatcttcaaacgcgtcatagaactggactaggttcttatgaccagtcaaagcccgcaacatcttcacttctctactaacatcctcaatcgcaattgcagttgtcatctgcagtcaaaaccattcaacactaagcaatgactcggggtcgagaaacaagctgtatacttctataaacacatggcgataaaactagaattcgaaatcattgtcatatatttcaaaacaacataacgaatacagaattaagagaaattgattttcagtttcaaagatcgaacctttgatttaggaataactttaacagcaacttcttgacctttcaagctaccttttttacccttagcagagcaagtatatccaaaatgtccacgacccacctcaccatcaatctcatagtgtgaagcaaactgttttgaaaagccaaaactcttatcgagaccgatctcacattctttaccttcgggaatcgaaacctcattaggcttgacagagccatagcgacgcgcgaggaaagctcgtatgtgcttagcaggagaaggaggagggaaaggtctcttgaagatacgaagaggcgttgagctcacgctagaagatacagatggtgaggatttgaataagctaggtacaggactcgggctataaaacggaaagccagaggatttcgccggtggctgtgaattcgtcggagcttcattagtttcgccggaaactgggaggctttttgattgttgctcgacgggttttccatgacagatccccatgaattgtcaattcgaaacgaaaagcttcaaaatttgagaagaatatcgatatcactccgatgaataagttaggttgcgaaacagattcatgtgagaagcaagaaatcccagaaatcgagactcggaaacccagaacgcagagaggggtaaggaaattgaaattaacaaaaaggttgagaattgagatcaatagattaattagaggaagataaaccacacgcaaagaggaggaagaaggagagaattgagtttagttccaatcagaagcaaaagctaaataagtgaaaagagagagtcgaacaaggaaaagcaaaagactcttaagaatgaaaaaaggaagaagaagatgctttttttagcagtagcaacaagaaaaataaagtggagagaatcaaaaagagaaaaagcaaagccaaaggcttcattcatttcttttgtttttattttattcagttcttttagtttttaatcactttattgttaaaatgggattaatgtgatgtttggctgccaagaaaagagtcttccttcaccaacttgctacaaaattatgatggtaaattgattattaaaaaatttgttgctaattgatggctaatgtatagatattcttatgttttagaaatattgtaatgtcttgttgatatcaaacccatcaattttaacttatagagagagaatagacgagatgagtagtctctatatttgctaaattctatcaagacttacacagcaaccttatctttgcactgccaattttgctatgtctacaaatatcaatcgaaggatccaaaagagtcctagaatcatgccaaaatatataaaagcagagcatatatataacctcgaagttggtacttgataaaagaaagctctacccaaaggcctaatttgtttcatagggttagccaattgttaaaccaagttttgccaaatttcacttgtccaccacatatatcaactttacaccaaaaatgaatgagttgtgagaaggagtaggtaaaagttgtgttttctcttttatgtaatttaaatccatatcaagttgtaaaaacatcatttaacatatgttcttattatgaattatagttcatttgaatttaaaatgagacataattttcattctcgaaattctttttgtttcttctatatctcattccagattttggtttgcctacccataaacttcgaaaacaacatctaagaatttacttgcacgtcaaagcccaaaggagtagataaataaataatagtttgggtttctgcactaggcacatcacatatatatgatttatcataccgatgaatatctaatcatgaatagttctcgacgtagtatagtacgacattgccataattaatcagctatcattcttttctttttcctttaacttttacatgaccgggtgttttagactaaagttttcatttatacgaaataaaaataaaatgacaatgcttttagaccttgatatttacgtcacagttatatataaaaccatgctttaaattatagagcatcacaaggctatcatactggattaaatatgttttcttgggctatacatcttccaatgcagccaatcgtcataatccataaacatttatgtaatccgtgagatagtgaattacccacccaaaaagaaaaatgcgtgagatagtgacgatctcacgtgttataatgagttaaaaaaactcagtatccgtagttggaaggcaatgatttgattggtttctttcttttgaaacgagttcctcgagtgattattttagtctaagatcaaataattgcgttcattgttggcacattggaattgaaattagcatatttaattctttaagtttagttattggttcttatttctattttcatttttttttttgtagaagagtcaatttacaatacaaagattgatgaatcgtacctgaaacttgaataatattttcagattgaagatgaaactagacaaatatataaagaaatattttacgtacgtaagatagcccaaggaaagtataaaacagagaaaaaccctaacaaccatcttcctcggtgggcttttttggttgtgagttatttggcagcaaaagcctaaattattactagaagataatggaaggaaaagtaatgtatcggagaaaagaagaatatcaatattccttgacatctattttctcccacttctttttcttttgccacctcttttcatttctaatttttttcctacatcgtaaattcttatatgaaacaaaataaaacaaaaaaagttccatttatacactcatgttaagtcacacacacaaaaataaaagtttatgtaacatacgggcattttgcataatatgtcaattcaattttttcccatagaatttcacaataaatcacatgcagttgtacgtattttcatgtacttactctgtttcggttgcatctacaaagtccgattttaacaaattcgtttagtttcgattcagtattggtcccgtgaattatttggagttttgtataaattgattaataatatatgtgatgaaagagttggtgcctttgacgtacggcatagacttagagtatagagacgtggtggtcttgtgtaactcaagtgttgtcatgtcggagtcactgtgggactgctctactcgaatctaatttgggcctttctgaaaccctaaaaccgattttgttccaatctcagtttggacccctcttctctcaccttagatgggcttttggatcctcgattcttctcctctgttttcctttttgtttttatgtttcttaacccatcaaagagtttaataattgaaaagaaaaagagtttgatcggttttatctaaaaaatctatatagcagccattttgtgaaataaatcctatagttgggaattatttacaataactgccactagattttaatgtttgtttttgataattagaaaaaaaaatctttgaataattaaatatttgacatttaacaatcttccctaaatctctcaacattaactacacgattagttactaaaataaaacttgcaaaatatttaatatcatttaattattacaaaattattatttttgatattgcttttctccatgactataataattcgattataatcatcaaaccgcagagatatttgatagcatttaattactacaaaattacaaaatatttagacaataattcataaacatatcataaataagatcaatattaataaaataaatagttttttacgggacgggttggcgggacgggtttggcaagacgttacttaataacaattgtaaactataaaataattttttttatagatagatacaatttgtaaacttttatgtatactaacttttagaaaatatctagtaaggtttaaaagtgaaccaaaccacaataaagtgtttcttatagagtgattatcccaagacttgtaagtcttaattctcggtttaaccctcaaatatactttaaaaggttagaaaatgttgcatttactagatttttaaagttatcaaaaagtttttggagaaacaaaaaacatattgtggattccagataaactagacagtagtcgcatatatagatgtatagatgtaagttaatttaacaaatgatttcttaatatctattggttttagattttcaattagtattgaatttttattttagagatggttcactactacgatagatcaattaaaacgttaaaatgaatataagttctgacaatggacaaaatgaaacactggtttaaagaatgagtaagatatctttgttaatagcaaagcaataatttagtaaggttttctaactttccggtaaaaccccgaagtaagtgaaaaggttcccacatttgtctgtgtaggtaaacaagaacacttgaccaagaaagacaataagaacacatgaaaacaaacacatatttgacatataatatgataacttctatttgcttgtttgtgaaatgtagataaaacaaagtaaacacaaagaaaaaatagtgatattcaaaaaggaaataggatggtcaaaattgtgtggtgagataagaaagggcactcacatgttcacacgatggaacactaacgtgtgaggttaatgattgcttttgccacactacccataaacttcagaaggaatttttaaaaaaattagaagtttttctatagtttcttttgagttgaatacaaatataactttaacaataatatatagtgcaaaagctaaaaatatttctataagatatactttttggtcgagaggttgagtatagaggggacaccagctgccccaaaaccatcacgctccatggacaaactttctccacctttttttttccttcttcttcttctcttagttttcttcaatattattttattaaattcgccataaaattatagtttatagaaaacaattattaaaaaagagagaaagggaaaagggagagtgatgagaagagtcggtcctttttgtctcatagagccaatggcccatcaattttatttccttttgtcagtctccttttctcacgcttcctcttcctttaatcccacattcaccttcttcttcatatatattccaatttactaatggtctaattggctatattattgagtcatttggttcatatatccccagcctcccatagaggcaagttggtgagccattttctataaacaaaacggatacctattgaagaaaccagaatagagatacatagcaaacatagtatctctacaatatttcaaaacactttcattataaatataacagatatgtacaaacctcactagatacggatacacatcattatacattctaacatattcttcttattcacacgaaactttagagccaaaattcgattagtaaaataaactaaaagaaagtaaattaaagtaagttttcagtatttttggttaatcctctcaagtctcatcacactttcattgtacatgtagccgtacataatatgaaatttggcgtcctaaatatacaacgtatataaagtgttactttttcgaatatacgtttaagcatttttgtgtcatgcataaatgcacgtcttttccatatgatcaacaaaaacagtagactagacatttcgctaacacttaattaatctcaactaaaagtaaaacagttcgtcataatcacatggatatatacgaatatataagaaagaaagaaaaccaggcactgcttatattctttggtctgaaaaatgtggtcaaatgtacacatttagaaagacatgaacaaagaaagagataggagagtttggattcatttggggacaaaggtgacataagggtcgctttgaaactcacagcatacaaacatagaccttctcttcactatatatacatatatattcacatgtatagtgtgtatatgtaaatcgaagtaccctagtttcttttggacttcaccaatcacatctgttacttagattcttctacgtcgacaaatattcccacaatctcaaaaccctagtcatcacaccaacaaccaaaaagatatatataaatagaggaaaataacatgacaaatattctttatatataatatagatctttttctttttcttgaaaaagaaaaaaaaaagaaaagaaaaagaacacaccaaacctacttacaacatttgcttacactcccaagacttagtaactaaaaccatataacatatatattattaaagaggaataaaaaaggttttggtaattataaccaagttaattatgatcataccctatatatattaatcaattatagactttttagtgtgctcaattctcatcatttcacaccattatgatgtgatccagcgcacgacgccgctttgaccgttctcctcctccaccaccagaactacgttccatcaacgacttgcttgaccgctcaagcagcgacttgagagcattttgcaaaaaatgcacagactcgacgccgtgcatctctttgtcagcagctacgacaagaacacttcttgtccgaccaccaatggttaccatctcagctcggagagtcttcatgttaagagacttgagaatctccataaggtccggcaagagatctgatctatcttcacaacatagagaggctttgaagattatatgaccgtcgtttgaatagtctccaaagtgtagaacactaatttcgtcggtctctgatggtaataatgtttggtcggagtcggaggtctctagggtttgctgtttaagttctctgactcgttgaactactttggcgagcagtgtggctttatcggtctgaaaatagaaacatgaaattacaatgaaaagtttggatcaagaagttgaaatttgatgtttgtatcaaatcaaatcaactgaaaaagcttgagaactttcccaaaaagtgatatactatcccaacgagcttcacaaaaaggccatgaagcttttcgtttttctcatctgatcactactcgccagttttgaatattcaaatcaaaatatatatcaatctttagaattataaatgtagaaaattagggatcatctttgataaatatgtgcttgttaataagtaagaatagtaagacaaaaaagactcaattgaaaccaaatgattataaaatgttatcatgaaaaagtacagtattcatgagctaacaccaaatcgaatgaaacatgagaaaattttaaagatgtaaactctgggttagagaagatgcaaaaccctaattatatacccatttcaaaaatcttttcttaaaatttcaaagaaatatatacgtacagatgtataaacatcatatgtacgaggagagatacatacgccaaatgaaaaagtatcaaaagtttatattaccttagaattacaagagagtacgttacgaagcttgttgagatgagaattgatcctctctctccttcttctctcagcttctttgtggttcctcaaagcagctaaagctctgtcttgagccatcgtttctccgatgccggagatcgccagtgggtaatacgatgacgtcgacgacgaagacccacataagctctgcatagtcgtcatgtagtcgccggagacgcagtaccctccaccgccgacttcgtttccggcaagaaacgagtacaacatctgatctgaggtctctggttgcattatcttttgtttgcgccgccttcttttggttttttgttaattaatggggtttgtggagctttcggtgggttctgtcctaaaagatggattatatatacgtgaaatgagagggtagagagtgtagattattttttttattttttttattttagatgttaaatacttgatttttgtatttatatatatattggtggggaaaaagttgctatagagtttgaaatttttaggaagggtccttaattaggtcattgtcttgccaccatcatcattctaaatagttctatatgatccatcaattgaactgaagatacatacggacttttgggactatatagtatattactgcatttccaaaattcaaaaattcaaaaacaaatctcaaaaaattgaacattctttaaatctttacttatgaataataatgatgttttaccactaccataataatgatcctttaagttattatgataagataccatttctaaggtattaaagataaacaataaaaggcatatcctgatatgatttatgctgcttctatcattgtgttttgtccggataaatctcacacagtgcaatgcgataacataaatttgttatttaacaaaaattaaataatatacagtatttgttttaacttaatgtctggaaaaacttgagtattcaaaagccctaattttttttttttgacaacataaaagccctaaataatcaacaaatttgataatcataagagaaagctactgcagaaaaataatttacgaatgagacaaccatatgatatgaggaaggcttcgccataaaatatgggcctaaattatataaaaaataaggacccaaatagtggcccaattacaaagttttggtaaaacggtgaccacaaaactggcgcaagccagaaccatgcagtagagacagagctcgacctttgactttgataatggcagtttcttcgaaacatttccaggttccttcatctttcacgcttcctccatcttctttcttcagctccttaatcccttcttctccaatctctgttactgcttcaacgattcgagcctccacaaaatttagctccatacgcgtccgtttcagtcgaagatcaatcgtcagatacaacgaccacgccggagaagacgaagaggatagtgacgaggataaggaagaatattggagctttgaggaagcagtgactctcttcaacaagagggattattacaaaagtcatgacgcgcttgaagctctttggattcaagcagaggaaccaactcgtaccttaatccatggaattcttcaatgtgctgttggatttcaccatctattcaacaacgtaaatctactctccttttaactccatctattgctcgttttcgttcacgtttgaggtaattttagtgagtgttttgggatttgaagaaccataaaggagcgatgatggagttaggagaaggagtatgtaagctaaggaagatgaatttcgaagacggaccgtttcatgaattcgagcgagatgtctccgcagttcttgaattcgtttatcaaactcagcttgaacttgctgcctgtaagttttgaattttgaatttttgattgaggaaaccatttagcaaattgaacctaattgtgacactcaagaaatctgaattgattgatgataggttcagaagatatgtgtttgacgatggatcaatcagacagatcgtatcaactcttaggtggttatgcagctggagagagtatttacagcttagagactgtgcttgacttcaacaatggaatgtctgagacaacttctatactcttctctcctttacattcatcgtctgagccaactcgggttaagctccctacccttaccgcaaccgataagcatcttcttgcttctacatacgacgacagattctaaagagaatgatcaatacgaagataatagaagaagatctcattactgttatatttcaagaatcaggttctgaacctgtcaataacatgaacaatgagtcatttagacaaaaggtaaaaacacataacattcctgtctttttaaccagcaaaaaccagccatgaatgaaattttagaacaaagcgaaggaacattctttatgaaattacataagaaggtagtcaaaaaaaaaaaaggagaaagccgaagaagttgtttcaatcctcacttagccatcataaccttcacaaactcttcgtagttgatctgaccatcaccatcaacatcagcttccttaatcatctcatcaacttcttcatcagtaagcttctcgccgaggttagtcatcacatgtctcaattcagcagctgagatgaaaccgttctggtctttgtcgaaaactctgaaagcttccttgagttcttcctcagagtcagtgtccttcattttcctagccattaggttcaagaactccgggaaatcaatggttccgttaccatccgcatcaacttcgttgatcatgtcctgaagctcagcttcggttgggttttgaccgagggaacgcatcacggtaccaagctcctttgtggtaatgcaacctacacaaagtaatcaaagattggtgttactacgatgcaaatccagaatcagaacaaatcaataaaaactggtcaaaatacgaattgaaaacatgaatcatcactaacaccacagggctgattcacaaatatttcatccgaactacatagatctttaatttgaacaaaggcacaaacaaatccttgaattcaataatgatttggaacatcgaaaacgaaaagagtcaatgcgaggatacgaacaatggatccgtcaccacggtaatcgatacatatcaaaagggaaccaaatcaagcagaaactaaatcagaattatacggccaagacctacgatgatagagggaaagggaggatgaagcataccatcaccatccttgtcgaataagctgaaggcttccttgaattctgagatctgatcgtctgtgagctgatccgccattgttttttcttttcttttctgtgattggagaaaaagggaaaaacgaaagagtttgtgagacgattcgtgtgctacgaatgcggacttgaggcgttttatttacctggattattgttaatgtcgggaaggacctcggtttggggatgaaattacgagaatgccataaatttgagttttaaatttaagcgccaggttgacatgagaagagatggatcacacgttcacgcggtttctacgcggatcgttgactttgccatctcaccttttcctttccagtgagtcgcctcctttgattttccttggttcgttggtttctggttccaattcgttagtatttgttttctcgttattgttaaatgctgtcttttttaaaaaaaaacatttattagaattatcaattgtgaagtattcgtttggatggtaagtggagctgtcgctacatttgtctaaattattaaagattttgcttttaactactactttttaatactacattgtctgtaacattatatgttttttggaagtgcatcgaacgtccttgtttctgcaataacaatcacaaagcaaaaatttgcatcggataaaaacaaatcgaagaaatacatgcttatgacaattgattaacatggtaagatatgaggcttagctgatttgatcactgtatgtgccagatcattaaccgatttatcatattagatcaatttttagtagtgagctaccagttttcaatgattagttctgctacgtttcaatgtttttctcaaaagatacattaataccccaattatattcgatactgaaaccatattacaaactcattttaataaattgcacacaactgaagatggtaacacactaacacatgcaataaatttattacatagaaattattgtcattagatgaaacgccttttgagagagatctaacataattgtcagaccctattggcataaagttactgacgtgtcatttcaagataacagcgcttcgaacaaatctttaaacctatctttcatgaagtcggaaattggcgaagcgatgatattgctggcaaccccgaccgctatgtccctctcccaattggtgccaccagctctgtcatttctagtgtgacgctgcacttgaccctgaccttgattcacaactctgtacgtttctttcttagactgagtgtcaatcattttaccagtcattacacacacaaactcagagaaactgatggttccgtcaccatctgcatccgcttcgttgatcatgtcctggagctcagcttttgtttgggtttcaccaagggagcgcatagtagtacggagctcattcacggtaatgtaacctacaaaaagtaagcaatgacttatgttagtcatttcagtgctttgaagatgatcaggatccaatatgtacgattagcgagaaagggacgatgaaccataccatcaccattcttgtcgaatacgcggaaggcttccctgaattctaagatctgatcgtcagtgagctgataatccaccattgtttttttagtgtgacgcggcgcttgatcatgaccttgattcttagccattaggtacaagaactcagggaaatcgatggttccatcaccatctaaatccacttcgttcatcatgtcctgaagatcagcttttgtccggtttttaccgagggaaaacatcacggtacggagctcctttttcgtaatggaacctacaaaaagtaatcaaggactagtgttagtcatttcattgctttgaagatgatcatgatccaacattacgattaaatggaaagagttgatgaaccataccatcaccattcttgtcgaataacctgaaagattccctgtactctgtaatctgatcgtcagtgagcttatccgccattgtttttttagtgtgacgcggcgcttgatcatgaccttgattcttagccattacgcacaagaactcagggaaatcgatggttccatcaccatctaaatccgcttcgttcatcaagtcctgaagatcagcttttgtcggtttttcaccgattgaacgcatcatggtaccgagctcctttttcgtaatggaacctacaaaaagtaatcaaggacttgtgttagtcatttcattgctttgaagatgatcatgatccaacattacgattaaatggaaagagttgatgaaccataccatcaccattcttgtcgaataacctgaaagattccctgtattctgtaatctgatcgtcagtgagcttatccgccattgttttttttgttttctgtgatgactgaaagaagagtttgtgagacaatttgtactacgaaccaggacttgaagccttatataatagtacccgaattatttgaaatgacggctatatcctcaaacttttccacgttcacgcaatttctacgcaggatcgttgtctgccatgtcagcttatcctttcaagtgtgagtcgcctcctttgactggcaattacttggttggttccttcttccaacttgtttttttttttttttttcatttatttgaaagaaacatttatttacaatggaattttggatgggtgagtggacatttgcctaatttatattttaggttatagttttcttatactgactccgaaggagtgtccttatttatgcaaaactaaataaatcataatagagaaaacacttgcataagataaaaatgaatcgaagaaatacaagcgtatgacaattgattagcacatgtttagtaaagtgttgttgttgaagttaacgaacgttaccaatgaaatctgatctgagggattccacaagtgcattctacttgagaaagagcagagaagtttctacatcctgaatattcctgatttaacatctctgctgtggaaggaattcgcaagacaagtgtgtggaaggttagaagaaactacacaaacgaccaaaaacatggtacataagaaataacgagaaagaccacagaagtttctaccttgcggggatggcttgagcaagtaaagttgacagaaaaccacttcctgtgcccgactcaagaatcacgggcaggggcaatctcaaggtagactagaaagctactactacccgccgcaatgtaaagaatctgagtcttgtgacctgtttccatatgacccaacatgccacatgtactgcatacaaatttacccttgttgctttggattttgggccagcgaaattacacgggtacaaaataagaaaagcccatatcgaagacatgttatccaagttttctgatattgaacatgcagtaattttccacacattgtagtccaaatgggtcaaagggcgtcctttgttttgctcaaaacacttgggttatcgaaattgtagacgtgtgttttcaatgttgcagggcaggttggtgcgaggcatgtcattattcattagatgagtccttataagagtcttgaagaactctgggacggtgagatatgaggcttagctgatttgatcactgtatgtgccaaatcattaaccgatttagatcaatttttagtaatgctaccagttttcaataattagttctgctacgttttaaatgtttttctcaaaagatacattgataccccaattatattcgatactgaaaccatattacaaactcattttaataaattgcatgcaagaaaagatggtaacacaataaatttattacatagaaattattttcaaagatcaaacgcctttttagagagatctaacataccagccagaccctaatggcataaagttactgatgtaccatttcaagaaaacaacgcttcgaacaaatttttgatgaagtcggtcattggcgctgcgatgatatttttggcaaccccggccgccaagtccctctccaaagtgccaccagttgtgtcatatttagtatcatgaccttgattcctagccatacacacaagaactcagaatgaaatttaagaacaagagaggaacattctttatgaaattagataagaggtagtaaaaaaaggggaagcggaaaagttgtttaaatctcacttggccatcataagcctggcaaactctctgtagttgatctgaccatcaccatcaacatcagctgccttgataatctcatcgatttcttcatcagtttgcttccaccggaggatagtcctcacatatctcatttcagcagctgagatgaaaccattcttgtctatgtcaaagagtctgaaatctttcttgaggtctttctcagagtaagtgtccttagccattgcgcacaagaactcagtgaaattgatggttccgtcaccatctaaatccgaatcgttgatctcctcctgaagctcagcttgggtcaggtttaaaccgagggaacgcatcacggcaccgaactcctctgtggtaatgtgacctacaagaagtaatcaaggacttgtgttagtcattttcagtgctttgaagatgattcaggatccaatatgtacgattagaggaatagagacgatgaaccataccatcaccattcttgtcgtatacgctgaactgttccctaaactctgaaatctgttgtctagtgaacttattcgccattgttttttattttctgtgatgactgagagaagagtttgtactacgaactctcggccttgaagccttttttataaaactgaattcactgccatgtcagcttttgctttcatgtgagtcgcctccttggtttgttactctaattggttggttccttcttccaaatcgttatcatcattaaatgctgtcttttttttcttttcttttttgtatttccatttatttgaaagaaacatttatttacaatggactagagacttaataatatatggtcttctacagaagaaaacaattgaatagaattatcaacggtgaagtattcatttggacttttggatgggtagtggaccaatcgctacatttgtctaaattatttcgttgatttttctcgttggttcgttccttcttccaaattcattaatattattttcgttcattaaatgctgtctttttcttcttcttctttttttttttttttttttttttgtatttccatttattgacaatggactagagacttaataatatatggtcttctacagaagaaaacaatggaatagaattatcaacggtggaagattcatttggaattttggatgagtaactggaccaatcgctacatttgtctaaattatattttacttttatgttatagttttcttatactaacttttaataaatagtttataaaaacactcatgagttctgggaagtgcttcaacgtccgtatttatgcaaaacttaacaaatcataataaagcaaacacttgcataagataaaaatgaatcgaagatgcttatgacgattgattatcacatgtttactaaagtggtgttgttgaagttaacgaactttacctatgaaaaatctgatctgagggattcgcaagtgcattctacttgagaacccactccatcctctgatctaacatctctgctttggaaagaatcgcaagccaagggtgtggaaggttagaaactacacaaacgaccaaaaacatggtacatacgaaataacgcgaaccatagtttctaccttgcggagatggcttgagtaagtaaagttgacagcaaaccacttcatgttcctgactcaagaataacacaggcaggagcaatctcaaggtagactacaaagctactacccgcagtgtaattttacccttgctgctgaatgctttcgtcccagatggcttcccgatccaatctgagtgcttaagactccagaaagactctgaagcagagagtcatagcatactttaactgcccagctaccaataatcgccgcaagaacactttccgttaatgaaatgatggaatctactaccatctcttaacgtgatctctcggttcttgatcaccgatatatatttgaaagcaacatggcaatcactgcaaacccgcaagttcttgattattctaatcggtgcaccttcaggtaatatcatgagcgcaaatgcaaccgctagtttctcgctgtgctgcaccaagtctgattctttctcctcctcatccatatcatgcaatactgacgctgtatcaggcttgtatcccttcagcttcatctccagagtcagttctttcaggtatgaatagatctctttagatttagactgagagcgatctcccatcttaaactgatgaacttcacctttgtgttcaaaccagctgattcccgcttctttcttcacattcttatctctcatcgattttctcacctctgatacatcgcgccatctcttagctgaggcgtgaacatttgcaagcaggacgtaacaagcagagtcattagggtcaatctgaagaatctctttaaagactctctgtgccatttctgcgtttttgtgtatgttacacgcagataacaatgttttccatataacaatgtctgtttttattggcatagaccttattattgcctcggcttgatccaaacagcctgctcgaccgagcaaatccaccacacaagtgtagtgctttaaacctggcttgaacccgtatttttccaccatcatgtcaaacaactcaagccctttgtcttttaagccagaatgactacacgcataaagtaaattcagaaacgcgacctcgtttatctccatgttcgtctgctctgccatagtattaaacagctcgattgcctcatcgccttgtccatgaaacccataagcagaaatcattgagctccacatcacttcatcttcatcttcacgttccgagaaagctttagctgcatctccaagacacccacattttgaatacatactgatcaatgaactaactacagctacgacagagctagccccaattttaatagcttccgcatgaatctgctgaccttgacctcttatcgctaagtcagaacaagaactgagcacagttacaaatgtgatcttgttcggcctacaacctgagattttcatcatcttatacagataaagcacggtttcaggacatccgttttgcgcgttccccatgatgagtgtattccatgcaaccaaattacgaaccggcattgatcttataacaatctcgccatcttgcaatttcccatttctcatatacatatgagccaacgaactattaacaactaaatccaactcaagcccatatttgatcgtgtagccatgaatctgctgccctatagacactgacctcaacccagcagatccgctaaaaacactaccaagagtatattcatcaggcgaaaaccccaatccgtgcatttccctaaacaaactcaaaccctcttcgttaaactcaaactggatcaaaccagcaatcatagcattccaagttgtgagctttctatcaggcatttcatcaaacaccttccgggcatttaccaaatcgcctgcacgaacatacccattgatgagtatgttagatgacatataattcttcttacgcatacgtccatatactgcaacagcggaaggaaaatctccaagcttggagtacatgctcatcagatgattgcatatgaacttgtcggaggagaatccggagacgacgagaagacaatggagctgctttccggacggaagagattgtctggtggtgcatgattgaataaaaggggtgaagagagaagtgtttgtgaagatgttgagtcggaatctctggaaagcttctcgaaggttaccctttgagcacaaagtagctatggctgtcgcaggatctactgatagtggacgaacaacagaggaaactgagcaacgcatttactattgaattgccggagattgtttccgatttggattctcagggactgtcgttgctcgaagaagaagaaggaacgaataattagacactcgatttaattgggccgtaatcagaagcccaataagtattagtaaccaagtatcaaaaacggtttagcataaccatcaatctattgcttaattgtgtaaggtactaaaactattgtcgaattcatacttgaactagtgtttgtactcaaaaagtttgaactagctgcaaaagaggaatacactcaagaaatgtttataaagacatgctgttcaaagtcaataaagtctacacaatatacaaagaacaaagcggtctgatataaaccaacacaaagaagaagaaagaaagaagagtctttaggatcagagagaagcagagtttgttcgccggagcttccacttaggatctggtggtggttcacttggtaggatcttctccacctcctgccattataatcagattaaagaaaaccactaaatctaaaacgacactagatcatgaagcaagctgcagagatgggatttttacctttagcctccgaagtttttcgttttcttcttctaaccttgaaaccttgatctctaattcatgtgtataagcctgcaagtttcaatgtgatgactagaccaactaacaacaaacaaacaaatattaactaagtaaaaacacaatgtcaagttcttaacctgtttcctagctcgtgaacgtgctgcagattctctgttcttgatcatcctcttctgtctcctctcaacagtcttctccacaatctctccagctactcttttcctcccaggcgcttgtggtgtatccgataatccacccatcatcaccatatcttgcatctcgcaaaccggatatgtcataaacccttgttgttgttgaggctgatgatgatactcaacccattgcccatttgaagctatgttaacaacattttcttgagggactactgtctcagtcactacaccagctctcaacaacaaatcctcaagtgttatttcaccgagtgtaggctgcttatgagtagtagtagtactagtaccgtttccattcttgtcctgttggatatctctccagacctcatcaactgtctttttactgagatctcgaggtaacgtcaagcttccctgacgaacaagcccttcctcagctggtggcaagacagtcttgagaagctcatcaaggttcatgcttcctagtggttttccagaacttcctaagtgggtttgaacctcatggagctttaagctatagagagagttctgcctcgttaatgactgagatataggctcttcaatgtttcctctaatagaacccatatatgtagcctttacacagaaaacaataacaatttagtaatcctggttcaatctaaacaactaaaaaatcgagaatctctaaggtactaacaaacaatcagggaatttgcatgcagtattcgagtgcttaaaaacgcagataacaactcaactagagaaatgagaggtggcaggagattgtgaataagggaacaaaagtttaaggatgatgttgaaagtggcttcaagtttcaaaaaaggagattaagaaggagtagatcgagaaaaagagagaaaggagcttgggttctctctgtccaagtggtgggtctgagacaaatctttggtatgagtagagagattataaaaccaaacatacatgctctcttctcttctctctctctctctctatctcctgagtttctccacaggagagaaatagtagaaagagaaagagaaatagtagaaagagagcttattttgccttagaaactgttacactcgaactttaaactgtgcctctgaggacatttcaattaaaagctactttcttttagaataaacacaaacaaacaaaaaacaatagtgtccgtacttatgatcatatatgaaagtattaacttatgaacgcttttgaaagtaagtttattccctacgaataataaacctaatattcgaatcttacaaaaaatcaaaaacattgtgcaaggttattatataatcactttagatttgttacatcactttctctaaaaagacttgtcattctcaaacataagtttcccaaagtgagtttcttatatgaaaaagtgagaatgggaagtaaccaagaaggtgttattggaaaataaaccaaaaccaaaaaattatgataaaaaagattcgttgtataatggtaaaaaaaggagtaaaatgagaaaagaagaaagaggagggggacaaagggagaaagggaccacatgggagaatcggggagctttgcatgaagatccgcgtgtgcttcctctttgggatgttctcccacgtgtttctgtttcccttttctctttctttattactctcctttcttcttcttatcatacaacatcaaaatgtcaaagactctacttccttgtatagatttgtcctcaatctgagcaaacccacacagagcatacccttgaactatgtgtggcagcttgatcctgtcacatagagaacaagaacatacactctatctggctgtaccaacttaggtctcctaagaatcaagtgttcaaatagcttcataagttatcaataacataagggcctagagggcaactaggtagaaccttagcacttagcattagagaatgactaagtagatactctggttcctataaactaagctctgattcaacatacaaaagaaacagttcaaaccgagaagcacgcttgtgtaagaacttaacaccatcaattcaatgttctatagttaatacaaatcttcacaatgcaaacagttatactcacctttaactgggaagacatttcagagctcccatgatgccacagcaaaacaccaattccagctgtgttaccaaactcggtgttattctaaggcacattaccaaattttttgagatgtggtcaaatggaaagctcattcaaagctatagaaacagtagagaactccaaggacacacaagaaacaagctgctctaaatcaagtcaaaaacttgacatgtgcaggtcaagacttgttgatacttattagtacaaaacaaaacaagttgctcttttggattcaggtagatgcctagctaagttaaacaagaaaacaacttttgcttaattcgttctttagttataaagctaccaattcatagattcatcccttttcacttttcagtatatataaaagaaaaagcagataggtggcattcaaatatttggtaccccatagatttttgttgggcgtaagtgttgaccgttcagcttgctcttaaattacctgcaagaggaataaggattaagcagatataatatgtggtaatcaagataagccgttatgtacatatgcatagtgatgtgtgatcatactctcacaaggtcaaaatcttaagaggaattacgtgcatggaaaaattccacaaaaccgcgaaacatagcgagaaccaataaaaacgagtctgattaagagaaaatggaaaatacggattcaaacatagtgaaagcgtttgtgtgtccatgaggaacactgtttaagttttacaaatgaaaacgttcccaaaagtttaaaacagaaacgatagttgttaaatcagaacagtgtatttgggatatcataaaaagagttgagaaaacaagtaggggaaaactaaaacttcttgaaaggtttgaagagtcatgtattttgaagacacgaaagagtaacatttcatccaaaaactaaacaactccatttgcatcagctccttaataacttcagaagattcaccaggccaattttaaaaagtactgtattggaatatctgcacaatgaattaagaaattaagagaagacttttataaactgatgcaaaacctaacacccttcagaaacacaacaaagtcacaggaactttgaaaacaaaatgatcttgcaacgcaaaaagtttaacataatggagtaaccatgaaaaggtcaaaatacagcaagtccatgtcttgaaatacacaagggaaccaagcgaactacaaaaaaagtcttctgatacagaacatcaatgaaatagatgaaaagaagctgaaaataattacctgagtggctaatctaacgacccatgtaaggaccaccatacccagcaccatgctgccctcttcccgcaccgccctgaccaggttgctgagtctgataaccgccctggtacccggcttgagcaccgtacccaggatagaccccaggtgagatatttgcttgagtaccatagccacttggcattccacctacagctcctgggctagctgtccctaatgtccccaacaaagcctgcccaaatgcttggtttaaacccaacccagcaccctgagatgccagcaaagctgtgagggcctggccaatggccggattaaacgcctgcacagcttggttattaccagctatgaaatgtccatggcctccaggggcaccataaccattgttgtcgttcctttggtaacgggaattttgattgtgagagttatggttatgttgatgttgcttaacctgttttggcccatcatttgctttgtggcaatgcaagacatggccttcaaaagtcttgtgtggctcctccaatgccttcttggcactttctagggatctatagacaaacaaagcgaaacctttaggtctcccagtagctttatcaagccccaaaggaccttcttctatctccccaaaccttgagaaaaactccagcaacttctgcggatcaatgtctgcactaacgttactgacataaatcttcctctgaacattctcaggattgaaatgctgagcaggagccacaacagggttcccctgaacaggtcctatagacgccagctggcacgcagtcatacgagttccaatcttcttctgaggctgcttaagagcgttacgagcaccagaccttgacttaaagaggataaagccataacctttagattgcccagataccttatcaaccacacatttgcaatcttcaatctctccgtactgtttaaaagcgtcgataagtgaatcagctttagtatcccatccaagcccgtgaacgaagatcttacgatgaacaagatcttcatccgccacaatccggattcgattagctacatcgcgatgtctctctgcagcttccttgagaagaatcaaaagttgatcctttgaaaacggttccaatagatcctcaataggttcttcttcgtcatcatcctcatttccttgattcccagatccggacgacgtctccgcttctatgttatcttcacctttagcttcctcttcgtgcatctcctttagtgtgtcttgctctactacttgttcgtcgtcgtctctttgattatcaacatttctgatttccggatcctctttttcacattgctgctgctgcttctccgtcggctctgacgtttcgttggattcagattcgagctttctcttctttgtcataacggaattggcggttttaatggttgatttgaagagagccctctagggttttgtgatttctggttcttctccaaaaaaattgattttttgatcctcttcgcttgaaattgtgaagcttaacgattcgcggaagcgtgaagacaattcttgtcttattgagaaacaaaaaaaaatatataacaagaagacgcctattgggccttgaattattatgtcacatggacttttgaggcccatatagaatgtaccatgacttttgggttcatctccaattgaccagtcttgcattagcttagcccaaaaagatatactaatattaattatttctaattattccatcaattattatccatttatctcattattatatggtaaaataatagattcctcacaaattttaccatttacaatgaaatataaaataaataaaaaaagaataatgagaaaagtttccaataaaagatataaaatataattaatttctaattattccatcaattattatttatctcattattttggtagacatgcacccaatatatcctactaaattatggccaacaaatttccggcgacgtgacataaagaaaaacaatttcaaaacaaacagaataggactaaaatcgatgataccaaatccactactctttagcgacaataatgctaaagaaataaaactctaataaaaataagaccacggaaaaaaagatataaaatatttatttgtagtttgaaggaatattggagtagaaaactcttttaactctttatttcgttcagatggtgatttgtgttttccagaaggaacacatgatgatgatatataaatcgccataaaacagcaaagagacaaacgaatagcagtcaccagagctacctctttaacgcttaaaggcctctcctttaaaatctcccggataattcttccaagtataaacccgtcgactcattcattcacgggtttcgtttctttcttctggaaaaggtgacaacttttttctgttttttttttataataaaaggtgacaactttctcttccattgatgtgtaaacgaatagtcgaatacgaattcgtttctcttaatgtattagggaatcgatttctcttgctttttatgaaaccggatatttcaggctgcgaatagattattttaacaatggtgttgatatgtgaatgtcgaaaccagattttgtgtaacgttttcgattttgttgcttttaatggaagaatctgaatcctgagggtgtgatttgggttttgggggaatattcactttgtggggtctttttgtttgtgaatctagtatattgaattattgtcggaattagaaatcttttttaattctctaggattcgttttctactctttcaaatgtggtcattctagtgtaaatgtttttccttttcgtcttctaacacttttttctagtttgcacaatcaaaaagacgttacctttgctcattaagggacttgtttgatttttgggtttaacaggtttttggctgtgaagaagatgtttctccacagcagttttagagatggattgtcattgtctcttggtatcatcagtgttatcagttggggtgttgctgagatacctcagattatgactaattacagtgagaaatccactgaaggtctctctattaccttcttaacaacgtggatgattgggtaagatgatcataagaagaagacaaatgcttttactttttacttgttcctagggtgaactgacttttggttttgatgagaaatggcaaaattttgaattggtttgtcgtgtagggatatcttcaatcttcttggctgcttgatggaaccagctactgtgagtgaatcttcagaaccctagtttcctcgatcttgttatcttaccttgagtagcttagctaactctgaatttcttaaatccttttgcagcttccaacacaattctacatggcactggtaaattacaaaagactagaagcagctgtgtgtttacattgtttgatatgtggaaattgtttgcagttgtatacagtgactacatcagttctctatgttcaatctatatattacggccatatctacccgcggttgaaaaacagaagagatcagatggtatatactattggatagtattcttccttattcttaaagactgttcattttgcgtgtatgctaaaacagcttgagtgtgaatgtttggtgtaggttgaagcagaacgtatatcaaacataatcagcgatgttaaaattccgggcagatggagaaatagctctgatactactacttgtggtggtcaaaccacacctatcactatgattcctgggagtcaacgaactagttttaccggaagagaactattttacacgtaatggtgccatttagattctgtactcaggctatactagcattatgatgaaatcaattcttttcaagcgagagatttgtttaaaggttgtgtgtgtgttttcgcgtttttgttttgtcaggtcggcaagatctttgtcgagtagtcatacaccaccagctggatctgtcttagctcagagaatggctcgtggttacagtgaaccaactcttgaagagcccttgcttcctgaggatgtcacgcatccttccaccaaatcattgctttgcgtggttagccttgtccacaatgccttgtttggatttcacaatataaagcagtttcattatgatctaaaatttgattgttctcttacaggtctcggtgttcttgtttcttggaacattcaaccttcccaatttgctaagtgaatcaagaactatggctttgggtgagggagatagagtatttgtagttcgagcagcaagaaagcttttgcaggtactcataagtcgcacattatcatatatgcatgtcgagtctacggtcttcagtgaatcactcacgctcttttttgtcaaaggaatttctggttactttttcttaatctataaaacaacttcatgttaatggaagttgtgaatactattggttctatttcaggtcactagcagcaacgtagcagaacatagcggtggagaaagcagcagaattggaatgtttttgggttgggcaatggcagccatatacatgggtggaaggcttccccaaatatgtctcaatgtaagctttttaattgtctataactagtttattctttcgatctatcatttatagcagttttagctaaagcaaagttccttttcgatatctctttttttggcagatgaggagagggcatgttgaggtaagcaagttaaatgacacgacgcaaagatacagtcaagtaacagttttgtatctgatgaatccatttgctgttcttcttttgtaactgcagggattgaatccattgatgttcttctttgcattagttggcaatatgacttatgttgcaaggtgaagatcaacaatagttatactcaactctctaaataacctctggtggaaccttcttaactctcttttttgtatgttttggttgcagcatactcgtgaacagtgtcgaatggttaaaacttgcaccgaatctaccatggcttgttgatgcaggaggatgtgttgtgcttgattttcttgtatacgatctctctcttcaagttccatgatctttgattcctttcactgagctctaactttactcatatataatctctttctttcagattctgcttcagtttttccacttccgctgtcgcaaagacaaagatactgacaagaagaagcatgaaaccgcagaagctgtctaaggcttgtgactacttcaacaaggcgtcaaagagatacaattttgatttgatctgaccagcaagattcatctcattctaattagttctttctttaatcggattgagttttcaatttttgtgctgatgaaactactcttggattttgagttttaataatataaagttgtttcaactccttagatatgaatgacttgccccaaatcttgtttgttttcttcacagagaaaaatttcacaacaacaataatatcactcacatcaacttgtttatcactataattttgtattctgtatagagatttagttacatgaagagagggctctctagggcttgcgagcagtaaacatgataaaagaatcctgaatataatcttcataatctgtgagaccacatgatgtgcacacatccttgatctcatcctgcatcaagtaattgtagctctgcagaattctctgcaaaaatgcaaaatgtataaagatcaaaatctatgcatagaaatagccacttttgatcattataaattttctttaccgattggaaaggacgaataatccaaggagtcgaaggactgtatctgagaaacgttgtcccgacaaacacacctccgcttcttagaacacgacagatctcagcaatcttgaaaacaacaacacaaagacaaatttaacaagtgaccatttgcatacactcatgaagctctgacatattcaagaacttacagcatttgtaggagaaggccaacagtgcaaggctgcaccagcatgaaccgcgtcaacagaacccgaagggaaagggaggcgagaaacgtctgctctcacaacagctatattagttgagttgtcgaaagtattatcatttttaatgaattctttgcactgacgaagcatgttttcagagtagtctaaagcaatcacgccagagtatttgccagactgcgcaaatttgcgggaaaacaaaccgcttccgcaactaacatccacaagaagcccaccttctgcttctttgaagtattcctcagccattctaaactgcatttcaaagtatcagaccattagcaaagagcaacatcgacaaatgaaagaccaaagatgtaagtacctcttcatctggaccgggaaacccgcttcgcttaaaggcttgacgccaacctctttcatacaaaaatgatactaatggactcctacacacacaccaaaaaaaaaagaagaagctcacatgacacttaagctaagagagcagtgatggttagtattgataaaatcatgtaaattgtaccgaaagagctcggtagtaatgggtttgacttcattataatcatccaaatcagcagtgacagtaagatccaagtattcatctttgctagaatatgtcttgttacattgtccacacttgaatccagacctgtagattgcttgtctgcagcagattcacaaaaatgctttagagaaataagaaaaagggcaaaactttgaaatcattttacaatctgaggaagtaagtaaagaacttacaggttgatacctgaaggtcctttcctcataagtggttcgtagcaaacaggacacgcgaacacttgagtttcctctatttcgatctttggagtttcatttttatttatgtcctgaaaataccattgtacaaggtttacatacatatacaaagcttgtaaatcaaatcaagtgaattaacaaaaaagcagaacgcaccgatttgggagcaacggcgcttatggctgcggatggaaaacgagaacgaacagaggtagaagcagagaatcggagaagaggagattgtgaatcagaggagaagaaggaagagcggttaggtaagaaaggtttgttgaggagagtaatagcagaagaagaagatgttagagccgccatcgccatttgagcagagaaatggagcttaaaaatcaacgagcacagagagatgttttggctcaatttatacgaaatctcgttgctcagacaaattgtgcgtttcttgtaacagagtctggagcaataaatgtgttgtccgaattttgagctatgttttaagccggaataaaagacgcacacttctcgttttcaccattcactttttcatctattttttaaaggtatattattacttggttaaacaggatccacatgatcgagtggattctttgctcacaagtcacaacgttgtacttgtaccttatgattcttctaggcctaactaaattgttgctacgtgacaaatatgttttgaatatggatcgcaaaagcatcaaaagcctggttttggagattgttgaagaccgttgcttgctactgagtaattatatgtatacatactttgaatctggtgttaaaaaaaattcacatgaagaagtatggtttgtttgtattcactaaaaagtaaacaaactactctccttgatctcatatatggagaaagcaacagacaaagcacaagaagacacggtaaccaacttataagatgagggaagctctcactcaatctgcgtctccaagaccatcacttccatcgcctctctttgtaatttctgtgaactgagagtttggtttcttcttctgtgatgatgccacctctgcgtttctcctcagaacagctccaggtgatggatatggtcgttgttgaaacagaggaccctgaaacacgatttgatctcgtttagttagaacctcaattttttcatctggtttagtgaggtcggttatttggaatttaaagaagatcccagtctgaaaaggtaaatgccattaccgaagcagttgtatcagcggctcgcggttgtactcctttcagtccaacaaccctacaagatgagaagcaatcagatcaacctgatattatgattcctatgagcataattagcttggttgttaaccaaaaaagaacttggttctcctcaattcagatgacatagcagagagagatagagaacagtattataggtcatgccgtttcatgaagtggttaaaatgggtgttatggacattaccagcctccccgtggagcatctgagtaagagctcgggtccattggatccaactcatcatcttcggcatgagcacgctttttgcctattacttttttcatgggaggttttgaactggacctgtttcaaccattttcatttttccatcatgtgtaaagaatataccacaagagtaagtacaatgtaaacatagtcaatgggaacctcctggttcactactacatgtaatgtgttccatcttcattttactgctgataaatggaatgctttttaacagaaattatgtccctccgaaaagaggggcaacatttgtatccaaatgggttgtctaaatatctggtaacagatgttaagaagatgaccagagtccaccaatagctctcttatggaacactatgtattttagaaagatgacgggcatagaagaatattttttctaaatctaagattttgagagatgcgtacctctgattcggatccttttggccagaatcgcctgcatttgtgaaatggtttaaatgtgctggcaagaattgcttttctgggagattgaaaaccctgaatcccatataatatgagtcccgttaaccaaaggcagaggggcttaagcctcaaaatatgcaagtaaacaaagtgtatttaaggtcttgatgcacactaataaatgcttcctataacacaaatctgagccagtaataaaaagggagtcatggtagaggactagaggtatatacattattaacagtcttcaaccgaagcagtctctatgcagcaatctaactcaaaaagcataacaagaaatggaagggttcctacctggtacaatgaacacaataaccccatctctggacaaggcccactccccagcccccacatccgctgcatcttggcagctgagatggaggatgctcccccttcccattagccgtactttgggtaacagcgttgttagagtttgtggcagcgggcttctgtaaagaagctggaggttcccactgagacacatgtgtccttgtattgtagaaatacttatggcctgtgcataggaatcaaaaggttcagagttcaaagatgcaaccaacagatccaaagattaagcaagcattgcgtgtacagtacaacagaaatcagaagaagctggtcaataagaggcaaaaacttccagcagaaaacacaaggatttcctcattcttatttctaacatgtgatgatgtaagtttctttccaagatgaaaaagatcataagctattaaattcattttgctaacagcataataccacaataagaaaaggagaaagatatcatacttttataatctttgatatgaatattgtagcaacgagctagtcattatgatgactaaatgtgtgaaaatcataccagatgcttcatcaaatgtttcaatccactcttctttagaaagtacaggtggtgcacttgaagtggcataagaaagctcaacaggcctttcccactggcatgttccagtgtgctggttatagtaataggtagcaccactggcaggatcttttgcatctacctgaatgaaacagaacaaatttaagtggtataacaactataaacacatcatcagaaccataagtggtcatccttaaggattgagatctaaagactatttgtgtatgaccacattatcacatgcatttggagaatctcaaacgattaccgcactttcacagcagaaaatattgctgcaccagatagtaaagcaaagacaaaaatgaagaagaaaagacttttaagtgtatctcattcatacccatcctaatggtaaggtgcttgcattagcctgaaaaggtaaagttgcctgtctattccaactaaccgctgatgtctggaaaagagaagaaacacaagcaaacaaaaacgtcaaaaggttaacaaatattaataagataaactgaaacaaaggggctgaaatatggacaagtcattgcagacatatgtcaccctggattacagtctgagggatgaataattacatcttctgggttggatgtaacagcccctgcaccatctctgagaattcccctggcctttaatttttgtttgagatattcaggcaaattgtttgaagcattggtaggttcaggcttcccactgagctcggagtgacccgcgtatgcaactccacccggtataccataaccgtttccaacatccacattacctagaacggaataaagtcgataattggatcagtttcctgaattttcctaaatgactgagctcgtaagctattatgactaaccttctccgcatgtactcacactcccaccacgctttgccgctgcttctgctctatgatttgcagtgaactttagcaaatgttcctgcataaagataatatgtatcaaaacttcatgtgattataggacttattaagccaatagccgcttgatgataaacaaaaaaaatagtgaatcagaacctttagagcattggggtcagcacgatctcgaagaatatcagtgttatgcttagagtctccggctactgaagtcccagcttctctgaaaataggagaacgtttccaattaaacacaaattgttagacaaagcacctaaacacacgaaatttctcattgcccaagaatgagaaacagcaagatgatcaatacaagcattaagcatatataacagatggatataaagaacaaaccaagagaaagacagaacctttgaccttgtataatcttctgcgtttctatttcctgaaaacacacaaaaccaaatcaacatggtaaccattggcaaagtccgggaatggaatttagaagcttatattgaagaagaagaagacaaaaaaaagtgtacttgttctcggagaagagcagtgtttgcggcagattcaatgtcttgagattgatcgtaagcaagcgaacttccataaccataattagatgtcacagatgaaccattctgctgatattgcagctcttctcccattatttagttcagcgtcaacctccgaatcctttagactgagggagcttcaacgtcgtaatttacttccgattaccaatcaaaatcaacaaaccagtacgatgtcgatgtgagtcacagagagaatcggaatccgagccctagataatttctgcgataagcaattaggcccataaggcccaagcccatatattaactggctggtcaagtagagatcataaaccgaagaaataaaaatggaagctaaagtttggctctatcttggtttataagattattgtggaaagtttgaaataatggattgttaacagacatcatgtggggataaatttacaagactattgtggaaagtttgaagtaatggattgttaacaaacgtcaagttgtgatctttacttaattatatgtaaactaaatgataaaacaatgtatttttacttttcggattaagagatcaaatgaagaagctatagagccgaagcaaggcagtaggaagaaacatgggagacaagagaggagtgtcagagtcagtaatgtattggaaataaagtaatgagagaaaagctttcggtgaaaagaagaaagaagaagacacacacacacgaccgcttcttccttcatcacatgcttccgttcggtctcgtcatcataccatcatcattacatcgtataaaaatgctcacgtcaccgttggcggcttttgactttgttcttcttctataagaataaagacattttctttatttattttttctgactaatctgagtctttaagaccacaaattatagaaatttccaacaaattcttatatacgtaccagatatgtctttttaaagaatgaacaagtgaagctcatgagagtcgtctcgtcaatgtataatgttaatgtgctaaagttgatatcacgaaaatactaaaatgcaaaagaaacgtcgcggaaaccaatctgattaattatttcacctgtcttttatatttttgaatcttttatatatatataagaattggtattgtttttttgcattttgtaaacgacgacgactcgtacaaatcagtaatcgtaataaacggtgtgaccgtgtgagtcaacagttgacatcttagatcttgtgtgctgagtgcgagtggtacatgtatgcgttgtgaactttttaaaatgttatatgacaggtgaaattcaagaatcatttttttggtatgctggtacatttattcagttggatgttttgcaacttgaagaaagtatatatgggcttgtaaaaactatgtttttgatgtgctacttaagcgtcgttcgaccatagcagacttattttgctattatcgtggcattataaagacgtaaactgttaaaatatcatcttcataagaaaaataattaaatcattgtaatatatagaaaactattgtgtgcactacatttatctagttttacttgtcgattaaactagaaatccattttattgaaaacatttttcttgtatgcagttgagagtggtgaaacaacttgtaaaaaaaactatttcaacagtctttatgattactttgaatggcgttcatcttcactctataactgtataatcatattaacgcgttgaaaaaaactcatttaacacagttagttcttttgggcttacctggaattttgaatatatatatatatattcgtgttatttaaacaagcaaacaaaaataaacaatattcaaaattttcttttacttttctccataaaaaggatgaaaatatcattgtcataaaaggataaaatatacatataaacgcatttttgttgtctttaaaataaagttataatcaattttgacatttgttttgtttgacccttcacataagccaattcattgcatataatttgaagttttgaactcctaaacatagttattaattttggtttgtattaaaaattatagctcaaacttgtacttacttaacaccatgtaaaacttagagtaagcgtcttatctaaatgaaaaaaaaaatagaatacgcaaatcaccttcatatattgtttaaaatatttgttaaagccactatgagtatgatatacagaaagatataggagggtacaaaagaaagaccgaagctgaaaacgaccgattctatttctctaactcttttggtcccactgagagcaacaagcgtttaagtaagtaaacatcagccgttggatattgaccttcctcatttttctttttctttttggggctaatttgcatgtctcaccgcgtagaaaggatgtatctaaaagttgaagatattcttattggatcaatcaatattgcaaaggagattgtctgaatattggatatacgcaataaaaaaaaatttctttcgcttgttacagagtacatacatactatccacatgttatccattcgattttgtataagtctgacataattcatctttaacaaaaaaaaaaaaaatctgtgacataattcaataatctaatttgttttatgataatctctcactcgttagctgaataaaagttccgtacgagtaagctgtgacacgtgtccctttcaatctccgctcaacgcggtttccatcgcttctcgccgtccttatataaacttcctcggccccatttttcatttctcacctctctctttctttctctaacttcttcttcttctcctttcagaaacccagcgaccatcttcttcaccggttatggtgacttcggagggattagcaagcgttgattcttggttatatcgccaaggtttcaacgttgattcatggttgctttctgataccttctctcacgacaacgatttgctcgcaagagctctccataccaccgtcacagcccctcatactctcactccttcctctgctttcttcgattcctccgctgtttctcacccttcttccactaacacactctcctctaccgtctccggtgcttctgatccagaaatcatcggcggaggagctaaacggaaacgtaactgccttcttaccgacggtaaagccgccaagcgccgcgctcgtgcttccaagaaatctcagactactttcataacggcggatccgtccaactttcgtcagatggttcagcaagtgactggcgccaagtacatcgatgactcttcttcctttggtattttcgatccgattgtcaagccggagccgcttaggttcgttaacaaactgccttgtggtccttcggatcgatccacggcggttccaatgctcgacacatcagcatttttgtctaatcatcaccaggagaatctcgcagtgggaaatgctttctccggtaacagcagcagtgtaggattaccgtcggggaagccaagtgcaacggccgaccccggtggttctgccgtggagtttgataattacccaacatttccaacgcttgaatcgtggaaggttatgtgatctgtttctttcagtcttagacgtaatctttaactttttaggtttgttttctttgcatcccttcatgaataatcttgttcatagtttttgtttatcgatgtaatggatcaaatctgagttcttttgactttaaaactatttagaggataagtcacaaatctatctattaaaaatattcagctaatcgaatgagataatacaaaattctaagttggggttagttggtaaaggaaactgaagctaaagttgataatgcgcattagcgttggagtcttctcaccgttgaaaatagagaagaactatataataatcataatatattttttaagggaggagggtaaatatcatgtcagcatcttttctattaagacaatcaaatacgttacgaccactaatacaataatgtctccattactgatacaaagccaaaataagtttttgttttattacaacatcccatctctgcttgcccattatgcattcaaatacaattgcgtgtactaggacttctctcataatcgattattatctggagagatgaatatttgttacaagaacataaaaacctatctattacacttcatgataaattagggttttcaacttctcatggttcatttttgataaatttacttacattttcacatctcctgtctaagagagtgaaatctataaaagtccctagcaatgacccacacaaacccaccaggcccacagaagcagcttaaaaagtcaaagtctttagaagtacctttgattcttctctttcacccttcatctttatgtgactttgatttctcgattgattccattgcttcttcgaatgatttctgataatatgcaaaagtcgtatcagttattagctgtggtgtaaatacagatgaaggaaacccaatcaggaagaggcgaatatccatgtagcatgtaaacaaacagagatgcacatgcttttgtttttcctattaacggaaattggaaaccaaccattaataatttaatatcctcagcaataagtatgctcattttactctacggttatagaatcctacacatgtgaggttttctaacaagatactttttctctatcctactgatgtggaaacaaagatcattgcttcaaaatacacattttgcatctataacttcttgcaaaccctaccatgagtcaaaaatgttctcatagacggttctatattttacaaagagcatataggttactgatcattctcagtagtcaatgacctgcaacaccaatcttatacactagtcattagtcaatgttttgaagtttgaacatattctcctttgtcacacttctaaagctatctagtgtgcatatatgtggacaccattagctgctacaatttttggaattcattctagctacacctatggcgacacgaataagaggtgcagagatataatcatcaagcgcatttagttcacaagaagttcaatttgataaatttgagaactcatacactaaaatgcatccatcaacaggaaaaaaaccccagttaaaaacaccaatgtatgtatatcacaggataaaaaaaggcaagaatgcaagattatcaacacagccaatagcttaacacgatcattgatggaaaatatgatactcacccctgagttacgcattttccatagtgtttctccgcttgtatcaatcgcagtaaacgcaaagtacagaccactggaatatcaaagataagagaaccactttagtaaggatacaacactgagcagataaaagccccataaacaagaccataactaagaagcagccaaaaaactaatcacgaacgctgtgaaatatgaatccgcaatcaacagtaagccaattcaccaattacagcaaaaatactcagataccaatctattatctaacaataggctaagcaagaagttgtcacatacccagctaatgcgagattcaatagaaacgctcgcgtagtcaaataacgaaacgtcgaatcaaacccgctgctgaagctagaggcctgacgattcctcgtagagtaaccataaccataaccgtaaccagaaccttgcgctctgccaccacgatttccatacggattactatacgaaccgctcgtacggcgaaagcaatcagaatcgctaccagcgttataagacgcgcgtttcagatcatcattcaaaacttcgtacgcctccgatacaagcttaaaccgcacggtggcgttatgacgaacatgctccggagactgagcgtgcttatccggatgatacttaatcgccaatctcctaaacgcatctttaacctccttcttcgtcgcgtttctcgtaacgcctagaacttggtaatgatccaccatcggaaaaaatttcaaccgatcaaacctaaatcggaatcgcaaacacctgaaattgagatccgcgactgcttctgtgtataacgatgcatatagaaaaattggtgtatgaaaatctgagctcgtgttggtaacattgaaaatgaaattggaatagtaaaaagaatcgctctctgttattattggagaaagaagaatgagacttcgtggcgcttcaatggccgcttcctccaagacgaaacacctctcaattacaattacttgtttagtaatgttaagtagatattgagctgggccgcggcccaataatgtgttacataataatttgtgttattggactgacttcctatttattttacattccttaagttgtatttcgatttgattttagattttgttcaaatttttcagaaactattgcccaaattgatttatatatttcgttctggatatgatgtaaccaatacattattttagttttggaggaggaatacgacaacaacattgatcaagagtataagcataacacgagccaccagcataaccacgaattaaacaaaagttaaggcagtcgcgacttgttccagaactacataactttgttccttcttgtccttggatgcatagacgatcctcctgctttatcccataacctagtggttgataaaaattattaacacaatgtagtatgtacattaattaaaaacaaaacaaaaccttgttcataatggggatataagaagaagaaaaaaacaatttatacctggagtactagcagttgtcatacgacaatgaacagaagatacgatgacaaggacagtgaaaagaaatgcaattaaacttgtcatgttgattgcccttttttatgataatctcttaacctgtttttattttaaatgtttcttctttgtttagactgatcatacttatagtgtgacacaaactatttatattggggtatgtatactgtatacaccaacgaagatcgagggagtatctatttgcttaattttttttaacctatagttacgtgtatacattggtgatatggtttttttttctggcaaataatatggtatatattcttttatgtatagtagaatatgatttgttttcctgatatatttagaagggtgtattcaagaattttgtacctgattataaacattggcgatatagtagttaaatatgtgatttgttttccccgtatacagtacttagaaggtgtattcaaattcttgaaaaagaacataatcatatgtcattcaactagggattttagaatatcttctaaatccgatgttatgaaactagttgtttggaaaactgatttaaaatacactgttgttggatagaaatatttcaaattttaagcattaaatctttaatgattttaaaagattttagatgaaaaaaacaaatcttttggttttattaagtaggatttactggtttagggagactttacaacaaatcataacaatttttctacaatcaactattttaaaatcattaaattgtttgtcgacttgatttgagatttctttcgaattgcaaaagctattgtttatattaatcaaagtaatttcgatattatatttatttatctcgttcaaagtattatgtatcagacaatgaaggtaattatgatacgtctatagcaagcttatgccaagacattcatatctgggtgggcaaaacgtaaatttgggtgtctataatgtaatttcaactctgtatgtgtctttttctttccatcaattctgattgtgtctatcctctgggataattgaacaattgtactatgactttaatcatttttaatcaatatatctcaatttcgacgtaaaaataataataacagatgtataggacaatcaaaacatttgataaatattgatacgttaatttccaagcagataccaaatagtaaattggtttatttttttgcttatacttgtatttaaatttgacaacagcatacaccagaaaaacatgtgccaaaagaaaaatcaagatctctacaatacatacggcagtcgccttctccgccacgacataaatatggtgcatgctcgaagcattgtctatcctgctgctttattccaaaacctatttattgataaaaatgattattaaaacaaaacgataattataaaatgtgggtacaaggataaaccaatacctggactagttgttgttgtcatacgacaatgaacagaagagatgatgaggaggacagtgaaaacatatgcaattaaagttttcatggtgattgccattttcataataatctcttacttctttcttttttttgtttcttctttgtgtagattgattatatatatatatatagtgtgtattggagtatgtgtatcacgacaaatccctatgattaattggggtgattaggaaatcgtcatcatgatgttgtagttactataggatcaattagttttgcaaagtagacatgatcttgtcatataaaaggaaaggggtataagttatttcccgtaaaaaagtgaaattttctggtcaaagttagaaaaaaccatacatttttctatatcaacacgttgaccaattttttatattaaaataaatagctaataaacaatgtcattaaacaagttttcacgatttaatgagttgtatattgccccttgaatcaatgtgtactgttttttatatctctgttaagctgtagttaattttcaattattctttttactattttattatacggttaaaatctttcttacaattatatgtataaaaaactctttccgtttagattatattgtaaaatcaaccaatgctaaatttgttttctcttataatacaatttgtatggtattgagagatcaaattatcgttggttttgataactgggtgtattgtttttttacaatttagactctcttctaatttgtcaaggaatttgttgtggataaggaattagtaattacgaataattttttttgtatttaatgagattttagaggattacattagttaaaacatacaaactctaaatctgaacaattcataataacatttctaaaatcattaatcaaagtaatttcggtttgatttgagattttgttcattaattaatgatttgagattttgttcatttcttcttcttcttcttcttcttcttcttcttcttcttcttcttcttcttcttctttgtttagactgattatatagtgtgaaggctactgggatatgtgtatcacgacaaatccctatgattcttcattatgttgtaataggatcatatcaagtaggcatgatcttgtaatataaaggggtaagttctttcttgtaaaaggtaaattttctggtcaaagttagaataaagaacataattctcctatacaaacagatgttgaccacaaatatatattttcttcttttttacccaaaattaataagatataatttattaagtcatcaccatctctgctaagatgcatttcgaaattttcacctaattattccattatatatagtcaaacactgataaatctagccaacggatcaacatctcacagttctattgccaacctttaagaggatatacatttttgggcttcaaaattttcaaatattcattttagctttgttcgtagacggggaaataagttagcacatgacttggccaagtttggttgtatttctacatgcttttattctgatactggtactttacctttttgacttgagtaacaactttgtaatgactctgtttaagtaatgaataacgtttgtcggaaaaaaaaaaaaaaagtatagtcaaatatgtgatatcccatatgtagttagatttttatttcgaatatactaaactcactccacaaaaactgttatgttgtttaaaacttaaaaattatgtttgttttgaaacgagtgtcggagtgtgttaaacttttttaatgtgatttttagaaatcagacttttagtttatgttatactggtcatcttttgctacttttgctaatgcttctcgatttataattatcttctttaatggggctcttactcatgatttatatatatatatatatttttagtttacttttgactatatcagtgtacttatactcaaaagaaaaacacaagttgacaaaaaagaaacaaataacgatttcttacctaatttcgtttgaactaataagctggtctgtatattcttattaattcttggttatgtatgtaatatgcaaattctaatggttttagctcataaatattgtgtttgaccaaaaaaaaaaaagaaaaaaaaaaaagctcatggtcaatgcaacgttacaaagtgcaaaaccattttgaaccttggtttcggttgttgattgttgaaacagaaaatggcgcgtgcgggagaagcaatgaaattagggtttttggaaagttgctaaaaatcaggagaaaaagttagaaaattgctgtgatggtgagatttgctatgttaaggatgttccagagagaatggatattggtgttgacgaacttccaatggcggaggtaaaagctttaaggggaagaaagagaaactattctttgaaacaaaccttaattagcaagacagagagagagagagagagagagagagagagagagagagagagagagagagagagagagagagagagagagagagagagagagagagagagagagagagagagagagagagagagggaagagtggagccaaagaggatagagattttgcgacgaggaggaagaaacgagccaaaagcccggcggcagcgatttgaaatctccggtttcgttcgctggctgcgacaacgacgacacacaaaccaggcaatggagattacgctttgggcgtttcgtcgttgagtctgaggcttgaggaagaagaaggtggtgatggggaggaagaaaagctgtcatgtccataatgctccttccgatgacgatataatgttttctcaagatcataaacccaagagaatctaccaactctggcccggcaacaatgtatgccttttcttttgccaatgcaagtttttctcttgtttttgaattttacagacaaaaagaaagcgtttttgtaatgcgtgacataataacttgccttgcaaaccacgcatcatggcctgaattagatttgaacaattgaaagctgagattatgttctgcaatgtctgaactagcttgacttgttttgttcgttcagagattttattgtggagggagactagtctttggtccagatgcatcgtctctccttctgacaacagctatgattggaggtcctgctctcactttctgcatacgaatggtttttttgatcggaaaacgctatcctttgttccactctcttatattgttgggtgcacttttgctcactgtcctggtaaaaccctaaaaacatgtttctttctttctgagatttcgttgccctttctgcatcatattcatgcttcttccttacaggattttacatttctcttcttaacatcatcgagagaccccgggattatccctagaaacaaagaagcacctgaagcagaagggcttgatatgatcactcaatcctcagagtgggtaaacaacaaactcggtaatacaaagatacctcgaacgaaggatatattggtgaatggctacactgtcaaagttaaattttgtgatacatgtttgctttaccgtcctcctcgcgcctctcactgttcaatctgtaacaactgtgttcaaaggtttgatcatcattgtccatgggttggccaatgcatagccttagtaagtcttccaaaacgtttatttttgaatctcatgcaacaaaaactgtgattaacataatagctctttgcagcgaaactatccatacttcatctgtttcatatcaacttcaacactcctctgcttgtacgtctttgtcttctcatgggtcagtatgcttgaggtacacggcaagatgttgttaatggtcatcacaaacgacttagtatttgttgttctcatcctctactgcttcgtcgttgtctggtttgtcggcgggctcactgttttccatctctacctcatctgcaccaatcaggcaagatccttaacctttatttgactattgctgctctgttttgtgctataactttgcaaatttttgactcttttgttactattttgcagacaacttatgagaatttccggtatcggtatgacaagaaagaaaacccttatggaaagggtctcttcaagaacctatatgagttgttctttgccagaattccacctcccatgatcaacttcagagactgggctccagaggaacctgacgaggaggttggatccattgcatctgagctagaccgaacttttggaccccgaggagataaatatgatatggaaatggaaattggcggttgcaaaaacagtaaggtcggtttacaactccatacactggagtatgacaacaacaacagcagcgaagaaactgtcaagaagaaaggtgtaagcgaagaaaccgccgcgttttacatcccggggattcaagaacccgcgaatataacaagaaactcgagcattgatgtgagatcgaggtaggacaaccaaaaaaccccttggataagaacatagatctgttacagaatctttgcgcctgtgaacaatgcttgctgacttgtgtaaactatactctctttgtttctaaagcgattcactttttgtcttcaacgagtaaactttttcgactcagacaaaaaaaagatagcagaaagaatcaagtgtagtcattgtggcgtgagtttcttgcgttacagggttattcaaaacagtatcttcattgtccttcacccatttttggtttcctgagtacgtgaaataatataacggagccgagacaaaatcaatgttacatttaggttaagaaagcacagaaactaaaaaactcgttaagtttaacacaagtcaaaatgggaacaaaagctctcacctttacaataaaataatagagaatcactctcaagataacaataataatgaagaaaaaggaccagagcattaacagcgaagggaaaaacacagaatctaatccattccaaagatcctgtacaagaagagaacaaggtcccaaacttttcagacttggcaaaaccgaaggatacatctcatcgtgaggcttccagtctcggacaggttaagcagacagagagcacctgaaagaatgttcaaaagaaatcggatgtttatataagagcttagcctgaagattcaatttctttcccatggtcttctgaaagattcctcttcaatcttctcaaccaaatatcgtaatctaatggataaggtgtcccacatagactgtcaacatagtcagagaatgctttcaaaacggttgagatatcgccgagcttctgctgaatcaatcttttggaccaagaggtctctctccattgaagagctccttcaactgaatccaattcagggaagtctccagaacagaaataaagcatgtatatcaagctctctgcatctgaggcagcacagagtttcccttcctggagtgcgtaagtcgaggagaagtgaagattcattgcgggtcgatctctatcctcaagcaccgcgtgaccccaaccaattagtacaaagtaaggatgtcttacaccagaagtgacataaactacattttctgggcggatatcaccgtgtcgaattccagctgaagaggatgaagaaagtgcagataagcaatcgtggcaacatcgaatagcttcttctggaccaaaccgaccctcgttcaccaaatcagctactgtctcgccaacaggagtagtcacaagaatgggagttccacaccaaggatgatcacatcgtccacctgaacttggtttttgacattggcctggatgaatgatccgaccagacccatggagctgcggcaggtatttgctagagagtcctctctgtttcattatacttaatatcttagtctgtctctgaacctgataccataagttcatgtcttcccaagctggctcaagctgtgaaggaggagaaccaacatacagaaacacagacttccctgcatcatccactggcgatgcaatatgataaggaagtgtaccattagtcaatatttcgttaatctgataacctttttgatagtttgactcctccaaccatagaaccgatccaacttccagtttcatcgaaggttcaggctcgattttggttgattcttcttgaacttcgacaatttcaggagacatggtactctgctggaacctaaacataccattttcactgagactagtatctcccaactgcctctcctgtcgtcttgagtgaaggcgagaactatggtcagcagctaagtcttcaatggaatgtctgggtgccccaaagtactgcattatactatggtaagtggcaaacaccacttgcaaagcaccaatgtctccccagttggcatttcccagcttgttccatattctgtcaactggtgacactgctatcttagaatgcttctttatccaatctgctgcgcactcataaacattgttcaagtcaaaatccaatttatttacgtccccttcaacttttacaacacctccatactgcgaatcaactagaagaatgaagacacagtttgagctttgagaaaaatctaaacggctcacactccttgcgatgagtatacgaacagcatagaaaagagcctcgcctaagacaggtaaagaaggcagacgatcactatcctgtgcaaagcttcccaagagctaaagctctctcagcctgataaaacttaagattctgattgtataaacaaccaacagagaaaggaacaggctcttcctgactccaaaacgcctcccacaagctcttaacagtggcgtgtagaaaatcctcaatagctagataagccttagcctccagagcattagacgaagaagcgtaaacaggacttggcatccgagtaagctgctggaaagaaatcccttctaatgcataatcaaacttttgaagctcaaccaactcaaaaggaacatcaaagaccggtccttcgctcgccgagttttctaatgttgaagcaaaccaatcttcaagcttttcagtgaaatgtgcagagtcagtgaatctgctaaggaaatctctacgagtacgagatcgacttcctgatgaaacacttgacctctttgttgttgtaccagaccctatcgattccaggtctggagatttacctgtaagaacaaaaaaaactttaatcttctttgcataattgttactataatggttctaaagaagactactttagtctcatcagatctaaatcaggcaatgagcatgaacaagcaagatttcaaactgaagttagtggcaatctcaacattcaaatctccccttaattcgggtgtctcttaaaagtatgagattgaccaacgaaatcagatttagggtagagacaataatgctgacagtaagaagaaacacaagtgtgtattaatagattagtgaggaatccaattctgaagaagccaaatctagggttttctcagacggggaaaaaggaaatctgggaagagatatgaacaaagagcaacaaaccttccattacagaaaatgaaaaccccaatccgcaagcttcttctgctgatagtctttaccaattgcttcgtcttcgagttttcttctacgattcttctctccctaagcttgatgagtccaactcgctgacctgtgttcttacctttttttatataaataaattatttgggtagtttgtttggggaataaataaatatattttaattacaagacaggtcaaaagtacgaaacactaacaataacaattattaaaaaaccaataataaaattagtaggggccgatgaaagactgcggtcttcttagttcgttcttactgtatattcattcattcattctccaactttattgtaatatgaaattaggcattgaatcgtcgtttgcagaatctgaaacattttatgaataaatcccaatcatgttttctcattgttttaacatttcatttcatttgtaaaggaaaacattaacaccaaaatataaacaacattataaaatgattgagaatcatcaaatcatttgagatcctagttaaatactttagacaattttcagagattatgggcccagatcttacccaatgacggcccacttatgctccaaatttatggaattaattgtgcagcttctcctttacttgtcttgtcccacatcaggattcagctgatcaagatctccaactcgaactgatatttttttttcctaaccgaagatctttaaggtcatatttattgggtcaaagagatgatgtgatggcatttaaaggtttgtttgtaaacatatggaagagaattcttcatggatgttctttcatctggctttacaagaaattccatattcgtaatactctatatacatatatgtatcatacaatgatacaattgactatttttgttttgttgatataattattgttattgattaatgcaataatatgtttctactttcttagaaacaacaacaatgaattaaaaacaactatacagtctatacttactatattaatgagactagactacacaattcaccctttttccatacaatatatactacaaaacaaaacagaaacaatgaattctctgactatttatatgtctgtgaaactacacacattttattgtcactgatcgaggacataaacatggatttacactactctcgaaattggacccttaacaaataaagaaaaaagaaagccccgagcccatgcagttgtaataaaacatggccatcacatggttcatgaattatcttaatctttcccacaattaaaaagaaaaaaaagattccccgctttaaaaatcattctgcttttcgcaatgtattttcaagaattaaaaaagttttcaagttgttgttttaaaaagctaacattattagttcaaaaaggatagtgcataaaaaccttcttttgtgcttaactggccttaagtgaggttcccttatacaaatccataataatttggtgcaaaagaaatcagggggacagttcttgtctgctttcacttattgtcttcgtgacttcggaagaagattccttatctcaattttcttattttctaaagtatacgagatggtgctgaggggttggccactagacaattttagtctatttaaatttggccttctttctaaaattttaatgttatgaatggaaaaatatttaggttagaaaaccaagttgttttaaaagaaaaattaggtcaatttaccaagtcgacaagttgctagttcgcttattgaaaagtgactctccgatgatcagccgaccattcgaccatttaggattttgggttctagatttactttcactcaaaaataatgtataaaatatgctctatccataacactaaaaccaataaaaataaaactttatgctctattcatttggcatatataaagtttttgagaaattgatttaagtaaaaataaaaataatgttttgagaaattctaatcaaatatggtgtgcgagttcctagataaaattggaacgttgtttttcacatagaacggatagtttctttaacaaaaatcattttaattaaacaaagacaatttgaccttttttattgcgaatggatcattgtagttaaagaaatcaatttgacattttagctatcagatttagcttccttattcacatcacacgccgaacctaaatttggaatattaatcatttcacaacactctactacttgtacatagttcatacctaaaaaggtctctgatttatatgttatggcagcacaagtcccactctctgcccatacctttgtattataatatctgtatatgatagttcatttatacaattaaattttcatgcatctcgaaattttactgtaagttattttgcacaatttatgaaaaaccaatactacaaaatacctaaaacaaaatgtgtttaatttattttgaagcttgtgatatctaaaataagtaacaatatggatattacaaaaaataaaataaaaattattatagttcatactagtaagaaaaaaagaaaaatggaaaaaagtactaacacgcatggtttacggacaactaacccactaaatgaagttaatttaaaatcatttaaaaagttgcctaacctaatccatgtctgcgcgtggaatctcatgcgtacttcagaccaattgtacgacagggtgctgtttccaattactccacccgcaaaatgaacgcgtgaaaaaccacgcgccacgtggaaaaccaagaatctttctgatggttcggaccataactccgaaacacataagacaatgacagatccaaacaaacaaaaagtaaaaccaatccccttcaattatcaactttaactgtttttgtcgtcttcctttttctttcttatcacactttcagcttgagatatccttaattaataatcatctctctttaaacttagagaaatattcgggatttatggttttcgtcttaatgaggacacaatgattattattttaatgtaagattgagatttcttctttctgtcataactcataaggttctctgccttcggtgtaatctaatcatatactttttattcaaatgatgtcggctcaactattggcgcattcttatgcgatcaattcttatgttactaatttattgatcaaaattgatactcacacactatcgattattgttttctacctaagaattattgcaatttagtcactacaaataaattaaaaaaactagaggcaaacaattcgcatggaaaacaaaaactggcaatttggatgccatgaaccgaaccgtgaatgacaatgacagttcatatgctcacattattactattttcttactacttttgagttatgatttctcaattatcctctttgtatttttaataaagactcaacaatttattccgtgttccataaccccatgaacacattattcgagagaaatggaatcagccaatcactctctttcctccatatataaaatctagccaatattcacaaataataactacttccttcgttcttttccttaccaaaagatccacctcgaacctctctcctccgtcttcctccgcagccgccgtcactatcaccgcagctagaatgagagaagataatccaaattggttccttagatgggaagaagagcttccatctccagaagaactcatccctatctctcaaaccttaatcactcctcatctagctctcgctttccaaatcggaagtcctaatcatcatctcggatcaaagagaaccaccgcgatttatcaccagaagcttcaatcctccaccactccaacaactccaactccaactcctccaccgatgatgatgaattctgatttcggcggtggcgattccacggatcttggttcaggatcaataggaggagagccagcaagaacgttgaaacggccgcgtctagtgtggacgcctcagctacacaaacgtttcgtggatgcggttggacacttagggatcaaaaacgcagttccaaagactataatgcagcttatgagcgttgaaggattgactagagagaacgttgcgagtcatcttcagaaatatcgtctttaccttaggagaatgcaaggcgggaacggtaacggaatcactggaggacacgtcatcgtctctgattcggctactgatcggctatttgctagctcaccggttccagctcatttcttgagcccggattacttgatgccgccattagagcattcgtatatggggaaacatgtgattacgcagcaaaaccaagtggttcgtaatctgaggtatgaagattcggaatatggtcatggtagtatgaagatgcttaagctcttccctgccggaaattaatgaaatatttgaattcttaacttcatttttatggaagtaataatgtttaaggtatgtggattatctctgtaatttgcatttgtcgtcaggatcaataatctattgttagtgtatattatttgttacgcgaacaatttaacctttgtatgatgttatcatttgaattcactacaacacagtagcttgtttttatttctttcgtctattcattagtttccctggacaagtttgattatcatttgttgcgcctaatttgaagtcacgtcaaagctgaagcataaatagtagtaaacaaaaagacaaggcaatgacactaatcaaaaggttaagtttgtctatttttgacatcaaactgtctcaaaatctggattacacaaatccttagccatgatgagaaaagtaattaccggttctgcatgtaatcgaaactaaggggctgcggatagaactgcgcctgcagagacaacaatcacttttaaaacttgatattcactaattcagatgtgatataaaatccacattcactcttaagtgtgacattgtgatctaggaaggtcgacaaccaacatttacacaattaacaaaaaggctaaagaaaagagaggaaaaagggaaaaaatttgtttacctgaaaaggggagtttctgaagtggtcatatgaatgagtatacatcacagctgctgcatttggccattgcatgtacatagcagcatctcttgaaggctggtttaaacctgtggtgacgcaggggctcatgacagaatgttgacccaagttaagagatggaggagcagttggactataccctctaaatcccatatcatagattggtgtccccattgtctgaatgttgaagtgtgccacgcataaattttgatcgactgggaggttactaatgtacctgaaagccaaaaggtttttaaagatacagaacaagtttcaactattcatttttatccacaaacaattataatggtttagcaatgctttacatacctgtaattgctgcggtcatagtcagggtcatatcgatctttctctctgtctctgagaattgcaatacgagatgcaggattgctcttcctagagatattgttcttgtctgcttcgatattaccattcttcaacacttgattttcatctctgctagaactacaattcaccctccaaggattagtttcagatgaagaatcgttacaatcaatgttcacaagaccgttaaatatgcgtgctcgagccctgtcgtaatcttctttcctctcttcaacacttttcagaagaccacctttcagttcatcaccttccattccagatcctttagtaggtcttggctttataacaactttcatatgctcaaacttgccagtttctgactgtttcacagggatttcagatagtcgagcagcaggaaatctgctatcactagatttagtcacgacaattctgctctcattaccatctgcaccaccatctcgaactgatgtaattagtccatagtgattagcaacacgatgagccgcaaaacggaggtatgatgtagggaaatgctggaactcgaattgctgctgatcagggctctgcaagaacctctgaacatcaagttccatccgcaaaactgacataacaagagcaaaaatggcttagaaaacgattaagaaaagaaagaagcatttgtacacatcaaggagagataactccaaatctaaacaatctcacatttaacaatcagaacatcagattaaaaacattgctattgcaaaaccactttactagttatggagtttgtcattcatcttctgctaagtaagcttccaacttcaataacactagtcaagatctaaatcaacctaggcctatacagataggcagagaataaacaatcctcaataccagttgattctaagctaaattacgataatcagataaacaaaagttccaattctacacagattgtaacttcaggaaactaggggatgacacgaatcggagacaaaaataaaccggcaaaagaaaaaggcttactcgttagacgatgtcgagggttttgaagagcctcgaccaaaaaaggatccacattgaatcccttatcggctataacggcacagcctgattctgaggtcaatgctgtgtccatgagtagatggggtgaggatacttgtgggtgagtgagtccttgcttgcctctaaagcttgattctttttctgtagcagcaaagagaagaagagaatttagaggaagaggatgattgtgataacggaaaacagagtaacgaaatagaatgcttcgattaatgaaaatgacagattgatacaacgttcatgaaacgcgatatcaacttctcatctacaagagttcaacatgaaactccggcgaacgatgaggaacgattctcagagagaatccaaaaggaaactataaacaacaaatccaaaatcttcttatcttctgcaaatgatcttcattagctatatatctctgcatctcgattcttcctctaacactcccatcrccaatcttctcttgccacgtctcacagctactgtctccactcatgtattgccacgtatctaaccatatatcaatgcctagtttcctatatcaaaactcccctgttggaagaaccttgaccacaaggttcagttcgaataggtattctcaagtagctcttgtgattcaattccaatcccagggtcaaaggtttggctctgtatgacttcaagctttcgttcgtctttggcaaatttcagtttaacaagctgatacacacgttgagacacctctacaacattcttggcctcacttccaagcttgtaaacaaccaatctcctgctgtaaaagagctgcgtccctttgtcactctgtgtccaaatagaatattcataatgcccaacaccaattgatgaaacggagtgtatgaacttagttctccatgtatgctttatttggaacctctcatcactaagcagaaacggttttattagcaatgcatcatgtcgcagccataagagaagttgtttagaaaatgactgaaagagtctaaatctcccctttttcttcaagttaaacatcacgtccctatacccaagcaaaatatgaacaagttctgcctccttgccgatcaagaacaaacatggatactctgtagaaaccttttgcttcattttgacttcaaaaccatattgtaaagctcttggtacaactctatgtttgaacttgaatctcctagacttgtaaaacgttttctttctctttgtcaccatcatcttggcttgtacaatactgttttggaacagcatcatcactcttcttaaaacctctatgataccaatttcagagtcttgagtatccatttctagtggacccacatgaaacctgtgtgtaaccaaatgttgactcctttctgctgcttccatttttctgaaaacaaccattctcacattcctagacatagtagggctgtgtagtatcttatggtcccttctatacttaaacatccaagactttggagctagtctttgcttcggtttatgagactcgtcacatgttaactgctcacacaactcagccacgtccgagtggaaatcattagagattagacgca

SEQ ID NO: 360 - DNA, 96066 bp, Arabidopsis thaliana
gaattcgcagaaattgcagggccctctcgtcttgttcgttagatctcttcgcttcctcttcatctgatcgccctctctccccatcgaatcggatcgaccgaaacccaatttttctttttttccactttggaaattgcgaggattgttgttacatgtatagacggagttttttgccaaaaaaaaaaaaaaagtacagacggagtttttttggtccaatattatggaaaatttcctaaagtaatttagggaaattgagttgtttgaccacaaaaagaaaaattatggacattgagtttgttacacattttgctagtagccgcataacatcaatagatgaaattgaattagataatcaaatcatagagcccaaaatgactaacaaccaaattagagtggaaaaaaaacagaaccgcaagaacccaaattctagacgaacctgagattttgactgtgtagtttctgggaaatttgatttgaatgcttttgggtccggattcacaggtgaaattcttaccatccactgcaacctcgtaatcacctggagaaatcgaatcaaaacacacgaagattcatttgattgatcggagttttctgaataaaatcaagggctttccgagttcttaccgatagagtacagagaagactgcatcggcgatgctctctttggcgccattgtaataattcagagcgggatttcaaataatttacttttcagaaaactggaaaaaaaaacgaaacgtcgagtgtataaataagtttatcagagggtattttcgtattaacataggtgtcttaaagctctgttctagccaaagcgctgcgttttggagcgtttctgatcgtctgactaatcatttgttcgaatgtcaaatcgacgacttgtggagtcaaaaaaacaaagcttcaagagtcaagacgagagttttcgcatcaaacgaaagaaaagtctcattttccccatttttgatggggaatttactaagtccggtttaaatttggacatgtcttcggtatctcaattccgagctcgaaatgaacttggtgtcgtcggcaatgtttgcaagttaaaacatgttcgacactcctgaccttttgcgtgtattagcattatgatgtaatcgacatccttttcttagccaccaaccttgtagagttctagtctttagagaactgatcattttcagtagctgagacgtgaaaaccttctatatttgagctctgcgatggctttcttttggtcgtaaagccaaagcaacattgatgcaactgcttccggtagccatcaccgatgcaggataagacttttggtaattgaatagaattgctcagacaaaggtaggaaataaactctagttctcatttctcttcaaagtttacatttttttttttttatgtttttacatttttgtgatagcaagtttgagaatgaacatcataaagatacaaagttacagatttttgttgtggaagcaaatactaaaaattacaaaggtacagtggtggctaaagatacacagaccgaactgctctgacttctctgactagttaacaacatatctcttcagcgaggctggtggatgtttctcggagcagcagcaaccctctggtttccccatttcgctggcttttccgcatacttagctggttccacaatcgatctcgggctcctgtttccacttgatttcttaaccatctcaccattctttccaaagcctgatgatatatataaacaacaattagcctccacaaatctactgatcttggatggttctatgtatcaggggaatgaaaccgacttaccaaattcggaaggtgcttggtaatacattcttccatcgaatccttgatcaaactcagcagcatcagtgtcaaagaaatcttccatatcatcaaaatcaaatgattctggaagaagatcagctacatcgatatgacctccaccattctcattctctccgttgtcatagaaaccatccgcgccttgctgctgctgactgatccagtaatcagggtaccaagtcgaagttgtcaccaattgccaccactccggtgagaaatcttccacttgtcgtacagctgccggaataaaaagaggtgcgtcggggtttagagtagatcgtcttcctgataccatcgccattctcaaaactctagatctgcacacacaaacaaacaagctcagttcaaattcaaattcaaatctaacaactcaatcacaacatagcttaatccttagatcaatagatctgtacgatcagtaaacatagcaacaataagtttccgattagatcacttgaagtaggacaagtacaagtttgaaatcgagagaactgaagataaatcaagttttaagatagatcaacaaccatcacagagatctaataccatggaaaccaatcaaatccttcaaaatccacgaacttcaaatatagaaattgatcgagtagagaagaagacaacatcagatctttaccttggccgaggaaaatatctgctgcaacttgctcaagttgatcaagttgataaatatgtcttcttatttttttaaaagctaaacggattaggatcattcaccagaacctacgttgcgagaagatgagaagaagaaggactaatatataaagtaaggttcggtgacgaagctggggttcgtaacgtcgaggcaggattaaaggtgagacacaagtgggtaggtctggacccatagctaacatggttctgagtaatcaaccgtccacgtgtagacgcgttactgttggcttttattgactttctttttcgttccaatcctgttggctactcacactaaaaagttaaattattattctttctataaaatatcttaaatttggtcggaaagaggataaggtaggaggaaactaatccaatataagcccatttatgaccgtatgggcctaacccactcatgattttgttttacatcatcattttgggcctaatcctagaatctacttttggtacttacgttttcggtattgtatcgtgtaagtaccaaaagtagattctaggatttacgtaatgtctgagatgtgcatttttataggacatcaagtttgaaaagctaaccaatgacaatgaagaaccaaattctaaggtaatctatacaaggacaccaagatcattaaggtgtcgaacaactaggattatcgaaatgaacatacataattttctgcttcattgttatgttgcaaaacggaatgactgatcatattttcttctttgcatcaaccacttacggtcagttttagaatagcagtggcaaaactagtagatgaagtagctcaaagagaacgatgtgtaattggcgggaaggaaaatgttgtagtgaagtccaggccattgctactttcacaatgtgattcagcaagccttttcaagagattggaaaccttaaaatgtatatatgtacatgaatatctcctcttttttagtatacattggaagtaggtaagtggggtttagaatgtagacacttttactttatctattgtgtacatctatttatcatatgttgtaatgtgtcttaagtcaatcgactcgataaaacaaaatgaatttctatattctaaggaaatttgaagtaagatacaaaaagaaattaagcatcactagatttcatacagaacattagaaaaaacaacagaataaacaaccaatcaataatctttgttctccaattaattaagttctattaaacaaaaaaaaaacagaaataatatcgctgcaaaaggcagaaaccgcgtgaatcttgttttaatttaaccttttttattggtagtttcattttaattcatcgtattgaacgctagcctaaagttatggataaaaacaagaaaaatcaaataactgcaaaacgcgttatacttaaaacactctcctcttttccttgtccttctctatcgcttctataaactttttcgatctaaggttcgtgatctccttcttctctacgaagtttacactttttcttcaaaggaaacaatgagccagtacaatcaacctcccgttggtgttcctcctcctcaaggtcctctttccttctattttcgattacttttagaagtttcggtttttagatttgtaattttttcttagatctgcttaatttggtactgattattgtttttgtacgacggatctgaattttgtttgtgctgaaattgtatcaataggttatccaccggagggatatccaaaagatgcttatccaccacaaggatatcctcctcagggatatcctcagcaaggctatccacctcagggatatcctcaacaaggttatcctcagcaaggatatcctccaccgtacgcgcctcaatatcctccaccaccgcagcatcagcaacaacagagcagtcctggctttctagaaggatggttagtcaataaacacactccattatatttaatctgtttttactaattagattttgtgtatagtttgaatttgactatattccttattttaaatatttcttctagagattctttgaacaaaaggtcatgtggttttagctagaatattcctctgtagaggttgactttttgtgatctctgttcattcactgatcacaggacaattgttgttgtgtttaatgaatttgcatcttttaggatttaacatgtttgcatgatctagctactggttactacaacattgcatgctttaaagaaactagaattgtgattgtgttcttgtcgttattggtttggtagtgtttaactgtttatgagtacttgaaactatacttgtacaagttttgataagtaaattggcttagcaagatggatcctttttgtgttctctgttccttcactgaatacaggataattgttgttctttgatggctttacttaacagtgtgaatcggatgttgtttttgatgaatgtgcatcttttaggatttgattgtttgcatgatctagctactgcttactacattgcatgtcttaaagcaactggatttgtttttaatactgattgtgaaatgtaaacactgtttttgcttttgcagtcttgctgctctgtgttgttgctgtctcttggatgcttgcttctgattggagtctctctctctctgcataaagcttcgggatttatttgtaagagggttttggttaaacaaaaaccttaattgatttgtggggcattaaaaatgaatctctcgatgattctctttcgttttatgtgtaatgttcttcggttcataacattttaactattgtctatcgacgttctgccttagtttgtatttgattatgggaatgtaaattggttgggagacactattctatgccatagtttattgcttggatcttaaaatctttgtgttcataattcgtatggtcacatctcaatgatccagttttcgtccatctattattgattctttcaatagacaagtattaggtttgatattgaacgtcattgaaagaaataatttcgttctcttgggattttcacgaaatgtatggtcttctatccacatgggttggtttccattattgatgttaggtcatggttttaatctgggagaataatatgttaggtaatggttcttttgtcaataagaaggatttcgtacacttttattatcatggaataaactaatcacgaaatcatgcacagaaagaaaagtatatttcattaccaatattgcgtcaaaatcatgcgtctgctcattctattacaaatttacaactatagaagtatcaatggcagagatctatcaaaatcccaacaacataacatccaaaacagttaagactaaagaaacgtagaagcatcagtcgacccacaccgctttgtttcgtcgttgacataaagaatcaaaccactttggttcttttctgcgacaacaatcgccttctctttcttaaatgcatatgtcgtcgaaactgattgaacacaaggcttggtcttctcgacacactctactcgacttggcttcggataatagaaatccgttgggaaaaaattgaactgaagaagacccgacattgaattttgtagatcaaatcgaaactcatacaactttgtctttgtgaatgtgtatataaaaatgtttatgttcctttaggttcagagtgattttggacattgaagtttcttgggctctacgagttttgcttgaggaaaaagtctaggttggttagggtttgaaaggtctttaatctgcctttgacgctttgacattaaaactcatctagaaacaactagaagaataaagcaacgatgatttccaattacgatggtgttttggctctttggagcatgtcactggtttttacatctgtttggcaacgagggtaaacctaattacaaaaattgggcacaagtcacatcgcacccttcttgaggtttaacaatcgtgcgagagcgtcttgaggaaaaattgttgcaatggacggttactttgtttacaagtaatatacttaagatctgttttaatgttgttgcgacttgcgactgaatcatttgatgttgatagatccgaatcactaaattcatgatgttcacaagagagttgtttacttagaagcttgaagtaagaggtgctctgttgaccaactctaatatctagcttgcaaaatgccaaaatgttcaaactactctaaagaagttcaagatattaacgaaaatatctggaaatctcaaagagtgtgatcggaaaaaaagatgtgtaaatatattatcttaaaaactgtatcacctaacttaagcttctctatttcctatatatatatatgtagactacgctttggatgttacaacaactcacaaagataactaaatagcacatattcatatcctacaagacattcaaaccatgaaatcatcccatgcatatctcgtctgcatactgttgctctctctattttctctacatcaatgtatgtacaagttctcttatatataatatttaccaaatatctctttgttttagagtcatcaaagttgagttgggttgatgtgtgtttcaaattaatgtgtaggtgtgaggttagaaagatcgaacaaaatcgatatgtctgtatgcgtccatgaaatttgcggtggtgttttcgacggaggctgttattgctgtcccaaaacgccagctctttgctgggcagacatacaattctgcaccacctattgtcaatctcaaacttaaaaccttaaataaactgatctggagctatagttgttccattttaaacctacacctattgtcatttatgtttgcatctgtttgtcaacgagaatactcctaaacgtcttgaggtttaacgagagtactcctaaacctcttgaggtttaaagatcttttgaaagcatgttgaggtggaatcgtagccattatgtatttccttagtttacaagtaatataccataatatttgttttgatgtttttctgttgtagaatcggggaatctcataaattcagacttattgagacttgttataagacgggtactcttgtcattaaaaacgtccagatgcctacaatgattgaagtcataatagaaagattcgaaacgatctattctccaatcgcatgatgaatctttcatccactagacaatatagtctcttcgaagatatccgatataattaaaacgatacaaagaaaattagcatgatcgctaggtaagcaaatattcacgcatgaagcaaaacacggtttgatgttgttacaagtacaactcttctagtgcttgatgaatctgaatcaccaaatatgcataatgttttgtttttctttaaaatctcacacaattgtcggacatggaagaggatccaaaactgcaacatcgatgaagcaatcacttagattttccaggagacaagagagttatttagtcagaagcttaaagtaaacgtttcgatttggacaaaggcctagcttgcaaaaaagttacactagagaataaagggtctagggggtttcatagacgcactacttgtgccgttaattacaaatactgagaaggcaacaaaacaaagactttatagatttgcctcgtatcattctagaatgataactgcaattttataatatcttcgaatgtcaaggataaagttataaactattcggctgtatcaaattttgttatcagttctacacacaaatcattttttaaaaccaatgacggcccaagtagtgcgtcttacgttctctagatatttcctaatttttcatagccgaaactgttgaatatttttttgccaatgctttcgaaacttttggttcataaatcctttaacgaaaaaaagaacatacaacgtgtttggccacgccgaggtttagcactaaaaaaggctcatgcaaatgttgagaaattacacaataggctttttgaaaatattgattttttaaaaaccacaattttcttaccgataggctttcgcgtgtcacgaaaaagagagtgaaccaaactttacgctaagtacaaattaaaccatataataaaatgaaaacctcatcgaaattccacaccaaaataaaataaaaagaaaattaggttcttgagtcatgactagacgaccactgcacctgcaattctgtgacgatgtcagaaccatatttacgaatctaatccaaaataacacaaaacataatcctatgtagtaatcagacaattacatttttgtttctttactcaactattcatccccccgttttataaaaaaatcaacacaaaaaccactagatcattttgatatatttgtttcctacccgagatacgttgaaacttttgcacattaaaaaaaaaaaaaaccgttgaaattattttaaaaatggcaaatgtataacaaaaaaaacggaaataaatattttaacaaaggaaatgaattagtcatattagtaataaaattccatataaaataagatagccctaaaataaaagaagaatgaaaatgaatgaatgatagtgttggaggtgtataagtatcaaataaaacaccaaaccacttctctcctaggaagcttcgtggaagctgccatggcttctctctttctctccccatttaataccctccttcctcgttctttcctctcaaaccaaaaaacaagaagaagaatcaatactcaaatctcaatcatctctctttcttatcttcttctccgatatgaagctcgccgctagcctcaaccgcctcagccccaaacgtctcttccgtaccaaatcaaaagcttccgtctccagatctgagccttcttccttcagctccaatgcttcttcctcttcctctgatggatcttacggtaacctcaaacaaggtccaaccgcgactccgatcagtgttctccctcaaaactccggcgatttttacactgagcttgttcaagcttttaaactgatcgatcgtgatgacgacggtgttgtttccagaggagatctcgcggcgttgattagcaggttaagtcatgaaccaccgagtcaagaagaggtgagtttgatgctaagagaagtagacggcggagacggtggttgtatcagccttgaagatcttgctagccgtgtcgctggtacttccggtgaaggctctgttgagacggaggagctgagagaggtgttcgagatttttgacgtggatcgtaacggaaaaatatcggcggaggagttacacagagtttttggagtgatcggagatgaacggtgcacgttagaagagtgtatgcgtatgatagcgacggttgatggaaacggtgacggttttgtttgcttcgatgacttttgccgcatgatggttccagcgatgaatgatcatcatcattagaatcatgtttgattgatgatggtgacatcaccatactctttgtcttttttttttgttaccgaaaaattatttattttactgtttttgcggtggttattgtgacggcaagcatttaaattgttcaccgtcggtttaaattcagacgtctttctcaaaatggttatatactaatgtgaacatgtttctagtttcactcttctgttggttcaaaacaaactagtttcctcgaaacgtattaacatatggttgaaaaaatgcatccatttttttatcctaccaaacatgttattatcttatctatattttttttgttttgtgcaaacgtcttcaaaagtctcaaaacattagttaattcattttgaagaggttgtttaaaattgttgaattaactttgtttatagaaattcaaaacttatatttatctataatttttttttgaaaatttgaagttccatttaactgaataattgcgttaatggtggctaaaaatgagcttacatgtagataagaaggaaaaagactccatctccgctaaacttgaaaaatcgttaccactcgaaatatagcgattaattagctctctatctgcactttttaagcatgcattatctatctttcttttttagtttttgactagtccttaattatctcaatcgaataacaatccttgagattttgagatgattaaggattaaactatccttttgactacatcataaatgttggtcgacgttctaattacgtttttggggtcaaccaatctaacttcatgcatctaacgatgtttgattggtgtatatctaggtaaaaaaaaaatcagattaaaaagaaataaaaataagggaacattttggagggactatgtccacaaacatcgtcaagagtaagtgcgccaaccaactgtactccactcgacccgtggcttaggggagtatggaccctccccatctccaatgttttttccttttcttttggtaaaatgcgaatctctatttactttttacaagcaattatttactctaaatcatgttgattccgcagaattgtaaattggaagtaaacgaaagatacatgcaccacaataaacgccgagtctcgctcgaatcctaaccacacacatacgtgtagactgatcggaccaccataagattttttaattagttggttagtaaatagactttatcaatgcattaaatttatatgacgcaacgcgttgaagcatgattgcgctaaagaatcaaaaactctgccgggagtataaatgctttctaagaattttttaatgttgcggacgacagacataatttgaaagtatagtttgattccttttttatttatttattatgaagtttttatgagattctgttgattataataaggtatacttcacatggcactctttatttagtcagcgaatggtacttctcatggaaatgagattaactctcggtaaaatgtttcaattttaatttttactacaaacaagatgatatggtaatttatgtttttttggcacctctcaattattgtggtgtttttggatatgtcgatcgatccattaggaatgacttttcatatagatacaagtttgaaagttcttgggatgcttcctcgtctgcacacgcatatatacacacatttgtatacatggccgcttgtgatatcttccaaacaacaatgataggcgtgttcctttcattgttgttgcctagttggtgtaaaacaaaacaacgtaacagtgatcaaatgctatatgtgctgtctttgggccctttcggcccattcgtaaaagtaatcctatacaaaatctccatgcaactcaacaaaccccaggggtttttctttcggctccgtctttcatttcattatcagaaccgtcgcctggcatggacaagacggcgagcagcaaagtaatcatttttgctggattactttatattttatattaaattaatagatattaatatttgtcaacagcttaaaacatttttatataatagtagaagatcatacattaaatcacactatacatataaggcaaacacattttaaggcagcgacgacgattgcatatcatacatcattgtcgagaagatcaccgatggcatagttagcgataaacattaaccagggctgagaaatgttgtggcggcgtagctagcgataacaatgaaattctcgaggctgatgctacccccatatatttcattaactactgaggctatgagtacgccgcccggtggatagataaagcatgagttagtcggaagatttactttaatgtcgcacttacttggattatcaaaactcgtgttggcgggattgaacacaagggtaaatacaccaacctgattggtcactgcttgagcgagggttgagtttgagcctggacattcaatatagactgtggcattggagacaggtggtgcgcttggatctccgtcaaggctacaatacacgacaccacgaatgctgactcggtcgattgtgtaggaccagagtttaaaggcgtgggatatgtagaagagtgaagccatgagaagtatggagaggaggaaaacattagatttttccatattttttttatttttttggttatcagctgttttgatttcgttttaaagatgttttaactgaaggtgttgtgtggcaaataaagcgtaaggggagtagtatttatatgagtatatgtatgagatatttgatttgctaattggataaatcatggactggcaaaattaattccaaaattcgatgatagttgtgtttgcttgccaaaatccttttaggaagtgtacgtttactgaagtaatgtatttaattgtgatccttacttgcacgacgagatatatatatgtataggaatatagtatatatgattcacaagcaaaagctttgaatgcatgaaaatgctccaaggaaaaggaaatagaaatatgtatttgttttaaaagtgtttcctttgatcacatttgaagttgtagttaatgtgaatgtgttctagtgaaacaagaatagatggtgtagcgcagtagctagtgtacgtgcgggtatctctaagggttataaagttttaaattaggcgatgccaatgccttcatacatacacgcaaatagatgagggtaaatatattaaattgacttggttttcgaccatttcttttactttcgtgggaaattttggcggttatcgatgcaagttaccaaagtcacaaatactaatgaaatttattttcccttgaaagaaaggtactctctggtgttaatgtatgtgttgctagcacgaggggatgatgtgagtgcgtgtgactaattcactgaactctgtttgcatgaaataaccttaaggacaaggaaatgcaaagatggaattgtttttaaatgagtttttattagaaacaagaactaatggtgtagtagatctatattcaggttaaggctttaaatggaggagtatttatatcactccagacccatcttccactagccgcctcgctttatcccaatgagggccaagttttctcaacgtaaaaccgtcggaaaatcttgcaccaggcggcaattaccccgttgggtttcttgagcacgtgtttcacgttgctgtaaaaggtggtgaagttgaatcagtgaagggcttgtgcgacggtgactaaatcgactgatgattccggcgccactagctgctcgatgacatcgttggtggagtgagcttataatggacgttggattactttgtattttatattaaattaatagatattaatatttgtcaacagcttaaaacattttttcccccagttgatctttagtccaacaatttaatttttaagaaagtataaaccctctgatttttccaactagtaagctgaactaaaaactgcggaagtactaacgtttttcaaaatccattagtgtatatatatataaagacagtaataactagtatttaagagaattattgatgataaaatacatacccacttattactattatgtagtatccttttagttaagtacataaagatgacaaagacggagctgcttatatataagcttttgtggagcatatatatgcctcacttatttctccctatatatataatagtagacgaccatacattaaaatcacagtatacatataaggcgcacacactttaaggcagagacgatcgcatcatacatcattgtcgagaagcaccgatggcatagttagcgataaacattaaccaaggctgagaaatggtgtagtggcataggtagcgataatcaaaagattctggaggatgatgctaagcagctcattaactgaggctatgagaacgccacccggtggatagataaagcatgagttagttggaagatttactttgatgtcgcacttatttggattaacaaaagtcgtattgccggggttgaacacaagggtaaatacaccaacctgattggtcactgcttgagcgagggttgagtttgagccgcctggacattcaatatagactgtggcattggagacaggtggtgcgcttggatctccgtcaaggctacaatacacgacaccacgaatgctgactcggtcgattgcgtagccccagagttgaaaggcgtgggatatggagaagagtgaagccatgagaagtatggagaggaggaaaacgtttgatttttccattttcttttcttttggttatctgttttgatttggtttaaaaaatgttttaactaaaggtgttgtgtggcaaataaagcgtaagcggaggggtatttatatgggtatgtatgagatatttgatttgataatcggataaatcatggatatgacaaaattacttccaaaattggctgactgtctgtgtttccttgccatttaaacgtttaacgtaataatattacggtttgcatttattttttagtttaacttctcgttttagtttaagtttatgttttagttaaattgaagttttacattctttcaagccacacatgcatgtcccttttaggaagtgtacgtttactaaaagtaatgtatttaactgtgttccttacttgcacgaggagatatgtagtatgattcacaagaaaagctttgaacgcatgaaaatgttccaaggaaaaggaattagaaatatgtatttgttttaaaagtgtttccttttatcatatttgaagttgtagttaatgtgaatgtgttctagtgaaacaagaaaaagatagtgtagctcagactcctcagtagctagtgtacgtgcgggtatctctaagtagagctgtcaaatggtccgtccaaggaccattgggcgtgtccgtacggacagttttttttatgggccaagttggacggtccataatggacaatggtctgaaaaatgtccatgcccaataaagatcatgtccatatgggcaagcccatggtcagctcatttattattgataaatcaaaaatcatgattttaaagaaattttccgcaaaaattgtaaaaatcgaagacttgcatttttccgacaaaacggtaaaattgtgtttttcttaccaatacaataaaatcacgattttggcggaaaaattatggaattgtttttttctgccaaaactgtaaaatcataaaattgttttttcccgccaaaacggagaattgtgttttctcaccaaaactgtaaaattatgtttttttcgccaataaaataaaatcacgattttggcagaaaaattgtgttttcccgtcaaaaccataaaatcggagaattgcgttttctcatcaaaaccgtaaaattgtgttctcgccaattaaaatcgcgatttaagaggaaaatttacgaaattacgtttttcggtcaaattcgtaaaatcggagaattgtatttttcccgtcaaaaccgtaaaattgaaaatttgtgtattctaaaaaattgtggaatactatctttccttcaaaactataaataatttaataagaaacaatttattaaaatttaaaattttcataaagatagaaacttataaatgtaaaatatagaatttgaaaattatttagttgtaattataattaaaattataaaaatatgattaaaatgaagacatgtctattgactcaattcatgcccatgggcagcccattgtccatatggtcaagcccatattatccgcggacaaaactggtcatatgcccaattagatcatttgttttatggttcggaatatagcccgtccatatgcatttggactgggcaagtccatgggcggcctgcccaattgacagctctatctctaagggttataaagtttataattacgcgatgccaatgctttgatacatttttgctaaaaaaaatgccttcgtacatacacacgcaaatagatgagggtaaatttgacttggttttcgatcatttcttttactttcgtgggcatatcttttttaaaaaaaaagattagaataggatatctagtcgtcgatttctcacaatcagaactacaactagagcgaactactctcggctgagcatatgatccttggcagaagtttctgcaagcccaccacatgttaatttcatgggccgaaactcaaaaaaaaaacaagtggtcattagaaaatgacatagtacaaaatgaaaatcgaattcaagcgctttaaggtctgaggattaaaatcccttttccttatgtcatgacccaagtaccactacactacctcgtttgaatcacctttgcttgcttttggtagtcttacgatttagttttagcttgcattaccaaatgagtcattgcatgaccaaatggtcctaggctcctagcaaagcgatttaccttttgcttgtttttagtaatcatacagttaaaatttcgtattaaaaatatcctactatattatttgggaagtatattttaaatgtaaccttaatttttgtaagtaattacataggtatgccattagaaataaaattttaaagagtaaattaatttatctctttaatgattaaaaagtcaaatactaatttaattaattaaatttaattaaaaaacgaaatatattattattttccaaaaataataaccaatcaaaatcaacatataagatttgatatctaaattttaattaattgaatttaattaaaaaaacgaaatacattattaatttccaaaaaagtaaccaattaaaatcaacaaattatatttgatatctaaattatcatattaatttttttattaattattctagttcacttctcatctttatatgattttatttttgcggaaaaataatatcatcattataaaaataataattagagttatttcgcatatgccacaatttgaatttttaaaaacgaatataaactgttcaatacatgaaaaaatattataacgggtgaaaaatagatttaagaaaactttctactgagtaacgggtcataatttgaaatatttctattcaatttcatacatattatattgaaaatttataatcttatatagtacaataattaataacatattagatgtgattcaatttttaataaaagctggaaaatcctagaattgacgggtttagatcgatattaatacaagatggaatactagaggtgaaactcttaaattaacaatcaaactacaagtgtataatcttaaacactaaataatatagataatatcaacaaaacatatacatgaactcacagtttactatacatataaaatcaaataaaataatatcatatatttttaaatcatctttacaataaaagattttattttaactaaaatataagcgtacctgcggtatactgcaggttaatatctagattatagggcttattggatttaaagacgggtcatcaaagatttcctaaactgaagcaaaatatactgaatattcaaatatctatatgttaccaaattataaacaaataagtcaatttaatattttatatacgaaatcaagtaaatcttaatcacataaaaattggcacaaaaaaagtattcaacaattaaaaaattatcaaatctctctgttatataagttttgatactatattcgaataatgtaatataccttttcaatttgtattttttaactaatttaagctaactaatatatttgctaatcttatacgtatcaaaaccgactatcgtttcttatctctataatatttttgcaagacttttttggtggatttggataaaagtgtattcggatcatatggtacattcccctattaaataaatatggtgcactcctatgttattagctaaaatatttagaatataattcagagtcatatcattaataaaattaatattaataaactaaatgactttttggcaagacgaatttggagagacgggtttttgaatcaacattaataaaaaagtaaaatatgattaatccaccgtttcaatacgggttaaatctttaatttattattttgtaaaaccactaatattaaacatatcaaatcatcctaatttagaaaagattatataaaaccaaaaatgttatgtggtatgtataatgttactatatataaaattaaacaataaaatataaatgtattagagaatgatacaatttgcaaaactttaatatataaaaaataattcttaaattttaaaaattactactttagaaaaataatcacgggacgggtaaaaaaattacataacgagttttattttagaattgggttatatggtggatgtatttgaatcaatatttataaaattttaaaatattattaatatactgttttaatagggattaaaactccagttttttaacaattatctcatggattcgtggtatagggttacctaataacaattataaactgtaaaataaaaatattttataaaattaaaatttataagttttaatatatattacttttaaaaaataaatcgtcccgcgctatactgcggatgaaaatctagtatactttatagagatagcgtcattttttatttttttcttaacgttagatagcaaatctgaaagagcaatatagagtatagtcgctttttttctttttcagtggaatttagatattgtgtagtcgcgcgtggggtaaaaaaggaaagattagagatccccaggaatgctggaacgacaaagttttatttttacattgaaccaatcaaaactaatgtcttcttgtgtgtaagcacaaggtgttcgacgaaatgcctaactgagagatatcaatttatacacgttcttctgcaactcttccgatcaacagataaatcggatacctaacaactttcttctctttcccatcttctttccacgaaccagcaaactctccttccatctcagccgtcaaaagctctaaacctttctccttagccgtctgatacgccgaagatgacctcagatacgtcatatactcttcaaacaccatttctttctccgttacaaacctcaccggaaaactttgactttccgttgactcatcattatccactttctcgaacggaaactcaattcctctgtacccatcctccacaagccgtcgcgctagatcccaatgaggaccaagtttctcatcgtaaaaccgttgaaagaccttgtccacggcgtcgttaacttccggattggtgtagcaccaggcggcgattactccgttgggtttcttgagcacgtgtttcacgttgctgtaaaagttcgtgaggtcgaaccaatgaagggcttgagcgacggtgactaaatcaactgatgattcaggtgctactagcttctcgatctccgatgaagacatcgtcggtggagtgatctcgtaacggacgttgggaagctttgcagcaaattcaagttgctttgagctcgtgtctgtagcaatcacgttcttgtagattccggctagctgaaaagaaggacaagattaaaatgatatagaattttgaatcaagattgaaagactaacatgagttatttggagatttgaacaacactattataccgatcgtgaggcttggccgcttccggcgccaacgtcccaggcaaggtcgtggcacggtgttttcgatgcgatatattcgaagagtttggtggggtaactgggtcgggctgctgcatattgctctgcttgcttgatgaataatttcgccattgtttttgttctcgtgtttcttgaataatttttttaacttgtggttttggaggatccgatggatctattatatgttagaaggattcgagagaagcgtgtcaaacttgaattgatcaaaggtggtgaatggaatccaaaagagtgactatcacgggaaggtcatattcgctgttaaagaaagtggttacactatctttttcgcgggaagatatgatagtttaaaatgggcttctatggattctctctttggcccaatatttagaaaatcaaatggcccattaatcttgaacgctggaaaatggaaatacactctttttcttgccacgtatttttgtaactgttataaaataatagctacggaaagataggagtattagttaattaattagactgatacttgaatttagaataatgaaattcccaaaaatgatggaatggtaaagtgggagatctggaaattggtgaaaaaagtctatgaaagtgacaaccaaatttaatggtaaatcctcattaaatcatatcgaatttcatttgtcgggccattattattttacctttctttggcccctcgattagaaaaaggttaattatcgccaacttgtttcaccattgactcttttattcgattttacctatcgaaaacatattaattagtcttgtccacaaatgcaacattactatatatagtctgtataattaaagaataataaatttaattatggagtttcttttttccttggattctaatttgatcgacactcaacaccatatatgatatgtggaataaaaaacaccactcttgtccacgtgaaccatatggttcaaagttatcaaaatcgaataattgttgtagaccttaaacccgtctactatacatacgtactatataaattgggggtctgcaactcaaataaataagacgaatgttgttatgaattatgactgtaatatgaatatgtgattttttgtgggtcggcatatgaatatgtgatttgttcgatgataaatgtatcttattacgcgatctatccttctttttttgctactaaatgtctttatttgttatttacatgatcttaaatttcatatactggttgatcaatatttttttttttcgtttttatatatacagaaaatatcatggccattgtgtctagctattttgtcttagaccatagtttcatttaaaaaacatattgatctataagaatgtcttttccatatggtagataatatgaagagcggaaaaaaaaactgttactgaggtatcaatcacacaagtacgttttcttgttatgctttcaaatcagagaagtatatgtcttgtcaaacaaataatgtaaagatacgaaatttgtaaaatgaaaaaaaataattaaaaaaaaaaatcttgagatgtttgaccgaggaaaatacaaagagaaaacactgagatgtttgattagtgtcaatacaagattttagtctaatccagatcttattttatgcaataatacagtgtaaattttgataagtagagttaactgaaaatgatatatataagatgatgaatagacaagaaagcccctgagagcagagatgatagagaaaagcaaagtccagtggtcacagtcatcacagaaacagaaagtttcaggtatctcttaactccaactcccaagttttttcaattgtcattttctctctctagctctctctctttctctctattctctgaaacaaaaggaatttttgttagagcttttggcccaaaggtctctcactctctctggttatatgcaaaggctctattattcatttaatactactggaactagtggaacattgagtgagagagacgcatgaaaatgagactgagacttaagctctaggcctactcatggcatgtggaagtcagtgctcctacaacaaaaattattattcgcattccaactaaatcattcatatactattacgttagctaactttagttataattgagtagctaacctgtgaacatagacggtttcaagtgctttcaacacatggttaaagttggtcttggtttgttaggtcattgcaaagaaaatctggtgtagatggagaccatcacataattaaatactataccatgtgataatatatatatatatatatatggaattacataaaaaaaattattgaactataagtaaaagtttgtcttattactatacaattttcttaaactcaagacttttacgtggctaatgtttagtaacagagcaataattattggtctggggtgtggtaagctagtcaggtgatagtgtgttcaatgacacgtgacgaacgttgtgacagacttgaagtaaacggagcccgtttaaagtaaacgcctcggccgtaccgttatttttgaaagccgctattttcgcataaccgtataactaggaagggacctctcatagtctcatgtgatagataaaaagttcatgtaattattattacctacaagaaaagtattgacaacaaaataaatagccaataataatatttatattaatttcggcaagctatagaagtgaagaggcaatggtacaaaaatttatgtgctatataagaaaacaaaaagttgcaaaaaaaaagaagctaattagtatataatatgaattacatttaaattctatgcatgtaaacatatgggtgttggttttggtgcgttttgatcatttaattactatagcgaaaattagaaaggagatggttttttggtagcttagcttcattaaaaaaaatcgaattagttataagaaaaagaaaaaaataagaaaacaaatttaagagaggaccagcagagagacagagagaggaggagattgagaggtcaagtcattgaagtcaccatcacatctcttcacatgcaataacacacaccattgtcttgtcttgtcatacatatttcattttgcatcccaacaaaattttaatcgcatacttaaaatcatctatctatgcattcatgtttaccataacagtttgatcaaaaaaaaaaagtttaccataacaatatatagaataatcaagtttgtagaatgttttatataaattaattagttcaaattctatgtatgtattgaaatgattaaaacaaaaagaaggaaaatttagcatttatttaatttgtttgtttctgttctataattcaacatgaatattttcattgcattcgtttcagttgtattggatctataaaatcttaaagatatagagaaaattttggttcaaagaaaaaatattaccatgaaaaataatctcaattaggttttgagatatgatttttttctttagattcagatcgattcgcgcgtttatttggactgaacattcttaataaaatgtcaaattttacctgttgaaaaagcaacttacgtttttttttttttttgtcaatcaagcaacttacgtttactctttgtttttaaaccacttctgtatatttcctttttctgcataattcaaatcacctgcaatccctaacaaacactccttctgcagcaatccataacctagtaattccagctttccttttctacttttatgtacacacatgcaacaaatatacgaatgttttgtttgaaattgcaagttaatacttactatatggtaactgtctgttataataaatatcgcatattgttggtattaattatagttaagaaaacaataaacacttttagcattctgatttaattaatccaaatgggtttactggtctcctaaaggcctgcaatgtgataactcaggcacctatttgttgtatcctctacctttttctgggccaaatgacacacacatatatatatatatatatgtggtttagtttcctcttctgttatttgcatctgattctctacatttgccaaagattttccatttggatgatttgagggaaaataattgtgggatccatgaaataaaattttagtgatggtgaaccaaatacggatataaattttatattattattcttaattccaactttaaaattctcattttgacgaaaaaaaaacaaaaacttttccttttatttttaataatttaactttttctggccaatgggacccatattatcaaattagcacaaaagaatctccacttgacccctaatactaatatagttgatttaattatttgttaaattctttccaaaatttaaactttcttcttttcatcaagtgtgaagtgtttgctcttctttaattttcatctgctttctcctgtcaagtccctttcccattataagaagagaaagatacgcctaattggctaattccaatctcctaatttcctagttttctttaatagttattttcccatttatatccagagaagttattaaaaacaattaagtctctaaaggctttaccctttttcatacaaattaccgtagaccgaaatacaattttaatattatagtgtgatactgcaactaaaataaaaattgaaagcttaagaggttttgaaatgatggattagtttgtccttatcctccatctggatgacattaagagcgagggcctcttattgtgccccataatacataagtatatgtcactactttgtcgtatgcacatcatgaagttagtgcataatgtttatataatcgctcatgtatatgtacttggttgcttttgagtggttaaagtaaagattttgaaaaagagacgagatgacttatggaatcaataaattatgcataattatcaccactttccctttcccttttaatgttttttgtaatcttttgtgctatactacttaaacattagtatttgacatcagttttataatatcgaataccatctgagatatataaaaaaatgattaacattacttttatattgatcattagtgagaagtttagagtatcaactacactagaacaatacatgctctatatattcttaacaatacatgccttatgtccaaatgaatagtggcataacaaaaccattagcacaaaaagggaaattagaagatgctttaggttaaatgttttctagcatttaataaaactatttcgcatttataactttgtatttatttgatgtttacacttttttataaatttttaaataattaagcttcaattttcattgattttatgttttcaattaatattagaacaactcctcattcgttcacgtatcatttaaaaaatatatatatttcttaatctattattgttagaaaacagactacaattactaaacaataataattgtacaatgtcatatatataagttttagtaaatattgcaaaaagaaaatcattataaaaatgtaatatatatagaaattgcttttaatatattcagacttttgtctttgcttctctatagtggtttgtataatgagaaaattgcaagaatattcataactggaagcaactacgtatacacacttttgtcggtccgtatgactactagacaaggattcgattcgaagtgtcttggagctaaattattaggtaaactattttcatccaatgaagacgtataaaccttccaaatcccattaacaaaaacaaaaattctagaaccgattctaatatgtggaggagggtgcacacgatatatagaccggtcgatgtgatagctctgaagacaaaagacaaattgaggaatggcaattaattgtaaatatcaaacgccaatgatttagggcaaagaccatgtgaacattgcaacaattggagcatattggactttcgacatattacaaaaatccgaattaaatataatcatgtggccattataaatattttggtcaaatgtttcaaagtgacttttgtcaactttaaaagttccctcgagaaatctaatatcttatcaccaaaataggaagtcaaatttatccttcattggatttaaacaacaaagagttgcgagacgactgcatatatattagttagttatgcccattggcaatgttattttgaatccctaaaattggattaatttataattggatttttttttgtccacatcaaattattattggatttaccaaaaagacaaactcagtttagtgtacataactagctcatattattattattactaatatatatctaaaaaactggtttgggtctattagactattattgaagaatttgcgatatgtcatgttaatgaaatataaaaccatattgtgggtattctggaatttactgatattttaatagggttttagtacaatttcctgttttctttaattgccattaggttttgctcattaaagtagtcgaatggatggtagaaatgtagatcatatatggtgactttctccaacacaaatattaagagagacaaaatcatcacactcatacatattttccaccacaaccacttaatagagaatttaatttgtggtgtattgacccaactccctccacaagaacctaatttcttatgctcatccacttctcattttctatggattttccatcaacatttgaatcaccagctgacaacattcagttgggttccactaaattcctcctttttctttctatatatattggttgtatacatacatacagatttattcctatatgtattatatacacaagaaccctacaatttgtaggctagaagtcaaaaggtcagaccgacctcagcgaatgggcttgcagtcaaaccatatacatgggttattggtggacacctatatatgaattatttggaatctatataagtttcttaatttgatgttcaatttcaggagtttcacttgaagacgacttagctttgaagtttgaagagtagaacttcttggggttcatattattttcggctgctttcaaagctgtcgtcatctttctggggaaagtattaacacatacatacatctatattagagaaccacacgtatgtgtagattattttccaacaaagtctaagttagctgattcaaatcttgttcaaactattagacttctttcactttcctagagcctagagagtgtgtcatgatgtttggaaaatgatggctttagatgtatcctttctcattggttgtatactttgaccattgcaaactttctactgattttgagcaaacttcgaaatagtctaagattcaggtcaggtactaaattgtcagtgtaattctactagcataattttcgcatatcattgggccattggcctcacataagttactaataaattaatgtatatatgtttggtgtgtcaaagttggtgatgcaattaaaaagtgtatagaaccatgcatgttgttcatatagcatttcgttagttgttcactgttgaagaacagtgaagatcgccaaattaaacaggattaattagccatgtgaatagtttcacttgtttcttagagttcttattatttataattcattagtacagctgttttctaattatccacacatgtaatccgcacatacctcgatttgctttgttcctctattaaataatactatctatatttgtaaaaggagaacgaagaatacaaacttttaagtgtttccaggaaaaaggagaaagaaaaaaatgagtgtaggcattggatgataattattaagcggtttagaaatctagtgatcagtatttttccacgtaccagtcttaattatttaatatataagtttttggtggcatcttttattaacttttcccttaatcttgtaatataataaaaaattaatgctgtcgggctatggaaaacaaaaagcaagcaaatgacagaaaattaatttcttaagataagaaaagagaaaggtgaagaaaagggaatggggactatataaaatagttttttaaagttttcagaaagtagcatgtatatggaatatcaaatactaaatgtggtgccattccattgttaatcaaataatgtttggattaattattgttatcgtaagcatgcacatagatcatagacttttttgttacatatgcatcaaatatcgcagacaatttaatttatagaattagtgagtacattttcaatacttaataaagatgtaataaagttatataacttaagatatgtggaattgtcaggtcactcgaagggatttatcctaaaatggactctaacatagattaaagacgaattctaattagtctctcttttggagtttttttttggtgtgtgtctctaattactaatctagtattaatggagtgtatactttaaccattttcttctttcaaaatatgcaatggatctcgtaaaaaaaaagaatgttaagaaaacaaagggggtgaatataaaatagttggtagtaaaactttaggatctcgtcaaaccaggacccgctttctcattcactctttactaactaattgagatgacaacccaatcttttaccaattaccatatgtgctttacttacaaaataaaataaaataacatcagacacaaattacaagtactagtatcttttagtttcttcccaaaattatattcttataattccttctttacaaaaaaatatatttcaaattcctacttatatttgagtaaagaaaccaaacatgtatttttgcgaccgaaaaatctgaaaatttgttccaaacaaatatagtataattaaaacaatggttcagaacatgttggtaaatatcaattacattatcttgttgagaaaactagtctccaaactctcgtacatttacatgttttctatcagtttaagataagaaaaaacacatatatatatatataaaataaccgtcttattgtttttcataaaacagtactcatagcagtaatactatactaggcgtttaaatgaatacaataattcacttgcgcaaactaggccaatcacgacgattgtgtatttcaaacttttgtctatatatatacataaatgtatgatactaatatgatgtccggaaaaagaaacaaaaaaaaccgagaaatagaacattttgatgatcataaaaatcatttcattgagttcaaaaaagaaaagaatacatatatatactactacattttgaagaaaaacagagtaagaaaaatgtataaaattgaaaagaagagagagagaatgaaaagacaagtcaaacgtcaaatcgaaccacttccttatcatacgactgtcagtgcccttctgtgttgtcattcttttttctctttttttttctcactttccttttaccccaaaattaccaaacaaagagagaaatagcttcttctttttttttttgtcaaaataattatcctctcacacgtgtgctctcgaacgcacgacgtagataacaagatgtcaagatgtatgccaaaaattttgttcgtacaagaaatcattccatcatctttttcattacatcaaaaaaatctcataatatgttttttcttttcttcaagaaggcatcgcaaattagatgttatagagttttatcaaggttttcacatttatagcaacaaacactatatattcgatgggaaaaaataagaaatttcccttttagaatgaccaaatcataaattaattcttacataccgaatttggttataataatgagaagaaaaacaacaacaagacggaccctatcgatccggccgacacgcttctccatgtccgtcccactctctctcccatccatgtgtatttttttctgaaattattattatttataaagaaaaatgaatttaatttaatttgattggtccagtccaactagttaaatacagctttctcaactggtgaatatatatatgggttcggaccacgactgcgccattatcagagccccgtcttgacttctgtggttggatgtttcacattaatttcattctctacctgattgatttgatttttgtatgttagaagaataatagctttgtttgatgatttactactctttgattttttttccattaacatatatcttgataatcagttaatcactatatcgtatactattgaagtttaataatttacaaaaaaatgcatttttatgataaaatttatataaccatgtttataattttaatttaaaaacaataattttctaataacttgttttgagctactgacaaaaaaatatcaccatatttatgataaaatttagagcttgatttttagtttctacatttaactcatcaaataattatatcaagaataaaaaacatggatcacacatttaattaaaaattattggataaattagtatttaaattatagacatatatagataaaccgcttaaaaaatgttttaacccatagtatttcttagctccttgcccttttctttgttattctattatgttgccatctagtgcagttatccttatttatgaaacgtatcttacataatatacaaaatgtttaacattttatgtatagtattataatacatgataagtcctttaacaaaaacaaaaaaacatgataagtcatcataaaacttatataaatttactcgactataaatgaataattcaatccacaacaaatgcaaatacctttaacaaaaaaaaaaaaatttaaaatatcatcaattaacaacatgcaaatcagtaagaaatattgaattcatgatatgtagtaagagaattttcaatgaatatactccatgttgtttacaaaatttagggattatatctgtacataaataagtaaaatttcgataattttaggctaatcttactaggattagttttattacagttgattactaagtatttactaaagtaagaaaatccagttcttacgtaaaatcaagagaccaaaattttccttcccggatcttctggttagaaaaaaaaaaaaaaaaatagaaggtaaagtaaatttaaataagaaaaaagaaaaagtaaagaggggcaaaggaagatggtgaggattggtccaacggtcaaacagaaaaccatcaaatcagatttcactacagttacgaaatttatttcactccttctgtcttttaacttaattaggcctatgttcttatccaccatcttcctctctttttttaccattttatcccatcctccatttatatgtgtaacgtatccattgtgttgctcaggctttcacatggttctgtatcaagccaaaaagacaattgccgaggatcttggatttattatcttatcaccctactactcaattcatatccctcgtttgtttggaaatcagatttaagtaggattttcattagtcaggtgctaatgatatttcattgtttattaacacttttattaaaattctctcgtttcaattatttccattttccattaatagatttggcccacctttgtattcttttcttcttaataattgttttcctattttagtaaccaaatcactaaatttcaattcattaataatactttaaccctttttataatcagcatcaagacaaaacactgaaacagttataatttttttttaaccatcttagtttaaatatctgagccgcccggttcatccattcaaatctctctctcacttaccaaacccaaacaaatatctaacaccacaaactcaaagcaataaagaatccttctctctctctctttctttctttcttctttcagagaggaggagcaagaaagaagcttcaaaagaacaaagcttaagctttttcccccggaaaatttgttcccctttttcgaaaaactaataattcgtaacttcatagccaacaagatcaataaaaggaggcaacttatttctttcattctctcttgtaaagagtacttgctaaaccctagcttttgttctatagagaatccaagaaccaatcaattttttattttataaaaagatgagcaatcttgaagaatctttgagatctctatcgttggatttcctgaacctactaatcaacggtcaagctttctccgacgtgactttcagcgttgaaggtcgtttagtccacgctcaccgttgtatcctcgccgcacggagtcttttcttccgcaaattcttttgtgggacagactcaccacaacctgtcacaggtatagacccgacccaacatgggtccgtacccgctagcccaacaagaggctccacggccccagctggaattataccagtgaactcagtcggttatgaggtttttctgttgctacttcagtttctttatagcggacaagtctccatcgtgccgcagaaacacgagcctagacctaattgtggcgagagaggatgttggcacactcattgctcagccgccgttgatcttgctcttgatactctcgccgcctctcgttacttcggcgtcgagcagctcgcattgctcacccaggttctctctttctccctctgctttcactcttcttactccatgcacatcacaagaaaacaaaattgaaagtttccacttttttgttcttgttctgcttcttttagagtgttttctttcatgtgcttggcttaattttggtaaattacgaaacgcttttgattcgatttttatttgtctttctttgggtttgggttaaatttattacaaatcgcgaaacccttttggtctgattattttctttcatggggtatttcgcttaagatttttaatttttaataacaattttttatttgttaaattatatatgttcttgtcttgatttcatgtataaatgagtttaagtttcttgctttggaacaattttcatcggataaagtttccgaaagcagacgaacggtggttttattgcacggaagagaattttcctaaaagtagaaatctatgttatgtagttggatctattcatttcttggtcttaatttcttatccaatcccacaattttcctcatttggggtttcgattctaatctatagataaggaataaaacctactccaccatacaaaaatccatctgagatgacaagaaagttaattaatagcaaaaaaatccataacctaaaaatggaaattaaaccccacttgctgaaaaagtcggttctttggatttatatcatacttatcaaataaattgttttgtatgattggcagaaacaattggcaagcatggtggagaaagcctctatcgaagatgtgatgaaagttttaatagcatcaagaaagcaagacatgcatcaattatggaccacctgctctcacttagttgctaaatcaggtctcccaccagagattcttgccaagcatctccctattgacgtcgtcaccaaaatagaagagcttcgtcttaaatcttctatagctcgccgttctctaatgcctcacaaccaccaccatgatctcagcgtggctcaagacctagaagatcaaaagattagaaggatgagacgagctttggattcatcagacgtggaactagtgaagctgatggtaatgggagaaggactcaatcttgatgagtcgttagcattgcattacgctgttgaaagctgtagtagagaagttgtgaaggctttgcttgagcttggagctgccgatgtgaattatccggcgggtccggcagggaaaacacctttgcacatcgcggctgagatggtctctccagacatggtggctgttctgttagaccaccatgctgatcctaatgtgaggacagttggtggaatcacgcctcttgatatccttagaacattaacttcggatttcttgttcaagggggcagttcctggattgactcacattgaaccgaataaacttaggctttgcctcgagcttgttcaatccgctgcaatggtgatatctcgagaagaaggaaacaatagcaacaaccaaaacaatgataacaataccgggatttaccctcatatgaatgaggagcacaatagtggaagcagtggagggagcaataacaatttggattcaagattggtttatctcaatcttggagcaggtacgggtcagatgggtccaggtcgagatcaaggggatgaccataacagtcagagggaaggtatgagtcggcatcatcatcatcatcaagacccatctacaatgtatcatcaccatcatcaacatcacttctagttctctatattggtctctatatctcaaccatataagactcaaaataaatttattaatttagttcttatatcttctatatttatttctgtatatggaaattaatgaggacatataaggagagtattaagaagaggggcatgcaggaatttaagatcatgcatccgttatataattatagactaggtttatttaaattagttgctctagctatcgctcatcgttgtactaattaatcatttgattaactttgccatcgattaatatcttatctttataccctaatttcttcctagtacatgctttcgtacgtaactacgtctatattttttaactaacataagttactattacaaatttacaatgatacatgttatgttcgaaagttaagcctttcacaattatagttatttgacatgattttgttttattcgtgattcgagaactgtcttttaattgaagtttttgtatgtatttgcatcagcaatgtcttatcgggtgtataaatatattcaaattatctttctatacaacacaaatatatctttcttcttctcctctttgaaatttttgatagtttctatatatttgttgtgtggctgattctctatcgccgtataaactctgcaattccacttgaatttttgctggtatatataaaagttttttttttgttgacgctaaatatagttgatagatatatgagtgattttacctacacaaaatttcacttccatcttattttggacgcgttgatacatacaagaaaataaaacacttaatagaaagaactttcataatgaggattggaattgattggtaaacttagaatggaagtaatcagtttttcatatgttaacataaaattgaaacatcaaatctattgtcgtgtaaagattaacacaacaagattgggacattacatgaggaaacacctttggtcatatatatgacagagagaaaaaataaaaatgaaaagtagaaaagccaatatttatgggagtgtcaatgtcacatctacaatgtagagcccaatcaaatccgatctagtaatgtcttcggtcagtgttcgtttgatatgcttcgctttcatcacaaataaaacaccttttttgctgtattattttccatcaaaaatcttttttttttggcctgagccagcaaggaacatgaaagataacacttgtaaatgtaataaccacaaatctaaaacttactagaaatttaaccatttgaaatatgattcaatatttaatagcataaaaaatagtagaaaaacaattatgacatgctaaaatcatttgtattgttatcgtttcttatataggtcagtgaattgtttttctaaagtaaatatcatcaatacgaacagcaaaatattcacttttgttgactaatatacataactctttgtatctggtgcaataatatatattagggaatgtgaacaaaaagatccatagaacaacattccgtgttccgttttgtttctaccaccaaggcaccaaccaaaatcattctttctccaaaacacaactctttacaataaagtgttggttggtttcaaaatcacagctttggaatatataggtgcgttggagaatcattatctaaacagagcatatgaattaaggtaacgactaagaaagatatgaaaaacaaattgaaaatccaattcaaagctgagaaaacaaaacttgtataaaagcatctatgcacacaaaatctatagaggaaccagatcatttagccaaagctgcagcgattccactagctatgaggccaacggttgtagctgtgatgcctatcccaataacaccatctccaattaggaataacacaactctacatcagaatcattgttcagattgtgtgaaaatgattcaaaaccgaatatcaattacccttagcgatcttgtcttcaatggatttctttaagaccaaagattgcctccaatgatgttgaatctatggaaccaaccattaaacgagtaagaagtagacaaaaatttaatatcatgagcctattatcgagttgtgacaaaaatttaacaccatgatcctattatcgagttccccagtccggtaatatccaacagcaagaagataaaactacttccggtagagggctactgcttgctagagaagctgcaacgaaagggttgtaaattttggttcaaactttacaccaccatgaaaggtaaaagctagaccattcattcaacacaaagcagagtttgacagtgcattagatcaaagcacaagcatttgatgtaaataagtgtaccttcgagcatggaattacctcgctggataacttcagcttggagagaatgaacaagaggctaatctagcactagaatttaaattgaaatctagcacgctagatcgttatgaaatctagcactagaatttaaattgatgagtgaaactttaaaaaaaaaagaaaagaaagataaaagcctattaatgatacaaagcctttctaatacgcaatttcatcggacaaacttgagggccaaattattaatctgaagcaactaaacaatgcaagaactgacaaatatatgggatggtggcaacgacaccagaccattcaatcgtcccgcaaattccatctccaaccctattcaacgcgatcaatgcagaccaaatcttctcttccttcttcttgttattattattattattctttgtagtattaatactagtactaatgtatctttctctccagaaaatagctagcttcccataatattccgccattgcagagccatacaactttcgatgcagtgtctgcacatcaccagtaaccactctccatacgttgttaagctttgtgtcaagccacagtagcccatatttggtaaaaaaagcaaagagcacattgtttgccacacacatgcacgaaacccacctatcatcaattggcaactccagtttctcctttcttgtaccttgtctcagattgtagacactgatacttccaaaatccttagcataaaccttcccctccaatgacacacttgacaccatattcggtctactatccgctttctcgtcagggacagggactcccacgactttccaagtttgcgtttctaggtcgtaaacctgttcttcggtctcatcttgtttcaagtcttggatcacatgtatctttccgtcgaatactcccacggcgctgctagacgcaattcgtaggaactccggcttgatcgggccctgacgtaacttgccagaccgggtatcaaggatccacaactcggtcgggtttggacgtccgcccacaaagtatatctctgaatccaccgcgacggtggaagctcggaacatgaaattatgactagggaacgagagcgggaccaattgatactccatcgtcgctgtcgtgggacggagagtgaaccaaagataggtggcatcagtcgaataattctccctatcgcagaagcagacgtagatggaatccttgtggaggagggatcgcatccggtagagctcaggggtacgcacaagggacctgagccttacggagacgcaagagatgttttcgtagtagcgtctcgggacgcgggctaggcagttcagaaccatctcgtcgggcaaacaagaaagggatgaccacgacgatacgtttctagccattgatcaaacgtcttttcagattttctttttgactatataagttagagaaactaaacagccatgcaaggggcaggtctgcgcagggttaataatacctaattttttaagaaatatagttttggatctagttctaatagaattggaagtaattagttgcaaatttaaggaaactttcatatttgtagttctaagatcccgtgattcggtagtagctgtatacgaattcgaattctacatggaatcgtagactggttttggttttgttaagattcagatccgtgattcgtattcaacatgtttcttcatggatcttacactgtgttagttaagattcagaacgaattcttcatgtatgtttcatgtatcttagattgtgttggttaagattcagaacgaattcttcacgtatgtttcctggatcttggtattcgttgaagttctaagtaaattgtttgtgactgaatgtgttgtaattgttgttatcatgacagaactgaaaagattgtcaagcatgcaaaaattgtactggaaggtaatggaggaggatcctttgtgtttgaagatgatgatgacaagtacaatgaggaacgtgaacttcttcgcaaacgacttgaccagactaagtggatcgctcagggtcttgattttgcacatcttcttgagtatgagagaagcagaattccccatttgagtttttctgaactcaaaaaattacttcccctaatcaccacgcttataagagaagtgacagctgcaactaatgcccggactcaagaactgcaaagacaaactgaagaactgctgaaacaagaaaatgatctatctcaccagtagagtttaataaccgagagattgttgcattacaaaacatatgttacatattcccaaaacataatattttctggtttatatcgatcactcatcgtttgtctcaagggctgattgtaatacttcttctagatacttttccgcggctgtaaactgtcttttcttgtcttcgattgctagtgcagctaaagctttgtcctgtttacagaaatgaacaaccaatctactgtgaaccaggactagcaatgaccaataacaaagaggagattgacaatgcagatcaataagggcttggagaaccagagatgaagattaccggaggtaaatcctggtagcttcgtagagtatcaaggactggttttgtcatcttgtccaattccttccggtgctctgccatttctaccagctctctgtggctgatcttaggagtgtagccaacacgattgagtaacatctgctatcaaaaccattcatcttgactctgtcagattatttgaaggagccaaatcatccatataaatcacaacaaaccactagaagcacattagacttcaaaaactcatattgacttacctagtgaacatcatcactgcatttctgatacgatctagaacttaatcagagagtgtgtgtgtgtttttatgatatgagagtaacaaaacttaaaaaaactttagccctagaatcaaatcctcaattactagcaacccttactaatccatcctgtttcaaaagcacctagctattttagtatggcttaccatttttccaaaaaccagtgtcactaaagggcactaaagttacagaacaatccattttgttccagtttttacataaaagtatatgattctcaaatacccctcaccagagctaattgcaggaaggtatctgattctcagtttacctattaccaactgagaatgtaaaaactaaaagaagaaggagtctacctcatacttcttgtactgctgtatgtattgttcctccttcaccgccatcacttccaaatttgttttccagttctccatctgtgattcacaagggactacatcatcttctagctgcgcaaggattctgtaacagctcacacagataaagttagataagtcacatcccaaaggaaaaatggcaaggtttacatgtacaccaccaccaagatcatattataagttatatggtgctttattacgaaacttacttcttcaaatacgtcagcctctgtatcgctttccttgtatagtcaagaagagcattggactccttctgtgctttagccctcttctcttccactccagtcttcctcagagatatgtctcccattgctacaaggaaactatacatatttcttctgcatcagtttcccgattcgagatagcaacacatctaatgagagagctaacagtacagtcacctgctcagttcagtgtcccgtatgttcaacaaattagccacatttgcaagaacttgagctgaagagaccacatttgacggtaagctctcttgtgacattcctgcactctccaatatctctctaatcctagccgctacatcaacaaaatttccacccagagatctaagagagaggaacttggaaatttccaaaaaaacacaactttgtttgaaatcatagtaacagatcagaaactgataatgcccaaaagaagattttcataattcgaatcagccacgcgagcaaattaggagctaaggattacaagcaagtaccttgagcacgatattctgaagccttgagacgaaaatcgttagcgacaatggtggcagcctgagacttagcttgagaagcggtagcgagattatacaaatgggtaatgcttcgatgagtgtactcgaaattgggtacttctttgccgacagcttcgaactgagaggtgagccacgccttcacctccgatatccgggcggcgtcagaacctcccttggcttcactcaccgccgcgagatcaccggtgacgtcgctcatcgtctctaatctaatttggggtaaaataaaaattcacacacccagaaaaaatggtgtatcgcttctcactgttttggatcaaacgacgaagaaagcaatagaattggagtgattcaaacaggacgaaatcagttgcaaatttgaatttttgggtaatgcgatcgcgtttttgttggaaccctaaattttccagatttgggaaagagagataattagagcgatgttattggcggattttgaatataacagttaattcaaaaaaggccaatttctcataaagttttttttgttggtttaaaattctcataatattctttgtgactaacaattaacaacaaatctcaaaattttaatgctctcatatcatttgttaaatggtttggaagcattaaaagtgttaacctgtgaaatgatagtaatgacaaaatgatttcgtgattgaaataaattgttaataaattgttttgtttattgacgtcacactccaatatttttatgtataaaatgtgaagcaaaaaatttcaaaaccactaattatttcagcaaatacataatttggtccaacactaaaccaacccttctgtctctatctcatttgttcttaaactttcatctattttcgtatctgaataattcttttcatcaaagattttagttttgaaccacatgggatcaagtttgtgctgttctcgcgatccagatagcaccagacgtagtacgatggggagcactagcgaccggaggtggcaaaccggcgacgacaagtatctatcggacacaagcaccttttccgtgaaggagcaagagcatcagcttaaggcggccagacgggaggagcaaagacttggccatgaagctgagaaagtcaactcatgggtcaaacatgaatcagccagattcgaccatcgtccatagttgaccattgttttgttttgaccaagctttctatgtttttgtaaactattaaacagagttgtgtatttatgttaaccacacattaattaactatcaaaattgtttggtttagagaccacaagaaacacattacaggtttttacatcaaaacatgttacagataaattgctacacaaagaaagagctgaaaatataaacaaaacgagtttaagaaacgcatcggtatgtaacatgcgactcactgagctcgtctttgtatgtgaccttcatgacttgccctgtctctagtccatagtatcgcacaatcgggtctttgctcgataaccgaggaagctaaccaaaaaaaacattctaattcagagaaaagctggctcagagtcagagctactagtactagtaatgatccaaataccaaaaaacttgcttacttgtttctcctcaatactgaacttcttgagaagtgattccttctctttatcgttcagaacctgatgttttggcctcaagacatgtttgcttacgttaaccaacaaatcggtaatctaacaacacaacaagcgcaaccaagatgttatgagccaaatgtgggaacacataacctaacacggtactcaagataaagatatattacctcgaataactcgaccttaaaggagaaaagttcaacggctttaagagcttggttcgttatatgactttgcaaaaccagtatcagtccggttatattttctcggctaagcacatctgctgcaatgacgcgcatcgcattgactttaactataccagttccacaaaacactaccgagatctgaaattcaaatcagagaaattgctatgtacttgtgacttcagtgacaacagcaaacgacgataataaatttcaaggaaacaacctcgctgaggagttcttttgcagttcggcctaagccaagtactatattattaactctgaataggagaagccaagaacagagaataatgtgaaaattgtttattagaactcttaaccttacaagtattactatggtaattacacattaactaactgattagtgctaacaaacccaattacctaaccattcttatctaaccaaatttaaaccagtcgaaccatttagatttttgccagaagaaacaacgtctctgtttcaaaaacagaggaatcagataaaaccaaacctaactaggaaccaagctggaaatcagaggaagtctttaaaagtagaatgctttcttcagacaaattgcatattacatacaactaaatcaagtcaatggaaaacactaagtagatttcaaaagctaggcagaaaaatcaacatgcagagaaagaaaaccatcagaaatcgaaatcacattcgtattcgtatcgaattccaattacctttttcgaagaatcaaagcgatgtttggctgagatacgaagtagatctacgtcaggatgttccccatagagcgctcgaaattgctggagggagaggttaatatcttcgtcggagacatcgtatcctctgtctcggagcatctccatggtggttcgacgtgccaggtaatatttgtgacactctacacttgatttactaatggaatgtccaaccactatctctttccctttcccctccatcgtctctctctctctctcggtctcggggaaggaagcaaagcttgagtaatgtgaggggtttgaagatgataagacccgttgtcgttttcaataatcagtttacccgtgacgtttttaccgtgacagcggatgaagtttacaaacagacttggatggtagccaatgatcaagcaggtgatgtagtcaaaggcgattgttctgtaactttagtgacactggtttttggaaaaatggtaagccatactaaaatagctagaagagataagatagtagatgacgttaagagacaattactgtggaatgcctagtaacattttcgttaccgctactgccgtaacaggtcatctgtaaaatgtaacaaaaacaaatttgtacaagaccaaaaggccaaaacagcaaactctaatttttcagtttgcatatccatattaaaaaaaggtttagctattattttcaaagaaataaaatagttctaggtttacataaatattttcatcctgtttgtatttgtttggaaaaaaaaatcattttataacatgtaaattacaaagatcaacgtgaagaaacaattgaggcttgacattctaggtttgagctttaggccacttcttataatatacagcatgaaaacaaacaaatcattcaaagaacacaaccaaccaaacatatcttaagtcaaaagttatatctttagattctttttcttctcttcacattttcacaacaacatcactcaaacgaatccaattactaaagacaacacttgttacaacgtaccaatccattctcattgcatccattgcatctcttaaacccatcttcttgttcctcaaacactttagtactaccgccacaattagtacacggcacaaaccttgcatctccgcagctatcgcaggctccaatggattcgcaagcaggaaaatcttttaacatctctgccagttcacctccatcgttgagtatcttgatctcctcaattccaccaatgcggacgcctcttataaacacctgaggcaaacaaaccggtttctcttcgccgagtgcattctgaagctctttcctgtatttggagtccattgagatgtcacgctcctctaccgcaacctgaaaccctctcaatatcgctctaacgcaacaacaatcttcatacgtctttcgaattcctctgaggctagtgaagtatactactatcttgttctcgttatcttctttttcaagcaatcttggtttctcttggtctttttccgaagtctgagaactcaatggactagaagatacatattctggtaaactgactaaaaccgaatgatttgagtggccattgctactgttcttgcctagctgtttggaggacagtgctcttttgtaagatgagataatgttaggatctaaatcagagagaaatgattcttcagacatatgtttccacagaggttgcttaggtttaaaaggcaataatctccaatcttcctcatcttcgtaagatccatacgcagacccattaataaccacgtctcgattcgtgatgggtttagaaaaggaatccaaatttacgacggaattactcttacttgtatcggaattcgcggaatcgaattcgtcgtcgaggtcgttcatgagctcccatgtgttgatcactgagtcaggagagaacgagtcgcgagcctcctctgtttcaggcatcttcttgttactcttcccggaaacggagatgtgaggcaatgtttgtctgtcgtcgagaacaagagaaccgtaagtggtcgatgtaagagagacaaagtggtgtgtgtcgccttttttagcaggtggatgatgaatcgacggcatcggaaatgtgaaagctttaggtaccgatgaagaagggatgttgaattccgtctccggaggtgaattcaaaatcgatgttatagaagaagcagaagcagaggaagcggttttagaaacagaggaacccataatttcgaagcagaacagagaagaagaacaaatgtagtttctacactctttttctgggtatcttgtactttttcttttgtcggagaatataaaagaagaaagagaaaaaagaaagacagagagagaagaaacaggtggaaaggagctgtctaagtaagttagaggtggaagatggtgaaaacactaaagaagacgattgtgatgttgattcgtccatatcgaatttgctttgatttgataactaaggtaagtatccatttgatccttatttttagagcttaatttcagaaaagtaattataactgaaatcaaagaaagtaaactgtcaagatcctcaaaaattgcataacttccaaacgtgaactagccaatgactcccactaatataatttttctagggtaataaaaacagagcaaattaatatccaaccttatagaaacttaattgttatagaagactaaaataaaatatcataccacacattcaaatcccgacgacacatacaaagtaaaagttggatataagtttactgttagagaaattgtgctgtgcactgatactttctgttatatgagaataaacatgaagctgaatcgcacaaggaacactcattgaagattcctttggtactttgccttttaataactggaataaataaagaaaatatcatcatcatcataaacaaaagcaagatgggcaaaagaagttattttagtttcttttatgtataaaaagaaggaaatcttggtaacttatccgtaaagaaagaagccaacgcgctaaatttgtttagaatatttcaatatgtatgtacttttttgcttttaccaacagaaaaaggaagtgaaatctttacttactatttgcttataatttcttcatgtcaaatttgaaacaagtttctgacataactcgtcctacaattagtcttgtaacatttttaagctatttgaatgattctcaactaaaatcagctgaatctctagactctaggaatgtaactcatcaaatggacgaatatagtccaaattcacatatcattcatcacagtttgaaagtaattcacttttggaaataagaaccagaagacaagcatcaattgacacacatattataattctctcaaatcagcagaaacacacacaaataattaacacgtataatatatctatgagcaaacaaatcacctatacctatatatttatctcctctataaacccaaactcttcaatcttttgggacgattcacaccggaaaaaaaaaagctgaaaatcgagtaggagctaggaaagaggtgaagaatgtaaatgtgatcatgcgagatgtaaaggaggaccaacttctcggtttctgagtgaaccagcaatctcgtcggcgatggacaaacatgttaaaatccagccgctcagagcaaaccaaaccgttttcgtcaaaagcatcgccatttccaaaggcatcgccataatctctcactctctcagttttgtgagctcaattcatttggctgaagagaagaaaaatcactggaaaaattgggagatccaatggtggaatttttacggtaaaggagatgaaatatgaaagaataatcaggcacgtgggacacgagaggatctttccagcaataagacatcgccacgtgtgggttctgttcaccagccgtgtctctttctggccagttaggacagcgttaggggacacgtcactgttcgaccaataaaaagagaagatcgcaacccaaactttatcaacccgacccagtggttgattacttggtactatatgttatgcaaattttgatagtgtgtttattttgtttttaaataccaaaataaatgtcatttacgagctagctgacatttccccaacgaactaataattattcccttataattggacatattttgtttcctttcatatttataattaaacttttgtatttttcctatcgttagttgatagtacttcacaaaacaacagaaatattgcataaaaaggaggcataatgaatattactcatgtgattggaaataaataattatgtaaaataatttgatgcaacaaacatcacagaagcttccttttgtcacatttttttttctttttagatagttcttggaatgttatctctaatcaaaattagggctaatgattttgctttctttatagttaaacgttaatattattgtccagttttgaaatactgaaaaaaacgagagagtacacaaaaaaataagaaagagaaaataaaaaagtgatggtccaatcggagcggcttattgggtcatagtgggctcggaaggcaatggcccgtaatccttccaccgtcaagagcgggaggtggacgctgctctgtgaaaccagcctcacgcggtctcccccactctagaagacatgagacccgagccttcgctcgaagcccatgcctcaactcccaacttggaatgggcgggccagaatatagcccaacccgaacccggcccaatgagatcgacccaacgtcccatccccttattgtctccacttggatcacaagcccgcgttactgagttcgacgtacaatactcgctaccttccctattatatacaacaacaaaacgttttgtttttccgatgtgggacaaatagctctcttaatacagttttcgtttccaaagggaacaaatcataaaaatttcatcttcaatctcaggaattatatctttgaagcttgttcgtatcaaaaggccaaaactttcgaccacttccaatttttgataagattggatttagatctttgatgctgttacacccacaagatgagagaattttacaattcgtttaatggttcttaagctagtaaatgtagctgttagttttgataagattcattactaattctcgaaagcttcaatctttgcaatagttttggattcttaagctagtagcaagaaacttcccaaaaatcttgtgggtttaacagcatgaaaaataaaagaaaaaaacgaagaaagctaatctaggggagagaagtaaattgacagagaataaaacaactactgtgtccgagaccatcctggttttgagccattgttagtgtgctatcacctgagtgaaaagagagaacaaccaagaaacaagtaagataagagatgacaaaagctatagtatgaaaccacatttctagtgttgctacttaccactatctgaatggtttgaagcttctgattgaataggtattcgatttagtggatctccttgtgtctgcattgtctctttttcctgatgataacgatgttgctgcggtattactcctagcagtccgttgttgtttgcttcatattcaagagttagcagatcttctactgagagattctgttggcattctccatataggtcttgtagtggcttctcgggttgcgttagtcctccttgcagtccgttgttgtttgcttcagatgcaagagttagcagatcttctactgagagattctgttggcattctccatataggtcttgtagtggcttctcgggttgcgttagtcctccttcagaccgaggttgtgatatcattgtatttaggacgtgatcgatcagtagaaaccacttcttccattgcttttctcttattactactcaacattggttcaagttgttcggattcaatttcttggtggagaggcaagatttcaatcactgatgactcttcttcttcttcttctatctccggtttagacaccacaatctcttctatggcaactggtttctcactttctttcttcaacttcgttttcatcatatgaggtttcaacttggtaagatcagctaacttcactggtttcaagaaaaactcttcagctccttcttccaaacatctgttggaagaaaccaccacaattttgtagatagttcaaagacttattcaaaccaaagaatcgaataatagtatccacttgccaattctcaaatcaataatactcaaattaactttaaagaaacagagctcttacctggagattcttgcaggaacgttctcagatgacattataactacaggtatacttctaaacgccgctgattcctatacacaacaatcatgtagattactcagaagcaaatcaattgttcttttttatcaaacaatggcataaaggaaagtttttgagtgggaaaatattccaaaatgagattttcaatttctccattgacattctcatttggaaaagaaaactaaagtaaaaaactttatttctttttctggaaacgaatttagccagagatggaaaagacagtaaccaaattgagaagaaataccttaactttcttgagcaaatcataaccagtcatgccaggcatacagtaatctgtaattattagatttatttcaacttcctgctcaaaagccacaaattacaaacaaatctcaatataaccattcattgcaaatttcgaaagtaaccaactttgaatcatgtaaaagatcaaaaactgaacctgatgaatttgtggcgatgtagagagtgcatttgggtcgttgtcatctactcttaaacccagaaattccagagctttagagcctgaatcaactgtagttactgcaaaacataagaacaagaaccaaataaagaaacctttttttcagtatatcttccttctctttctccaatacatatagcttaaagattatggctttttcgaatctaccttgacatgaagacttttgaagcaatctctcaatcattttccgatcaaaaagactatcatcaacagctaaaacatggaactttgactctgtttccattaccattgtagatattcaatcgaaaaaaactaagatctgaatctaaaatagacaaacccagatgcaaagttttcaactttgtgttttgttttgatatccttctttagaaagagattaaaaaaaaaacggtttttttttctctaccggaaatgttgagagttctgaatgagcttgtaggagagaagaggagaaataaaagggggtttgtatttttcaacccaaatctcggatagtgagagagagacgaataaaaaggaaataagactaattggatctagctttggtttacggagtaagcaagttttttaaatgatgaaagtaatttccaaggagacaacgagagaaagaaatttaaaaaaaaaaaagactttgataatggataaaataaataatggaaagaaatctatatgaagattttaaaggatttgtttagcccaccaaagactttttttttttttaagataagaggatgagggatttaataatgtgtatactaccacaaccacatgcattgctattggtgggttttaacagccatttgaaaatatatatatatagaaaaaaccgttcattgtcaaaaagaattgtagtttaacgtttaaaaaaacaaaaaaacttatacattagttagcaagatgttcgaaaacaagatgttttaaaagagattaaataataacgagtttttgtgatgacagtattttttattttcgattttaatatatgtttattgagctgctgggatgtcaccgatcaaataatcgttgaacctaattaagaatttgcttataattttgaatgttaagagtggtttaaatcccaaaaaaaaaaaaaaggaatagaattttgaatgtttttacggtggatcgttgatgtatttacaatattcaatttgtttttatttatactctgcacaaacattcgaaataatttgtaatggtcctgattgaaagagtgactagtggaaaagattttcgtcggaccacaacatcgtccctatttctatttagcagtttatgttgtggggtttgtgtattcatatgcgagtcgatgtgacgtgttttgctgcgtatcatttacttattggatataatttttatgttttctttttctcacttttagtacaaatgtggttggtctctggtgtaatactcaatcagtaaattagattgataaatctttttttttgtgaagttaaattggtaaatcttaattatgatgattggtaacataaaaattatatgaccagtcaaagtttttagtggttggagataaataagaagagatgaatgtattatttagagaggaaaatagtagtataacggtaatttagttgtaagttcccatgctacaagtatctcttgttaatgggatttgttaaaaatccacaatataaaatatatagtataaatgatgttttatattctaagtattatagatactatttttaaatgcttttacatctacgaacagtattaaataaaaaaaatgtaacctaaatgtgaaatagtgttttgcgctcatcgtattatacttggcgatcagattcgttggcaaaagaataagaaaatttactaaatagttaggtagtgtggtagtggcaaagacatggcaatgttcacttgattctctgccaaagatttgcctcccatggtcatgcccatcatcaccactatcatcatcaatcatcatctttatatggacgacacgtatccaaagtatggtagacacatgaaaagtccgtccaataaccaatactctcttatgggtctagtgggttccatattgctctctcactttccacatttcctatctcttttctttttctttctatacagtcaatttttgttgttttatttgttatccgcagcaatatgacaatgtataagaccaggggcggacacacgttggtcttgggtggggcatgtgcccgatactcaattatataaatcttatataagtttgcattatgtaattaaaaatgtatgtagtgtagtggtattttacttaatggtgccccacattaacccaagttcaagccttgctatgtctttttattgattttttataattgtgctccatataaaattatttcctggatccgccattgtataagactatggcttttatttttgtttgttgacataccattggctatgatacaaggatcctagtaatctcaatttcttaaactaatattgcacgtttcacctttttaccgccacaaaattatgtgtacaaaactagctagtgtaccaccaaaacatatatgtaccaccatactgaaaaactatcggaaaaaagaattgagtccagcaatcgtagagctcaagaagcaagagtcaaaggatcatggcgttgactataaaagcgatttgatgaattaatggagtgatcatgaaattgtaatgcacgatgtgtcgggaagacatgctttcaatttcaaaaaaaccctaaaaaaagagtcaaatagatcttccatcgagatcttgtctcatgaaacttcagcacaaccgtccatgactctttgatgatagaggacccctcctcctcttcaacacattcataacttcatcatcacaacttttgaccctacaattttacaaaatggacaaatttgaagaacaagacgtctattaacaagtgcggtaaatgaaggcattaagtgagtcgatgtaaatcggatcacacattgtggtggataaaatatttttaataatctttagaaatggttagataatataactgacggtgaccagcaccttcccctgtcttcgggcttttttggccttcatggactcatggtagcagctctcaatttttgtgtgtatttctcttgtgtctcaatattttcaacagtaaaaagaaaaacatttttttttcttatttaaccagaaatcaaccggttggtggaatctttttgtgtctttatcagattgtcatgacttaatgagtcgtattctgagctcactaatttgacgacgataaaaacgttttccgattatttattataacaaaatctagaatccatgtaatagccaaacaaaagtaaatatttgacttgttctacacatataataagtacatccgatctttacattgaaattttcatactctgtgatttgactggttgaaagaaacgtattgtgtaattatcatatcttattcagcgaatattttgtatttgacttgtaattttgatattgttctatattaagtacaaaattatatccatgtgcataataaaataagattaaagattggtataaatgcaaagtcaatgtcacgaatattactaacgcatagagagacgttggcatgtgacatgatagaagatacggtggatcgtatctggtggcgtccatctttgctttacatatatagactattttatgattaatactaaagttataaaaacttttttctaagggagttttaagaaattaaactttaattgtgtaatatgttaacgttatggaaaagatgttacttaaaatcacccaattaatagaaaaatagtatccaatttttgaaaacaacaacaattgatgcgtattacgagtggttgtacccaatcggtcttatagttgacaaaatatgtaaaacaattctgtatcgataagctacactattattagtatatgtctttatttgtttcggtgtgtataaattagtatcgaatcacgttagctcatcgtgatatcattaacaataactagattattatataaaagaaatgagcttatgttcttaatacggtgaacccaaacctcagccattatattaaaaagatacgaccgtacgttgagatctattttgagaatatgaacagctcgacttgtcgacaaaataatatgaaaaaccgagttaataacttttgcatattccgaaaacttcggttgcttttagttgtgcgatctcaaattttcactgatttttgaatagaaaacggtttatatggaagtatatatatcatgtaacataatgttagcagaaacatattgttagcttttagtcctacaacacaaaacaggctactgtcaaggttaggggttacccttacgtattttagcgagaatattttaccgaataataccatttataacattgaaaaattaatcattaaatcgtatggctataatcaattctctacaaatctcatcgttttctgttttcctattgataattttcacaatttataaactacgtcgttttatctgtccagaaaaataaaacatttatatacaaaaatgtattgtatgaaaatttaaaaatatattccaaatttctactgcttaaagaatcccaaaaggaacaaaagaaaaaacgagtggctatctcaagagattagaatcgttcttgggatcaggctttattcaaatggcattttgtggaaaaggctatatatgacgtaattaccattaacctttttgaatggttactatatattatatacgaactcttttacgtgtaaattaaactgggataacaaagtccatttcatgtgaattttaattaagttaaaatgtagatgatccttatttttcctgtcccaagatggtttcatcattagtctttgatctgtaaaaaaataaaatactaaaccgaaatttaaaatgcccttacaagcgatgttaggacacaatagacggtatatggccagtgcccctccgatagagcacaaggccaagggaaagcaaatattacacaccaaatctttatattttatgttacgtatcatataatacaataaataaataaaagattatatgattatgttcgtgtaactctaccaacaaaaaatctccagttgattataaagctaacattaaactcctttctaaagccacaactaatttatttggttggtttagaataatgttattatataagggtgtagaccaaaatcaatctcttgaaggagcgagcaagctagggttaaagagatcgatgttggtctacatcgctgaccttaatattcataaccatataaatattatatattttaaaaaatcataaacgaaagttacataaccaggtaagagtaagatacggtatacggtattaccgcgattattgggctgatctggacatgttattgggcttattgaacttcaaatacaagtgatgaggccgcatattctattttcctttttggtgttatgatcgactaaacaaagaaacttcatacgctaaaactgtataacttccaccaacgcaaacaagagccaaaaaccaatatttctaaacaaaccaccaagctcaccctcactgcatatctccttctccgaaccacctttagccgaaccattgatatagtttctcaagcgatgacggatccgaattgacggcaagttatgtgtgagccgtgaggaatttgatgcattagtgaactacttgtcgcaacttataatcttgtgggttgcaaatagggttttaatgttaaacatctttctaatggttgtcttaatcggtaagaaaataaactgtaaaagtgctttacaaaaacgtgactctttttcttttcaccacaaacagaataattctaacataagacagagagacacacgtcacaaagtgaaaacaaagtatccccatttaaattaaaacagtttaacaagataaaatacaagtccgattttttcatctcccaaagattctcacagttaaaaatagaaaatagaaaaagtatatattctcacaatgctataaacgcttgaggagcatctgatttatcaataaagagaactaaaactttacaaatccaaaaacaataaaattatataaatccaactactttaaacgattttccaactagaaatttcgacttgatgattatagtgtcactgttttgcgtatctttatttaaatctaatagtctcatggttcccacatgttgaaggaacagaataactaattagaaaactagtacttatttatcgataaagaaaaatattattcttaaagacaaaaaacatgtaattaaaagtagtaacatggaatcgcttctcctaatagcttatgcttttctctatttattccttctctctcacgtattctcaaacaagaaacatccaaataattgctaatcgtgcatataattaagtaattaccattccaacttacacttaaacacacatttttcacggaagaggaggcagagtataaaatcaatgccgatcagtcggaaaattctaacgtgggccgctttggtggcaattatggccgtcttggtcgtcttagtgggtccatacatcattggaccggagagtatagagggctcgaaaaacgtcctaaccacagcgaggacaatcctccttcccgtggatggaccggagagcctggactggacccaagaggagaaggcccatacgttggcgtcactgacggtcgcatcctcaaatggagcggtgaagatcttggctggattgaattcgcctactcatctccccataggtttgttttatttatggatgaagtcatgcaccaataataagtagactgtttcaacgcaaatatttgtgtttgattatattactggttaaaattttatatttatatcttggttattatatatttatatctttaacaaacattatacacatttttttggtaaatttaataatgtttgaaaacacttaattatcaataacattggttatagacaacacaattatttaactatattttaattttgtgttgtaaatatatgaagaaaaaattgttcgagccataaggtggaacctgcgtgtggaaggcctttgggacttagcttcgagaagaaatcgggagatttgtatttttgcgacggttacttaggggtaatgaaggttgggcctaaaggaggattggctgagaaagtcgtggacgaggtcgaaggtcagaaagttatgtttgcaaaccaaatggatatagatgaagaagaggatgctatctacttcaacgatagcagcgatacgtaccacttcgggtattataacatcacttctctaataatttttttaattaaaaaaaaaaaactgaaaccaaaaaaattggataatttttagtgttctatgttgagaattgagatggttagaaatgataatttgcatgtttgtattttataattttacaaattgcaaaccacaaatgaaaataaaatttctccttctaacgtttgaggtttacaattattagataaaatctttgttttaaattatacttaagattgtagcttcatcatctgagaagaaagatagtaattaaccttcaggtttttaatgttcgctcgtgtttacaactttttttttttttttaaacgtataaagtaaaagaaaaatgttcttaagacaacaaaatcttaatgtggggatattttgaaaatgattttttttttataaacgttacattattatttggagcagggacgtattctacgcttttctgtgcggtgaaaagacaggaagagcaattcgatacgacaagaagacaaaagaggccaaagttataatggaccgtcttcatttccctaatggtcttgccttaagcatagatggttcgttcgtgctttcttgtgaggtcccaacgcaacttgtgcatcgatattgggccaagggacccaacgccgggacccgtgacatatttgcaaagctccctggctacgcagataacatcagaaggaccgagacaggggatttctgggttgccttgcattccaagaaaactccattttcgaggttatctatgatccacccgtgggttgggaaattcttcataaagacgttgaagatggagctcttggtttttctttttgaaggagggaagcctcacgccgtggctgtgaaactttctggcaagactggagagattatggagattcttgaggatagtgaagggaagaatatgaagtttataagtgaggttcaagagagagatggtaggctctggtttgggtctgtgtttttgccttcggtttgggttcttgaccgtcaatgatttatacgttttacattatataagtttctcatgtgtgtggatttgatgataattacaggtttaaacgttaaagtttttgctgtatccggttagatatgcatctaaatacatcaaactcttgattttattaatttactgaaaatatgggttcttttttcttgttaggtaattttggtttctttatggttttctctccttttaatccgaggacccatttttgagtttgaatatctttagagtttgttttttttgggtttattcttgcagatgaaaatgtttcttttaatctttgtatatattacttcaaaacaaagatatgcctatttatgaaaacaaaacaaaacatgtacgtatctctatgagttttcttttaattaaaaactttacaagaaatttgaaacttgtgagtctacgaaccggcttgcgcagtccacttaccataacaggcagtattagagtgggatatttgtaaattgaggaagtcactgcctcactggtgacagtactttgtagatacctttctttaattggttctgatgtgtttggaattgtttgtttggaaggatttgataacaaataaaatacaagcaaaaaaaaaaaagatatggtcagaactcagaaggcaacacaacgaataggttgccgagtggggctcatgccgttgattcttctgctcactgccccttctcctgtctattcacttcctttgtcccttatttttatctttatttttggtggtgaaaatttatgtttcatttatacaagctaaaatgtttttgttataagtcaaacaaaaacaattattattaataatattggaggcttttattgtacttttggtttgaaattttcgaaactacgtctcttaattctcatcctttgatattctgtgcaaatgaatatttattttccatatagatagatattattttttttgttggataacatttacactttacccaaacttgtaaacatgatttcaccaaaaaaaagcttgtaaacttgaatggaaaaaaatcagagtatataaaagatagtcttaaaattggacaatgaagtaaatgtggccctcaatatccggcatttgcaagcaaatcataccatctacatgtatatatactaaaatgaaatgctttattaggaaggaaatctttgaacagaaaaatagaaataaggtaagacaagaaaaaataacaatgaattacaatccacaaatcccaagaatgagaaaatttttaatttcctaaagaatattttgacacgaattcgacatgtataagataaaactattaattatttcagacgcctatatataaccaccataactcttactctgttaccaccacaaagacaaaacaaaaaaaaagaggaagcaattactataggggaaaaaaaaatctgaacaaaatgatgaaactcctcttggtggtggcaacttctgttgcccttatctttagcgtcactgatttatccggtgagggaccaaaacatggaggagaatccatgttgacagtccaaatccctgatttccgtctgattcctaccaccggagctttgggaccggagagttttgtctttgattttttcggcgatggtccttacaccggtttatctgacggtcgaattgttaagtggctagctaatgagagccgttggatcgatttcgccgtcaccacctccgcaaggtactcacaaatttctccatcatttttaagaaaaaactttgattgtttttttgtttcgtcgtttagttttgtggttttaactccttcaattgtatccaccaacttcctatgtcccatcgaaattattgacttacttatccgaataacaaaattacctcctttgcgtaacaaaaaataataatgataacattacctcctttgcatttctaacagtgaagaattacatttgggttgttgtattaatcgcttaatttaattaaaaatgttaaatagtacaagatttagttattattcctgagtctctgactaacgaagtaacggtgaaaggtacttcttttgtttctgcatctgtacttcaacttatcacgtggtcaacttggttgtttctaaactgcaaatttaactttctgaatcacaatttttttattttagcatgcatgtgaagttcccattttggggcattctaaaactcaactgcatgtgcatatatttgcatattttgactatgaaacttaattgcttctttagtttttttttttcttgtattgtgaaacgttgtaattttttcagagaaatgtaaagtaaatgctgacagctaaagaatgactggggagtaacaaaatagaatgtgtgaatcgtgattgacttttggtggtccgggtttgctagcaaatactactatgacacattcaaatagattcaaatatatatatattttaaaatatagaactatatctatatatatatgtacatatatatataccactaagttttacatggtggtgacttaagtttcaagtttattagttttgggtaagagtctaagagataaattattcatttggtttgaaaagccacactaaaaagatgaaataaccgttttctgagaggggaaacaaaaactctacaacaactttttttttttgggaaactgagagagtggcaaataaaacttctcattaaactcggggccttattaatagccaaaatagttctgaagaacaattaatgatggcaatttatgttttgtttgttcaatgtagagaaggttgtgagggcccgcacgagcaccaacgaacagaacacgtgtgtggacgaccattgggccttgcctttgacaaatccactggtgacctttatatagccgatgcttatatgggccttcttaaagttggcccaacaggtggtgtcgccactcaggtgttaccacgtgagctaaatgaggcccttcgatttaccaattctttggatatcaatccacggaccggagttgtctactttaccgacagtagttcggtttatcaacggaggtacaaaattcttggaaatttaatgaaaaacatgtttttatatgagtgaaaaagatcattgtttatatgttttttttttttgttttgtttatatgatgcattattagtacgtaaattgttttttttttccaggaactatataggggcgatgatgagtggggacaaaactggtagactgatgaagtacgacaacacgaaacaagtgaccactcttctaagcaacttagcgtttgtaaacggtgtcgctttaagccaaaacggtgattaccttctcgtcgtcgagaccgccatgtgtcgtatcttacgttactggctcaacgaaacgtcggtaaagtctcaatctcacgataactacgagattttcgcggaggggctccctgggtttccagacaacataaagagaagtccacgtggcggattctgggtaggcttgaacacaaaacactcaaagctgacaaagttcgccatgtcgaacgcgtggcttggacgtgccgctttgggcctgccggtggattggatgaaggtccattcggtttgggccaggtacaatgggaacggcatggccgtgaggttgagcgaggatagtggcgttatattagaggtattcgaaggtaaaaatgaaaataagtggatatctataagtgaggttgaagaaaaagatggaactctttgggttggatcggtgaatactcctttcgctggcatgtataaaatctaaaattgagtaatacaaatatgtttttccaacaatatgattcatatatagataattagacgatacatcccccctccccctattcttattttttaggataacaactaataagtccgtttagtaccactttatattgtgctaggtagctacatgcatgccttttgataatttaaactgtgaacaaaatattaatattaaaacagttattatttataacatccacgagaaaaacacctcataaccaaaaaccattaatgaacctttggtttctttctattgagctctctctaggtatcttacttaggcaccatgcttcttttatttatacatacatacggtaattgaccactgcatgcatacaaacatatagagtttgtgttacatgcgaaatcatggcttagcttcttccttctgaggctcaacagtttttacaacttcgttggcctcggcttgactgcggcaacagtatatgcacagtccattccaccagtacccaccgcaacatccgaacctacaaccaccaccaggcaagccttgctggggctctacaacagcgtcattgacctcgacttcggcttctatagcatcagttgcttcagtactcggcttcacttcttctttaactgcacgtgtgatatacatgttatacaccatggatcaaatatttaatcatctgttaccaaaaaaaataaaaatttaatcatgcgaaagtgtgaagggaaattatattatatagagttgcacacaccatgtgtggcatcgttggatgtgtccgcaataacagcaagggagagagaaaagagcaaagccacgagaacgagagacatgaggtttcccattttttgttttcgttacacaaaacacttagcttatttggtttattgagggaagatgattttgttagtgaagtgtatgatgagcacagcacatgtatttatagttgggcagcaaaacttggggacaagataccagtcaactttgtcgcgtgatcgaagataatggcatatatatttatagggatatttctataacgaaaatgttaaaaaaaaattatatgatctttagagaccatatataatagatctgatcataacctatcgtgtttacacgtgtccaccagtggtcacaaagtcctattcttggacttaaaagttcaaacccaccgttcgaaatgataatgttagcttctatccattccaaaaacgaccgttcgtccgttcggccttgcctttgacaaatccacttgtgacctctatatagccgatgcttatacgggccttcttaaagttggcacaacatgtggtgtaaccaatcaggttttgtcatgtgagctgaatgaagcccttcgattgaccaatggataggatatcgatccacggaccgaagttatctactttatagagttaaaattatcttatattatcttaaacaaagaacatgtttatactttatattaataaaaggagcatgtttatatgatggattagctcgtaattgttaatttaattgattaattgagggatagtacgatgagtggagacagaatcggtagactaatgaagtatgacccaactacgaaacaattgaccactcttccaagttctaagcaacatagcattcgcaggcatcgtttggagtaaaaacggtgattactttatagttgtcgatcgatgccaccacgtgtggaatcctatattactgggttaacgtctaaattttaggaaaactactaaatttttgtggaaaggcttttggggttatccgacaacagaaatagatccagaattcggagtagccgggtaggcatattgaacatgtggcttggaactgccagtggactggatccattcggtttgggccaagtacaaaaggaacgacatcgtcgtgaggttgaccgagagtagtggcgtaatttcgaataatttcggaagttttggaaggtaagaaatgaaaccacaaaaaaaatgaaaatacaaataaaaagaaacatgaaaataatgtaagtggataactgggtatatctatttgaccatcctcattcaacaatttttcacaaatatctttcacgaaaaataatagtaaagttaaaaatatcccaaaaataggagttttaaatgtctctaagaagacacagttctcatttaaatacactcatatttttactctcttttttcataaaatattgatgtttacgtgtttgtagtttgttacataaagattgattttttaggtttttactttatttttattaattaatattaataaatcttagattttaagacataatgattaactattttatactacaattagttcaaaattgttaaaaaatatttaatttttaaaaatgattaaccaataattaaacaatgattatttttgaatatatgtgaaaactctagaacatcaaactttttaggaatacagaaaatgtttttttatatatttaaaactatccatttaaaaacacccatacaagtaactaatgtagaaactaaaattgattaatacaaatatacttgattcatacataattagacgagatattcccctcgaatacatgattttacagcagcacctttaatgtttacgattttatagtagaatcagttattctttattcttaacttttaggataataattctgtttggttccattttatattaacctatggcttttattgagctagctagcttagctacatgcatgcctcttcataatttaaactgtgaacaaaatattataatccatggtattaaaacagttgttattatttggggatctttctttactcaaatgattaagtccattttattccgtttttcctatcggaatttgacttaactcaattgtgttacccgtataatatgaattggttatgactcgaaatttgtcaaaaaataaattaaaaaacagttgttattatttataacatccacgagaaaagaaacactacataacaaaatacatattatatgaacctacgttttcttttattgacctctaggtaccttcttaggtactatttttgctttattttgacatacgtacgtaatggtaattagctatgcatgcatacaaacatagagagtttgtattacacgcaattcatggcttagcttgttgggcctcaacagtttccacaacctcgtttgcctcggcttgactcctgcaacagtatctgcaccgtccacgccaccacccaccgcaacatccccacctacaaccaccacggccaccgccaccaccaccgccaccaccacggccaccctgctgaggctcaacatcgttgggctcaacagtttccacaacctcgctggcctcggcttgactcctgcaacagtatctgcaccgtccacgccaccacccaccgcaacatccccacctacaaccaccacggcctccgccaccaccaccgccaccaccacggccaccctgctgaggctcaacatcgttgggctcaacagtttccacaacctcgctggcctcggcttgactcctgcaacagtatctgcaccgtccacgccaccacccaccgcaacatccccacctacaaccaccacggcctccgccaccaccaccgccaccaccacggccaccctgctgaggctcaacatcgttgggctcaacagtttccacaacctcgctggcctcggcttgactcctgcaacagtatctgcaccgtccacgccaccacccaccgcaacatccccacctacaaccaccacggccaccccagtcttgctggggctctacaacagggtcattggcctcaacttgggcttccgcgatctggggtttaccgtcatgtttttgcgcctctatggcatgggttgcttcagtacttggcttcacttcatctttagatgcacgtgtaataatatacatgttttacaccatcgatcaaatatttaatccatagttacgcgaaagtgtaaaagagaactacaaatatagagttgtacataccgtgtgtggcatcgttggatgtgttcgcgaaaacagcgacggagaaagaaaagagcaaagccaagagaacgagagacttgaggtttcccatattttgttttagttacacaaaacacttatattgaagagtgcatgagcacagcacatatttatagttgggcagcaaaacttggcgacaagaaaccagtcaactatgtcgagtgagggaagataatgagttaatgacatatttatttaaggggatatatatatatatacacatatataaaatgtaaagaaaatcatatcaaaagatcactataatccatgctaatagatatgatcgagaagtctcataaattgattgagaaagattatatagaatctttaattctttgaaatcttttttatcttttctagttttttttcgcctaattcgagcttttgttttttcaaaaaaagaagttaaagctttagctaaaaacatctctatcagtaaaataccttcatggtttctcaaaaaaaaaaaatattagtattttaataaatattagttatataattaaagtttaataataaaataatatttgatcaatagatgatatacaagtatttttatgcgttttttaaagtttctcacttgagaaactaattatattctttttcatattttttgattatattttatttttatattgaacagtttttcaatgagaaaccattgatgaaaattgtttaatggtgtagcttctattcaaaattcataattttaacatcgataccattttgtaaatttatttttcgaatacaaattttgaaagcattttggaattgaggaatttgtttgataatccaattatatatggagtctaattaggaaacaactttgttgtatatagttaattgaacgatgcaaatcggcaaaattaaataccgttcgagaatgctagagaaaaacaggtgtatatttttataattacgcatcattttaattacatcagtaattactagaaactcacgtttatttattaattaggtcgctctttaacaaattgcaagcgtttctagactcttatttaaaagtatgtttgcgaagttgtggacaacatactgtagctctgaaagcaaaaacgtattatatttgcaagtaacacaatcagatctgagctatttagtattatgatgaacggaaacgttaaaaaaacgtttactttgttaaattgcttacaagaggagtcagtatttttatactaatacttgactgttattatatactcacaattgtcgtcaaaaaagtatataataactaaaataaaaaactagctaaaccaaatattattactttttgctaaaaaaagtaaatatcatcagaggaaagttagattgtgccttgtcaaaagacctagatgcaaatacaataccatcatacatatctctttggttactcactagtcactagtgaacaaatgaaattaatatcacaatttcaacggatacagttttgtcaactagcagtactcatggatatatatgttccacgctaataatattatattttaataatctaaaatactgcaccaactaaaaatttaatcactatcctctgtaacttctgggatcaaaataatatttctgtttcttattaattgattttctttgaaaaaaattgtttcaaaaatattaatattttagatttttatacaatattaattagttataattgatgaatatcaaattttaaaataaataactaatattattagtttaaaattataaaaaatataaatcacaaaaagtaatatatttataatgagctttaatatattttttgatatgtgtgtttttttagaaaatcaattattaaagaatagaggaagtatattacaaaccagtagaaataagccaaaaaataaaaataagaaaaaaaacaaaattatatcctttttcaaactgaaattttcaatcgagtgaaatatttcatatatcaaatttgaaatacctgtttaattttaatgtattaaagtaatgacagggttagcgataagttgacaacatcaaaattgaatcatatgggtagtttaatcagctggtaaaggctcgagttattttcaatattttttacttttttttttgcgtccaaacccataaaataagagttgaacgttgaaagccatatcaagcatcgtatgcttcaacagctaaactattctctgtggttccacgtgtaaatgccatgctctctactaacctacggttcttacacgtctccaatggacttcaaacccatcgttcgaaatgataatgttaacttctatacattccaaaaacaatcgcacaataccaattcaaaccctcctccttcttttggtaatatcactaaaattgatctaaatgaaagaaaagaaagcaaaaagggattagaaacagaaaccatgaaccgaccggtataggagatagaactgaaatagcactacttagaccaaattcaacatttctgataaaataacctaaccaaaccattatctaagcaagagaagaggctagcataatgattagaaaacgttattactttttaaaaatgggtatcgaacgttactacgttagacactcgagttcagagagatcttcattactggcgtttaagacgtttcatctatttcccgagtgatcctttttgaacccttggatgttcttcttattcttattttaccaaatgaactttctaagtaagtaaacattatgaataaatcatatgcttcgaaatctatttaatacttaactgttagttttactggaaaaggttggataaagaaaaacttgagaagaaacgtcgtttttgaacgttaactcaaaattctccaaaatgggtccaattatggatttatgtttccttatccataagactttttctaatcttctttaacatcgtgatgtcttattataccacatagacacatacgtataaaggactcattgtctatccaaagaaacactaaaccaaatcttattttgttcgtttttccatacgaaatgatgaaatcgaccaaaaagctcatgaaataaaccaaagccataaaattttgtggaacaaaacattttccttagccatgttggtgaattcggcattttgttaatagtcaatcaaattatgcataaaatggcccaaaactatatactccttaaattttgtggcccatatttgtcaacacgtgggcccgtttgtcaatttataagccacgaatttctaaagaggtccctctaaaatagaccagttcttcaattgtatccttatattactttgcatgacacataattggttagggcccaattttcccacttcttttcttttcatgacttttatccaaaaatatttgtggataaaactttttatccttgtcgatgtgaaagctaaaatttaatgaagcttaagcttaaccgtttttccacgaaataatagtatccttctcgatgtgaaaataaatactacaagaaaactaattgtatgcatttattcctttttattggctaatttgatgtttcaacaacgtaatatatcatcaatcagacaagtagacgtttgtgaattcttgaagaatatctgcatgtaaaacacggatccatatatcaataatcaatatatagaacaagataaataattctgattgaaaaagaaataatgataaatctttttttactttttgtttttttataaagaaagataaagctatttttgtgtgtcaagtacataactttaatctggatctcaactttaaaaaccaaaattcaaaacacaaccctttcttcatatctcaggattataagactcatatggtttctttaacaaaaaaaaaaaactcatgattaaagattaagagtgtaataacaagtttttaaaaatgccacatcatcagttcttctgattagcggatagggtagaaaaactgtagacggataataatatgaaagggtataaccgtaacaacacatctctctttatgcgttaaagattctccgcacacgcttcttctccttttataatccccagacgaagacgaagccgaagataacggaacaatcaaatcaatcatacagaagcagctaatggcgttgagaatcaggaaggcgacgacgacacttctcttctccggtgggattactcatggaacggatcggatcgcgagaaccggagcattgctcagccgttggatctcctctgcttcgtcatcttccgctgttgtagcggatgatgaatctagtgggatttacggattgggaagtgtgttgaaagagtatgaagattataggagatctctctatggtgagatcactcataaggctttgcttgttgatgctgttggtactctccttgttcccgctcaacctactgctcaggtctctcaaatttctctgttactttgtgtgattcaacagttgaacaaatgcttcacatgtttcttgctctgtgattgaaattttttagaaagctatgagcattttgaggattcatgtttgattctgagtaaaaatttgatgcttattgttatgttaagaatgtcttaggctttttatgatctctgtttgttcttagaagagtagatagagatttttattgtgtagattctaagatgtgttatggattctgattttgtagatatataagaatattggagagaagtacggagtggagtactcggaggctgagatacttactagatacagaagagcttatcagaaaccatggggtggatctcatcttaggtatttagaatcatcttctttctctttttgtttcttctactccaagaaaatcaccactaggcaaaatgttcttttgtggctttctatttgtttgtatgacaacttttaatacttgatcatgattatgactctagtgatgcatctccgtacaaagatatctggtttaatactgactctttcgaatatacatttgctgtggaatctctgttggattcataaatgggtctgcttaagacatttacttctgtgctggtcttgatttttgattctttgtttgtagatatgtaaacgatgcaagacctttctggcagtatatagtgactgcatcaacaggctgctcggattcacagtactttgaagagctttacagctattttactacagaacaggtttgatctctactactacttctccatatgcttcagtaatagttttggttctttctcttgagatttctccatttgctttcccaggcgtggaagttatgtgatccagatgcagggaaagtgtttaaggctattaaagaagcgggtgtaaaagttgcaatagtctccaacttcgatactcggttaagacctctcctacgtgcattgagatgtgaagattggtttgatgctgtagctgtttcagcagaagtaagataacctcttttcgtttatatatttttgttgatgatccgaaacgttttgggagtgagtgtgtaaatacttaaggtttttggttgaatgtttaacaggttgaagcggaaaaaccaaacccgactatcttcttaaaagcttgtgagttattagaagtgaatcccgaggatgcggttcatgtaggagatgaccgtaggaatgatgtatggggagctagagacgcaggctgtgacgcttggctctggggaagtgaagttacgtcatttaaacaggtaaacgaatctctctggttttgctcaaatctctcaagaatttaaaaatcattggtttacttgaaatgaatgtgcttttgttttgttctgcaggttgctcaacggataggagtgaaggtctgaagcaaaagcatatgagagaaatggttcagagacatgttcagacttcagttttagcttcttctttttttgtgtgagcagttttgtatattccatttctcttttgtagcataatgtgtgtaatatatgttgcggctaatgtagaaaaccagaaaacaatgtataataaaagatcaataataagcttcatgatcgttcttaatccgaaccgaagtgttgtactgttttcgacatttgcttataaaagaaggagaattgagttctttaaatatgtgatcaagaagagatcaagaaaaatggaaatttagagttgaacctaggcaacgtatggacaataccaaaagttgccaacatatcaatggataaatctaatcaaactgtatctgtgattattgtgggttgtattttaacattatgttcataattgttgacaaatagtcaaatacttcacattttagagattatctacatataatgggctacaaacatgtaaactcattgcaaaaaaaagaaaaagaaaaagcaattatcttagggccaattgtttttagagaagcccatttagatctttggatttaaagaggcgtaaatagaatgaggaaaaatccaaaatatctccgtctctcttttatcctcgtccatggataatagaatagaatcaaggcttttggcctgaccgagatgaccggagttgacttgtgtaatatgatcagaaaggctataatataatacaaaataaacgatagacactacaccatataagatgtaattaataaatttaaataaggaatatacatttgttaaatatttgtaaacacttaatgcctacgtatatactacatagaaatggttggattcaggagaaaagccttaacatattccacgtgatttgctcgtgcctctcaatagtccacgtccaccaaacccgtgtatcctcgtgtacttcttctcagtgtctgtctcttttcttccagctgcgtcataattcatatttttggtcttagtttacttaacgtatttgtggtagaaaaatgtgattgcatattctgtatcttcttatagtagttgttcctatttaactgttattttttgctaactaaataatttgcttaataaatcgaatttctattttgacacattataaaatatttagaatttttgattaatactcatacattcatattcatgtaattatacgatacaatagtgtaaacttatgttataaattacgataagaacattaggatattaatgcctgtatccggaggtcaacaggtgatccttggaacatgctcctacttgggggaaaagtgctcaaccacgtgtcaacgcatgtccactcgtgacccaatgtattttaatttattacatatacaacacagagtcattagtatttttcttgtgtccgtgtgtgtgtatcagtgtatatataaacaaaaatgagtgtccacataaataatccaactaacacatcagcataatcccaaccgaaacagcttctagagagagacaaaaaagaacagagtaactatctaaaactcaaaatgtgtgcacttgtccctccattatatcccaatttcggctggccttgcggagatcatagcttctatgaaaccgacgacgtatccaacacgtttcttgattttccgttgccggacttgacggtgactcatgagaatgtgtcgtctgagaataacagaacattactagacaatcccgtggtgatgaagaagcttaatcacaacgcgagtgaacgtgagcgtcgcaagaagatcaacacaatgttctcatctcttcgttcttgtcttcctcccaccaatcaaacggtaactgttaattctatatacttttctatttctaaaattatgaaaaaatttgaaagtttagtttaatattcaacagaaacaaaaaaatatcaaatgttttcttgcaaatgctaaaagttgttattcattgcttttgcaattttggtgttgatacaaacagtgatatgttttgttttttctaacgcaaagaaggaaaaaaaaatcggtcccaagtaacataaactgaaagatctgtcctattttttatgtattttcttgcagaagaagttaagtgtttcggcaacagtttcacaagcattgaagtacataccagagctgcaagagcaagttaaaaagctcatgaagaagaaagaagagctctcgtttcaaatttcgggtcaaagagatctcgtttacaccgaccaaaacagtaagtcagaggaaggggttacaagctatgcgtcgacagtttcttcgactaggctcagtgagactgaagtgatggtccaaatttcatcgttacagactgaaaaatgttcgtttgggaatgtcttgagtggtgtagaagaagatgggttggttcttgtgggtgcttcatcttcaaggtctcatggagagcgactcttttactctatgcatcttcagataaaaaatggccaggtgaattccgaagaattaggtgatagattgttgtacttgtacgagaaatgtggacactcgtttacatgatttaataattaacgatgctatatatattttttctgttttgtctctcgttaaaattcgaggttctttttagaaataggttttttttttgtatattaattttaatatattatattattttggcgaaatgaaagtttcacgggcaaacgttttggtaccgatttggaaggagaacaacgcgaacatgggttgtgtgcaacagtgtaaaggtttatatatctgtgtatattttatgaggatttgtcatctcacatctgtggttacacaccgatgtcatatgtggacactaattatctgaaagtctttaacaaaaaaatcatctgaagtcatttttttaacctttcgtattcaatttttttccgtttgattcggcaaaattacatatttaaaaaccctgaaatcaaaacagaagcacataacttatggatggtgaatcagtgtttaaaaacacataataatcttcccaattatcaagcctgcctgatctaaaattaggtgaatgatcgcttttgggccttaattggaagaataattttggcccattttgtttcaaataaatactaaggcatatttgtttgcaccaaaaaaaaaaaaaacaagcatatttgtaaattaaaaataatatcctaataaaatacctaatcttattttcaaatttagtttttagtgtcttaaattttaacatgatcgattatattacctagctatgtaatttataatatacaaagaaaaccaaaagatcttcgaaatgtttaagtctttctttctagtttgtcttaccataaattctttaaccaaaaactgcaaagggaataacttttctgggtcgactgcatcaacgaagctgtaaaggcctaccaagttgagaaggagcagaccaaataaaaaatgaaactacttaaaatagaaaaatgttgaatataaaccaaatggtcaaataataaataccaaagaaaggccaaatccacgggaaagcatataaaaccactgctgttaggtgcaatgcatcctccatattcaaaatctacgaataatgaaaatttctcgattttttattttgctggcaccacccaacttgctttactatttcattaaattcggcaaatgctctatttattttcattaatattacatcttgtatttaatattgtgttactgaaatacgtttgccgtttttaaagagttcgtataaaccattaggctatcaactttgtgtttttagtgtgataaataatgtttttgcaggaagtgaaatttgctagttaaaatattattcaaaattatcaaattaaacataatttacctatactgtttattgactttattcccttttttttttccttttttctgttggtttagtttatcaattgttcctgctatctaatatgagaatttcttctattttactacataattcaattattttggttgaagaaaatgatagataatagccaattcttttctgttagttaaaaaagaagtcttttaaaattttattttgtttaatgtaagtttgtgattttctcaaggaggagaaatgtagacaaaggacctcattgggactccaacaaaacaatgtacaacaggaaagtacatcagcctccggtccccgtcaacttacctataacatctaaaaagcattgggatgttcatgcatctaccttttctctttgcttgcagtaaaaaacatttcttaagcctctattcttctagaagtttcagtactactaataataatcatgtacctagattatttttatttttttgttaagaaactagattaaattcctattacagtttactttttacaatggaatctaacaacaacaccaacaccaacagagtctcattagctactgaaactaacataatggattacattgtcgattctaaaaagtaaggttaaaatatattacgtaaactaaattttcttttgctattagtacgtagtgtggtatatcattgatgataaattgcaaaattagtttgtatttcgttttagacagaagtaatagtaacaattatggttgaagccaacaaacacgaaagagagtaaaaaactaaaaacaaggctggagagtgaaattagttgattacttgaatcaagacatatagacataaatcacagctgtgacctgaaaccggcactttggaattaccctttttgcacatttcttgactatgcatttatatccttctaatgcaaaatctaactccctacttgattagtcttaagttttctcaagtggggttctattatttatttattattgtaacttggcccttttgttactttggacagggtctatcatcgacaaaagaaaaaaaaagtaatattaccactaatcaaaacataaagaaatattacattttttgtcaacataatcataaatacctaaaccactaaatacaattcaactaaataatttggtaaataatctggatgagaaagaaaaaaatgttacaaagatatattttttggattttccttaaaaatttttttttttttttttctagctaagaaaaattaaaattttgttgggttgtcaaaaatatacaagctatacatacacgtatacacaaatatagagatagacatttcaactttcccaattgccagtatatataacaaaagccagagacaaagggagaaggatctaagacatttatcaaaaacaaaaagagttgataaactacagtaatggaaaatgagggttcatgatcaacggctgagatttgatgtcacacccaagccgatgggtttgaacggaagttctttgatcacggcaagatccgtcgcacttcttctctttctctctctgcttcttctgattctgccaccgttcctgccgccgcttccaccgcctccggcgacactcctcctccttcctctactcctcatgattctcctcattttcttggctttttctccttctaatgagcccagcctcgccgttgaacctctcgacccctgatgtcggcgacttgcgttgcgaaccgtccgtacatacataatatgcattacacaaatatgtctaattgtgtctctatgtgtatgttattcaggagcagattaagggcttttagttttagtttcgtgcaagtaagatcatgtcatgtgatagatctccgagtttttcttttcaaggatttcgtgtaaatttagtttttaattactttctatgagcaattttatttttcaattcaattcgttttttctattcttgttttgtagaagaattttgttttatcagcgtcacattatgaattgtagaagaataattttaaaatgcagtagaagccttcatgtcacatacgtattttatacgtatgagtgtgtatcagtgtatgtatatgtttatctctatttccataataatttgatggaggaaacatgtcgttgggcttaacgctttgcatgtactgattttaaacaggttccccgccaatgcaatgaagtggcagactctttggacaaaatgagttatcaaagactctattttccatgttctttaaatcgattcttattcaaaaattatgtaaatttttccaaagtattgaaagcatcattaattcttttttttttataactaaactaaacaaaaaatggtcaagctgtgatttataaacttttaagaatataaaaagtgtcaaaagatgccgaagaaagatgttaaaaataatcgaccttaatattagattggaaccactatttgataatagcggttaggatgcaaaattacttgataattgcaacaccataatttgtaatcagagacacttttacataatctatcacttgtttatttaataaagtttgtttgtacaactagatttttttattgggtctagtgtggaccccactatgttattacacattgtaaaactgggaatcgtcctttgatgtccgagagatagagtaagtggatgtgccatctgttcacaagtcatcgacacacacaattagattcttttaatatggtcaaaagtgattttggattaatgatctttcaataagtttttattttttttggttttacatattttcctaattgtttcaaaacgtaatgtttatcctttcgatatacctattcgaccaaaaaaagtcccatgtatacaactgtgttagatcatttagttttgtgccaatgatttctggaatttgaagaacaatatcaagaaaagttatatatttgacttgtatgcacgatggctgccagataaaagagtcactagctaactcatgattgtgtaacgaatttgtgaattatactgtgaaaatagtttgggggtgagcattatcgttggtctaattcgttggtctagtgatataactcaaagaaccaagttaatttcaaaagaaagatggattgacttcaccaatatcatgcatgcatctatttacacactacgttccaatatcacaacaagtgggttgaaaagaaatagtttcaaatttaatctctttttgttgattctctacgttttatgacgttgttatgttaaccactcaaaaccaagtatacatttatagattggacattaaagaggtaaatgaaaaggaattacaaaatcatttttttaaataattaattacaagatgtatcctttttgtcaacaattagatgatatccttagaaatatactctaatattctcgtgatatttggggatcagagtattttaagttacttattttttcatcgaacttccacattatcttaattttgatccaagatgaccttacagtttaacactatttgatcctaaaatttagatctccaactttgaaaactgaaacaagaaagatccacaaaccaaaatttgtaacgaatttctgtccggtgaagtactgtgtcatactatatgagatgatttatccggggaaatagtgtgggtgacattcgggacaatgtacaaaagaaaaggatatttgaccaaattcaagggagaaaaagaattaaataattttataaatgattaaagaaaaatttgtcttcgctttatcgggtctctatctttcgacaaaacaaaaagcatacgagaaggcatttaatttgtccacaaaaatcagatccactgcacctacacatacaaatgagaatggaatgcatacgttttgaaattttgctccttgtttttttttttttttttttggtttgattggtaacgagattaagggctttaacgactgaatcgtacgtaaccttagagatacatttggaaaaaggaaaaaaaaaagttcggataaattaagtgatgattacgtgactcatcatataagccctagacaccgaatgtgcttgttttgattacaaactcaaatgttcccagacaaagtcaaatgtttggaactctcattatggggctccgaagtgtggcatataatgctcttttcttatttatattgttaaaatataaacaaatactccgtatatagttattcacaattaaaaataattattatttacaaaaaaaaagaagacaaaagggtgggaacataattatgaataaatatgtttcttgagggttcgtctcgctatctttctaggcccggattaaaccgaccttgattctactctcctctgttattggtttttttgactttcaaggatcgtttttaagttcttaaagttcattatatctcttccggttaatcttcctatccaccacatatttaagtccaacaaaactcatcaaattaatgagtttgtgattactgattattctagattcaaagaataaagcctctattgtaaaagttttagtttaaaaaaatttcatcttgaaaaaggaaaaagtccgagtaaaagaaattaaagggtttgtagaagaggagagcctatgaaagggactatgcaaaaccaaatcgaagacagaagcaacattgttctgatccccacttgcctaagaatcaaacctcaacacttcacttgagaaccaaaatagaatacacgaacttttttattttaaaaaaatataaagattaaaccgaaaaaaaaaaactcaattttagtagccgttgagaaaaatctaaatggagaatcgcaataaattgggttagatgtattatgtatatggaataagatgaaataaatacacttacgacgatttaattcatcagattcagagtatcaaacatattctctcctctaaaattcaccaaccctccttgcggtttcagtcatctaatggcacattaatggaaaatagtttaagccgacacgttaatacatagctagccttacctatgtcaaacgtccctttatatatttcatttagttttttttttttaattataaatttggttaaacaacctatatgatgtcaatacacataaacatgtatataattatatatatatatatgtataatataaattgcgttttgttttccagatatcaacaatacacattacacacacatttcatttctcctaaaatgtgtgtagtgtatacttttaatatggagctttatcaaatttcaatttcattaacaagagaaaaaaatcagttattattacttaatatggagaatattttttcccttacatgttaaaaaaagaaaatgacatttaaagtaaatatttcaaattcctatgtaaattaacatatactactgaataaaaataaataaaaagaatggtaaagggttgtttaattttgtcattgggtgaataagcaaatggtgttggtcagtgcatgagcttcacctgtaagctgtaacgtctttctctctcacacacataaaaaaggaaaacgaacaaaaacataattaaagaaagaaaaagttattaaaatcttatttgacattatatatatataggtgcatcaactaagaaagtaaataagatttacatacgaaaggatcgtcgaaatgtttgtgattggagtggtgatggtgctattggcggttcttccagccgttctgccgccgcttccgccgccgccgatgatattgatgggaattccggtggtgctgatgctaatgcttatttacttagccatttattatccacctcatcaagctcattttctctcttcatcttcctttgacactacttctaggcatgtaatgtgatggtagtgagacaatgagtcgatgatccagatgactcaactcacatatgtgaatgcgtcgtcgtttgatgataattgtgaatccatgcagtttctatatgattaaaatttagaccctttttatgttttttcttttcttttcgttttagggtgattcgagttggatcgtctggtaagagtcattgtaaaatttgaagtgtaatttctaattttctaatcagttgaaccaattccgattgatcatttaattaagcatacagatatcagatatattatatcatcatgattcatgccatatattattttccagtactcagatgatcatagattcgagtttctacatttcactctgaaaataaatgcaagcatgatttttttttttattttttttattttacttgttccgtaacgtcactcataagttaaggaatcagttctcgcttaacgttcttgaatcgctttggaagttcgtaagaaaaacttgaaaccgttttgttatttatttgtaagctaattaaaatgcatgaaacaaaattctagaagagtgggccaacaatccaccatacagtacgcatgaatcactttattatgaattatgcataactcgtctataatattgggaaaagctgaccattctatagaagaatggataattttgatcaactctgaacaatctgcctcgacgatttggtatccaattccattcgaaagaatgatcgctatagttcagagaacaaatttcatccccaaatgtaatggaaaaatttcatgagcgatttatttggaaatattaaggaaaattttggtcatgcctatatttcatgtttgtatcttagctttctcaagtttgatatgttcatatggtggtttcccatatacttcatgatttgttttcctaatgtaattctcaattactctcacgccgtttttgaaaaaggaaaaatctcacaccatatttaacaatattttataagttccgcaataaaatactttttcatttctcgctttccaaatgtaaccacataatctattgaaaacatcacgacaaatctcgttatctaatatcgacaaaataaatgatccaactttataaatcgaggatgatagaatttcctcattaaaatcattgattctataagtatatatatatacgatgcataattcttttttatttatttattttattagatgtaatgaaatgtaaaaaaaaaaaacgattttgagactctttattattcaacctaaagtagtaacacgacacgatttaaagcattatcaaatgtcgataattcacaagaaaacagtctttgattagttttttttcctctctcgagcaacaaatttttctccacggtcgttggttatttctaatttgagagattttataggtgacgatgctttaaattggggtggttagtgggtccaatcaaatgtacgtcactcgttaaaagatgattttaaaagttggattaaaatgtaataaaaccttttaggtatcattaattgctgaataccgactgaataaatgcttctttatattattgagattgcattatatccaaatattgagtttaattcgtatcgaaataaacagtcaaaatgaacggcagggatttatttcacaaatttatagatatgtacaatgtatactggttaaggaggagagaagagaagacgtaacgatttctctcgcaaatgcaatgaacttacactctcttcccatttgttgttgttgtaagaatttaagtaaatgctgacatctttctgctttttgtgacgcggacgatacaatgaacatgtccagttccattatttggtgctttaagaactttcgaattttcgtgtttaagaactttctttattttaaagcttggaaaatttcatgggacaagaaaaaattgacgttaagacaccgacgtttacacgtgtcagctatatttctgttgtgtttaccacgtgagagctgagacaacagagaataaacatcagacttaatggagtttttgtcaacgaacacacacgtacctttctcgtgacccattccacttacctatatggggacaaacatcggtttcacgatatattgtcttaaaacctttaaacgttcaacgtacatgcattactagaagaaattctcgagactttttttttccgtaagaaaatcaaaatcctttttttttttttttttttttttgaaaaagaagtaaatcaaaatactcgcacaatacaaatctttggtctgtggatacacaaaaactatattttgttctagtcaaataagagacgatcatttttttctttcatatatcccaaaattccaaatctacaaatatggaatgtagatgtggagagaacaacaataatttgaccagagaaaatcaaacaggttcggactaatcaaagtaaagtggtccgtaaaatcaaaccaaatattaatcctgataataaaaaccaaaatcgaatctaagtttaaccaactttttttcttcttaacatccattctaaatcccgtaaactaaattttctataccgattaattaactacaaactcacgagaaaccaaattaagcatcctagtaaaaaaaaaacaatggataaaaatcgaaaaccctttcttaataatcgggaatcggaagactaatgatgtttccatacaaagtacaagcatgctggatttcgttttattactaacgtgactgggacgaagtaaaccaaaagataagcgagtccagaacgaattaaaaccacatcaaaatcaagtggtgaacttgtaaattgttatgttctcagcaactgagagacttacttatctcctccaccacgactttgactgtacaaagaggaaaccacgatcaaatgtgtaggttttacttctctgctaatgtgcttgaaacctgttcttcatctcctgtggttgttttcaggatgtggtctgagttagcctcaggtgtgtcttcttcactcggaggtacaagttgccagaacattgctagatacttatcccactcttccacaatcattgcccctttgctgcttcccgttttctcctatgataataaaacgactccgtgagatgattttagacgaataggacccgataagagaaaggaaagagggaattaggtagttaccacatgagcctggatcaggcttttaagctgtgtttgtcccactggtgaagtcactctttggatcttcactatctctttgttcatctgttgttcaatgcgattcatttcaatgtttcacaaacaataaagaaaatatcttcaagataatttgtgatgtttaaccttagggaggagagtgttgtcttcgtcaaggatatatgccaatccacctgtcatcccagcggctacatttctaccaactctgcaattttcagaaagaaactattaagatatttggcgtttaagacactcttaagttctaggttttggtttagggctagaggctgagaaaaagagttctacttacttcccaagtataacgacacaaccaccagtcatatattcacagcaatgatctccagtgccttcaacaacagcttgagctagagagtttctaaccgcaaatctctcccctgctttgcctctgacaaataataaaccaccagttgcaccatacagacaagtgtttcctacaatagttgcgtcttcgggacgaaaaccagtcgattccactggtaatatcacaacttcacctcccgccattcccttgaggtaaaacagtatatttagagaccattaatccattaatcaaaaatatttttgaaagaaaactgtgattttgagacatacctttcccacatagtcgttggcttcacccacaagacgtatattcattccaggagttaggaaacatgcaaaagattggccagcacttccagtgaacctatagaggtacagagtggaacgtgtaagtttaaaacatgttctcattacatatatatttaaagtttgttacgtgtttactgtctcataacattgtcttacgttaggttcagttgtccagcaaaaccagtgtctccgtatttcttcgcaatcaccccagcaatccgaccgcaaacagaacgatctacattgtatatactcatggttttgtgaaccgtcttttcattctcaattgcatccattatctgggaaataaccaaaaagtaagtattaagagtcttacttgcatagttgcatatgtagaagagtacttaaacgagtaaagaagggttttttcagatttttgcataagctgcataatgtgttacctctggatcctgaagtagagtatcatcaagaacaggaccatttgaatgaacctcctgcttcctaatggaagtactgcttcgttttggtagcccaacagactgcaaatttggagaaggaatgagatctacacagatacaacttgcgggtaggcatatgcactagaaaaacgataaacacagctctggtctgcttacagataagagataactgaggtcgagatgagttttcacgagcgagatatccctagcctttagcaaatctgtccgcccaattatatcatccaacttttcatatcccagctgagctaatatgcccctcacctacaaaaattagatgaaatattagtgttaaaatcaatgaacttttgtataagagaaaatattcctgaagattacctcctctgcaatatacaagaagaagttgacaagatcaccaggaagaccggggaaacgtgcacgcagttcctctctctgtaaccgaattcagggaaatcttagtggaaattggttatacattggggaaatatacaataacaagtaagaagagaatccaaattacctgactggcaacaccaacggggcagttattagtgtggcaaatgcgagccatgatacatcctgtggcaatcattgccagagtaccaaaaccatactcatcagcgcccatagctgcagctatcaacacatccacaccacttttgaatccgccatcaaccctgataataactctttcccttagtccatttccaatgagagtctgcaaaagaatgaagcttagctatcaatagacatcaaggagttaataagagactacacggaaatttgaagctgataccagggcaaactaaaatgaaaaacatattctcacgacgaagttatataatataccttctgggtttcagctagtcccagctcccacgggccaccagcatgcttaatggaacttatagggctggctccagttccaccatcatatcctgatatctgtaaacaacgaagcatcatatgtttcaaaagtccataattgtataagtataactatgtttcagtaattcatagacacaattgaccatatacataattgttttgagaaatggaataagaatcgtcattagccaatatcttgccatagcatggcccccacagaattgtataatttgaataaatatttacaattctccaatttcaaatttctcacaaactctgaaagaatgtgcatacctgtatgatatcggcattagccttcgctactccggaggcaactgttcctattccagtttctgatacaagcttgactgacacttttgccttggggttgacctgattataattttttgttaagagggagcccagattctaaagttggcaatatatttacagccaaagtaaaatacctgatggagatcaaagatcaactgtgccagatcctctatggaataaatatcatgatgtggaggtggagaaataagcggaactcctggtttagaatttctaagtctagcaatatatgcgctgacttttttcccaggaagttggccaccttcacctggcttcgccccttgagcaactttaatttccaactggtccgcattaaccaaaaacgtcggagtgacaccaaaacgccctgaggcaacctatgataatataaaaggtcattttgaaaactggaaatcattagaaaagtacaaattgataatgtctatgaagacaacaaaagaattcccaataacttccttagagtaagcaagactgtacacatgaaaatatgaaatgtccacaagtcaagttgacttccagtacctgcttaatagcacttgtagccgtatccccatttcgaagacctttaagatgtggcagagttgaagaatacccatcaacaacatctgttagcggcttccagcggatcggatcctagcaagatagacggtgaatctttagctaggtaaatgcgttttgaagttgaacaagatctgaactagacaatgaacaactacctcgcctccttcccctgagttggattttcctcctaatctgttcattgcaatagcaattgtctcatgagtttctcttgagattgctccaagagacattccacctgtacaaaaccgttccacgatagaggaagcaggctcaaccttcccaacagggatagggttacggtcacttttgaactcaagaagatcgcggaaaacctacaacaagaatatacaaagaatcatattcacttgttccagaaaacagacaatcagatttgaagatgagattatagcactcaccgtaataggacggttggctaaatgctgctgatagactgcataggctgtctcactcttttcgcggacggctttatgaagtaatttagacatttctgggttgtttccatgatattcacctttcatataacaaaatatactaaattagagataatactggaaagctttatagggataatgaatggtagcaatttaatccactaaaaggacagtaaaatagtgtagaggaaatgtgtctgtgcatatgcaacatttatgtaagaaaataaacacttcaaaagctctacttaactagacatagttgtacgtatgatacacgttttttttgtaggcaggagagtatgtatttgtgcatagacatgcaaggtcattaccaaatgcatttccagtccagaaaagtacctccaggcctaaactgaatgaaaccgaagttctctagccgtttggctgtatcctcagaaaatgccctcacccagaaagttaacgtctccctagccagctgcaaaatatagcacttacgagttagaggcccatagcatcgttttgtaatataaactattttgcattcgaagaacatataatatgagaagcattcaacagtagacgagaactcagacttttatcagaacctttgacatgcaggtattcacaaacaatttagggagaaaagtacagttactgccttaatttttttttcactgatttaaactaaagcaattccaagaagataaaaagaaaaacaattccaaacatataaacctataacagaagccaaaaagtacacacatttttgagaatgtgtgcatatattatatgctgctttaaggttataacatatatagatgaaactagcatctaaactgacgtccagaaccttaatatcaaagaggtatttagttaatagctgaaaaattgctccaataacatatttgtactcaaacaaggcaactagtcgagtatcttagtatgaaaaactttgggggatattcttacctcatctaaagttaatccaccaatttgagatgcactaccacggaacgaaaattccacaacctcatttcccaatccataaatttcaaatatttgtgctccacaataactgaaaagagagagctcaggtgttaaatcggaagtaaacagatacagtgataaggtcgaaaaacgaaatagatagttcagaaactgaacctagagaataacgagatgcccatcttagagagaaccttaagaagaccagtgttaacagcctgcggaagcaattcaaagaatcttaggatgtctttcttccaatacggataaagacagtagcagtgttacaatagggaaatattacaatctgtttagcaaacactataggcatgcaagaaagagatcgaacggcttatcaacactcaaaaaattcttgtcaacgttagaaccattaatatgtcctgaccttgcggtaattcttctgagcctgttccatagttacagtaggcatttttccgtttctcatcatgttcacggtcttgttgctcagacgccactgtctacacgtctccagtgctaggtgcgggcatatagcactgaaattggttatggacatagatccgtatcattttctatagatgcaatgtataacagttgaggaaaacagtctcatatcattacctaaatttaaaattaagaatgtaggtgtattataaactacataaaataaacatgagtctattatagagagtgctattatttggcatgaagaaccgcaagagacaataaacaacatacaaattccacatgacttgctttggtacgataagaaacagcctaacaaaatgaaagattcaatgaaaaaagtcgataccttgctccatatccaatcaaacaggcaaagtgatgtgtactaaagcactgagctgtatctgcaattatcgaagctgacatccgaagaccgttctggatcagatgttggtgaacagcacccacagccaacaacattggaattgcaggtcgagttggttcctgaaaaagggataggctgctgaatcaggaatagacagtgaagttacaaagtatgtaaagatagatagaaaagaaaatatcatccaagtgagacacaaaaacacaagcaaaatgagcttcaatttaagggaaaatttacaataactcaaggaaactggaaagtagcagcgcatacaaagacttacagcgagaatacataatagtgcaccattgtaacgatgccaacaatagcactttattataaagaaaccaactatgccaccagttcactaaaaagaaaccaacaatttatggcaattatattttcacattttaactttcttttcctcaacagttccaatctttgcatgagaaaagacaataatgttgttagtccagaatgagagcctagagcatagttgttagtagaccaaaacgtagatgtaaaaggaggacactgtaaaaggtgataatcatacatctacatattatatagttaaaatcacaattgaaagcatacacttggaaactggtatgtaccggattatcagatctgtctgagagaacaagtacttgggaaccattacgaacagcttcatctgcagcttcacaaagttttagaagacccttcttcaaagatccttcaattcctctacgaatgtcaaaaaatgtgggcaagatttgagattttaacagtggatcaccaagcaaaccctcaagctcccgttcatttagcacaggaccagacaaaacaacctgcttatgaaatcacaagtcttgataaatacaaaatcttgcaaaagccaaataattctaagccagtacaaaatttaggcactccgacctgtgaaacattctgaggcccaacctccaatatatttccacgctttccaatattaacttcaagggacatgactaatccttcccggagagggtcaatagctggatttgtaacctgtaagtacaccatgtgaagaaccacaaggggaatcatttcaaggacagttcattaatttctataaatcatgtaatcagttaacctagatcaaaggaaacaaccagttcaaatcgtgcccttctaatgaggtgaacaaacctgagcaaaccgctgcttgaaataatcataaagcatatgtggcttttgagacaatactgccactggagtatcatcccccatgcaaaacgttggttcttttccttgtgcagccatcgactcaattaccatttgaacatcttcactcgagtagccaaacgccctagtccatcaaagtaagatacatcatagccaaaattagtgtcttgatcgggaaaaagcaatcatcgtcaaaaatgcaaaccattgaattctactggtgaaaaccattgataaactttgtagtttgaaataatcaacttatttaccctcacaccagatgtatgtcaagtatacaagaagataataacagttaagaaaagttaagtgttttcataaatcaccatatgatttgcatgtagcagatgatggaagcatagaacaagagaaacaaaaaggcttactgttggcgtcttaaggtctcatcagtctccaggatcgctgacgagagataattagaaggcttcaggtttcgcaggttttcactaacccactttccatatgggttatatgatgcaacccgcttcttcacttctgtgttctcatatacctgaaaatatacatattactaatgggatgcaacataaacaaaaattatttgtcagtgttaacaaataaagagaataatcgaccatgatctggtgcaccaacctgtccattctctaagtcaacagatatcatcataccaggtcctagacgacccttcatggtgactttcgattcatccattggaagaactccgacctgtataaaggcatgacttaacaattcttctgagccacgatataaacaagattggtaacagatccccttctatccaaaccaattctctcgctttacaaagtattaactcggtttccatatgtcacacaaaacgatcaccatgaaactatcttatacttggtcattttctcccaaaaatcagttcgtataactttgtcacactaaatcaaaaaagaaaaacgaaaaaacctccaaagtgattaaacgaattggtttttctaacctgtcaggaccaagccttaagattcaagcataagccaaatcatctgctggcaacaattaccaccatgcttagatgataaagagcacatacataggggtaaaagacaaaacgcacctcagaggctacatagacaacattatcacttgtccgccaatatctagctggtcgaagtccattgcggtcaaggcaagctccaacagtctttccatcactgcaccaaacaaaaggtgacgatgttttggaatgtgcgagcagacgaaagatatgcaacagacttgctagcaaaactagctatcactttgagcgacaaattatcaacagggtcatttgctctctcgtcgtccacaactatggataccaccaaaaaaagagcaggaaagctctgagtgatcaagacttacgagccttctagaacagttgtaaattctcattattcttagttaagtatttatggaggaataagggcaactgaaagcttaaaccttacgcacataattaaaattctcaagggtagaaaatctccaagcaaattacctgaacaataccaaagcaggtccatcccagggctccatctgccccttgtaatagtcatagaagtctacagcctacagttggaaagaagataagggaagcacttgcaagatgcaaacatccataaagactaaaaaggcaaacacaaagcaatacctcagggtatttaatcattaaagtcgggtgatttttatacgcctctgggacaagaatcataagagattcctctggagtccggccacttcttatcaatagctgcacacaccacaataacataaaacacattgaattcttgcagaaaaaaaaagaagactataacttagggtcttgaggttattctgaagagtgtataaatgtatgtacttgcaagatgtattgcttttttcatgaaatgctcgttacatgtctgagaagtttatttttctggtcaacagaaagacaagtattatgtatgcagaataggactattgcttagttccaaacgcaagaaacacttatgtgcctcttcaattttcctccaaaaggaaataccacaaagagcatcagaacagaaaaaatacaagttaggaggttagatgactcgtacctccgccgcactgtcaaggttagcagagtctgaagcctttggattgctaattggacgaatgtcattttcacgtccatgccagacaggtgatcttagagatgcttctcgagacgtcatccagtttaggttcccctgcaacacttttccggtttcagtgaaaaggacctagcttagtctaagtttcaacaaaccaaatgaccagaagagaagcataacctgtatggtattgatctccccattgtgcccaagaaacctcatgggctgagcaagatgccatctgggactagtatttgtgctaaatcttcgatgatagatggcgaaaggagatttataaagatcattttgaaggtcggggtaaaataacccaagaacttcagaacgaagcattcccttgtaaacaatggtctgattggacaaggagctaaagtagagctcagaggcccaactttcagaagcaactgctctttcgatcagcttcctgcaaatgtaaagttctcgttcaacgtcgtctactttatcgtctttgacaattctaacaaagacctgttccgtgtttggcatcgtctgttttgcattatggccaacaatggacgcttccacaggaacatctctccatccaagcacctccaggccctctttctcaaaaatacttgtaatcactgaagagaagtttcaaacattgacttagcaaggaaaatattacatgttatatacatcggaaaaattatagcttggagtggtatgcatacaactattctatgttcacctttcttggcttctttcctaatgttgtcatctctcggtaggaacagcattccaacacccgtatgcgtcctatcaaaagaagcgattccttgcttctcagcccattcgttaaatagatcccaaggaatggaagtcatcaaaccagaaccatcaccagaagtattatcagaaccacaacctcccctgtgttccatacaaccaagtgctataagagcatcatttacaatcttatgtgtagccttattctccaagtttgcaataaacccaacaccacatgctcccctttccgatattatatcttccaaataagccacctgcgacgatgcaaaacaaaattaaaaccccgcaaaataaaaacaaacgtccataactaaacctcttgcaaatgaaaatttttaagtatacccaatatatacacaccagaactaaaagtgcaaaagtcaaaacctagatcaacagcagataaagatgcaagcttttatctgattgcagagaaccacgattacctgaggtttcagatcagaaaaggaagacgatgcatcaccagcggctcggtcagaattaaggatcgctttcaccgaaaacggagacctcagcgaggacttgagcagtggactgtagccgcgaaagccggagagttcgttacgccgtttggttcctttagaaatacagtaggatctgacgaagtcaacagagaagatagtcttagtagagcttaatttcgcggaagagagaagccgggaaacggaagatgaagctccggtagctccgggagactgtagagccatggaatgaagctcctgagaagaaacgccgagagagaaagcgatcgatcggatttcgaagtttaatctctctgcgactgttgtagttttattttcaaaaagtcaaaatggaagcagagatttatccactgcggtgaagtgtacggtgcaccggaatcgtagagaaaacccaaccggtgatgttttctcagtctcagatcacggcacgagctaagagtgatcagtgagcacgactacgcaggactctctaatcgccgtcgcttatttggttgttgttgtaaagttgatgaaagtgctagttttattagctttcttttgtcttcaaacgcgatcgcgattttctaagatttagcggtgcgtttggtgacgcatgtctttatttacagattgtactttagaacaattgaatgaatatagactacaaatctaatgttgaataagtagttaatatgtaaataaatggcaagtgcttggctcaatttcaagaatacgtaatcaatttaaaataattaaatagcgtttgaagagtcgcaaatttaattttgtaaggggacaaatggcagaagagaacaaagagattctctatacgtttaccacataaagcgacaacaacagcgagtgttaaccttagaacaattattggaatcttttactcttatttctttattgaagaaaacaaaagatatcatcatcacctacgtaactaacattgcccaaagttgtctatcttttataaagttttgcttcatgtctttattcagtatctaattacctgaccaagaaactttccaccttttagagaaataaaaactctagtttctttcaagaatctcttttgtttttgaacgaatctttttgttggtgcatcaaatattctttgttcccaatttagaatatacaatcacatttgtaaattctataaactttaaaccacttcaattttttatgtagttgtcgatgaagtatttttagtggaaaagtatctgtaaaagaaattatgcaacttgttttcttttatgttaactacgtcacattgacaacactatactgcaaatgtatagttaaaatataaaatgaatcaaccaccacgataattaaaatcatttcatttacaagaatttccagacaagaaaatcttaatcatattatgaaaggttacataaaaagtatacaagaaaaaagaatattcattgctatggcttttagctgattacaaagcttgatacaaaatctataaattgaaacaaacgaacaaacgaaatgggattcgtcgaacttcatatttgcaaggtagcctatttgcagagctcttacttgggaatcaagaaatctaaaaacgccagagacaacttgagaccatctcaattgtcatctgtgaagaccttgaagataaagtcacggaaacgcctagagtattgtctcggatcaaccgcagatatagaggaaggatcatactgtatgctcttgtaagcgtgttcaagcttcttgctgatatcataatcctgaagaatgtcaattataccaaatatcatcaccacttcgtagaactctcctgtaggctctcccacaagctgcagctcgctgtcgttttttctcatcgttctctctgcacgtgctggcatgtttgtccccaatctaatacttgcccacctgcaagaacacaaccatattcaaaatccatgtttctgtgtttcggttttgagttttgaaagtgttgttaattgatatcttatgttgtgttaccttgagggatctgaaagaagctcatcaacctctgctctagaaagacgagggcctgattcttcttctgattcacctgtagataaacaaacaattactttgtttctgtgaatgatacatttttgctgatgggaaaagtagtttttagattggacaaaagcgaaccaatgggcgttcgagctccagaaggaatcagctctccagcgacagaagcttctctgaagtgaatcccaactagaagactgtaatccatgattctctcctgttctagaaactcgcagtctttatcgatttgcctgtgatgtaaacaatgaaccatgagaaatgaaacaagcacaaacaaactatggatagagtaaagtataatggtttttacctgatgaattc

SEQ ID NO: 361 - DNA, 42499 bp, Arabidopsis thaliana
aagctttatgcagagagagagagactccaatcagaagcaagcatccaagagacagcaacaacacagagcagcaagactgcaaaagcaaaaacagtgtttacatttcacaatcagtattaaaaacaaatccagttgctttaagacatgcaatgtagtaagcagtagctagatcatgcaaacaatcaaatcctaaaagatgcacattcatcaaaaacaacatccgattcacactgttaagtaaagccatcaaagaacaacaattatcctgtattcagtgaaggaacagagaacacaaaaaggatccatcttgctaagccaatttacttatcaaaacttgtacaagtatagtttcaagtactcataaacagttaaacactaccaaaccaataacgacaagaacacaatcacaattctagtttctttaaagcatgcaatgttgtagtaaccagtagctagatcatgcaaacatgttaaatcctaaaagatgcaaattcattaaacacaacaacaattgtcctgtgatcagtgaatgaacagagatcacaaaaagtcaacctctacagaggaatattctagctaaaaccacatgaccttttgttcaaagaatctctagaagaaatatttaaaataaggaatatagtcaaattcaaactatacacaaaatctaattagtaaaaacagattaaatataatggagtgtgtttattgactaaccatccttctagaaagccaggactgctctgttgttgctgatgctgcggtggtggaggatattgaggcgcgtacggtggaggatatccttgctgaggataaccttgttgaggatatccctgaggtggatagccttgctgaggatatccctgaggaggatatccttgtggtggataagcatcttttggatatccctccggtggataacctattgatacaatttcagcacaaacaaaattcagatccgtcgtacaaaaacaataatcagtaccaaattaagcagatctaagaaaaaattacaaatctaaaaaccgaaacttctaaaagtaatcgaaaatagaaggaaagaggaccttgaggaggaggaacaccaacgggaggttgattgtactggctcattgtttcctttgaagaaaaagtgtaaacttcgtagagaagaaggagatcacgaaccttagatcgaaaaagtttatagaagcgatagagaaggacaaggaaaagaggagagtgttttaagtataacgcgttttgcagttatttgatttttcttgtttttatccataactttaggctagcgttcaatacgatgaattaaaatgaaactaccaataaaaaaggttaaattaaaacaagattcacgcggtttctgccttttgcagcgatattatttctgttttttttttgtttaatagaacttaattaattggagaacaaagattattgattggttgtttattctgttgttttttctaatgttctgtatgaaatctagtgatgcttaatttctttttgtatcttacttcaaatttccttagaatatagaaattcattttgttttatcgagtcgattgacttaagacacattacaacatatgataaatagatgtacacaatagataaagtaaaagtgtctacattctaaaccccacttacctacttccaatgtatactaaaaaagaggagatattcatgtacatatatacattttaaggtttccaatctcttgaaaaggcttgctgaatcacattgtgaaagtagcaatggcctggacttcactacaacattttccttcccgccaattacacatcgttctctttgagctacttcatctactagttttgccactgctattctaaaactgaccgtaagtggttgatgcaaagaagaaaatatgatcagtcattccgttttgcaacataacaatgaagcagaaaattatgtatgttcatttcgataatcctagttgttcgacaccttaatgatcttggtgtccttgtatagattaccttagaatttggttcttcattgtcattggttagcttttcaaacttgatgtcctataaaaatgcacatctcagacattacgtaaatcctagaatctacttttggtacttacacgatacaataccgaaaacgtaagtaccaaaagtagattctaggattaggcccaaaatgatgatgtaaaacaaaatcatgagtgggttaggcccatacggtcataaatgggcttatattggattagtttcctcctaccttatcctctttccgaccaaatttaagatattttatagaaagaataataatttaactttttagtgtgagtagccaacaggattggaacgaaaaagaaagtcaataaaagccaacagtaacgcgtctacacgtggacggttgattactcagaaccatgttagctatgggtccagacctacccacttgtgtctcacctttaatcctgcctcgacgttacgaaccccagcttcgtcaccgaaccttactttatatattagtccttcttcttctcatcttctcgcaacgtaggttctggtgaatgatcctaatccgtttagcttttaaaaaaataagaagacatatttatcaacttgatcaacttgagcaagttgcagcagatattttcctcggccaaggtaaagatctgatgttgtcttcttctctactcgatcaatttctatatttgaagttcgtggattttgaaggatttgattggtttccatggtattagatctctgtgatggttgttgatctatcttaaaacttgatttatcttcagttctctcgatttcaaacttgtacttgtcctacttcaagtgatctaatcggaaacttattgttgctatgtttactgatcgtacagatctattgatctaaggattaagctatgttgtgattgagttgttagatttgaatttgaatttgaactgagcttgtttgtttgtgtgtgcagatctagagttttgagaatggcgatggtatcaggaagacgatctactctaaaccccgacgcacctctttttattccggcagctgtacgacaagtggaagatttctcaccggagtggtggcaattggtgacaacttcgacttggtaccctgattactggatcagtcagcagcagcaaggcgcggatggtttctatgacaacggagagaatgagaatggtggaggtcatatcgatgtagctgatcttcttccagaatcatttgattttgatgatatggaagatttctttgacactgatgctgctgagtttgatcaaggattcgatggaagaatgtattaccaagcaccttccgaatttggtaagtcggtttcattcccctgatacatagaaccatccaagatcagtagatttgtggaggctaattgttgtttatatatatcatcaggctttggaaagaatggtgagatggttaagaaatcaagtggaaacaggagcccgagatcgattgtggaaccagctaagtatgcggaaaagccagcgaaatggggaaaccagagggttgctgctgctccgagaaacatccaccagcctcgctgaagagatatgttgttaactagtcagagaagtcagagcagttcggtctgtgtatctttagccaccactgtacctttgtaatttttagtatttgcttccacaacaaaaatctgtaactttgtatctttatgatgttcattctcaaacttgctatcacaaaaatgtaaaaacataaaaaaaaaaaaatgtaaactttgaagagaaatgagaactagagtttatttcctacctttgtctgagcaattctattcaattaccaaaagtcttatcctgcatcggtgatggctaccggaagcagttgcatcaatgttgctttggctttacgaccaaaagaaagccatcgcagagctcaaatatagaaggttttcacgtctcagctactgaaaatgatcagttctctaaagactagaactctacaaggttggtggctaagaaaaggatgtcgattacatcataatgctaatacacgcaaaaggtcaggagtgtcgaacatgttttaacttgcaaacattgccgacgacaccaagttcatttcgagctcggaattgagataccgaagacatgtccaaatttaaaccggacttagtaaattccccatcaaaaatggggaaaatgagacttttctttcgtttgatgcgaaaactctcgtcttgactcttgaagctttgtttttttgactccacaagtcgtcgatttgacattcgaacaaatgattagtcagacgatcagaaacgctccaaaacgcagcgctttggctagaacagagctttaagacacctatgttaatacgaaaataccctctgataaacttatttatacactcgacgtttcgtttttttttccagttttctgaaaagtaaattatttgaaatcccgctctgaattattacaatggcgccaaagagagcatcgccgatgcagtcttctctgtactctatcggtaagaactcggaaagcccttgattttattcagaaaactccgatcaatcaaatgaatcttcgtgtgttttgattcgatttctccaggtgattacgaggttgcagtggatggtaagaatttcacctgtgaatccggacccaaaagcattcaaatcaaatttcccagaaactacacagtcaaaatctcaggttcgtctagaatttgggttcttgcggttctgttttttttccactctaatttggttgttagtcattttgggctctatgatttgattatctaattcaatttcatctattgatgttatgcggctactagcaaaatgtgtaacaaactcaatgtccataatttttctttttgtggtcaaacaactcaatttccctaaattactttaggaaattttccataatattggaccaaaaaaactccgtctgtactttttttttttttttggcaaaaaactccgtctatacatgtaacaacaatcctcgcaatttccaaagtggaaaaaaagaaaaattgggtttcggtcgatccgattcgatggggagagagggcgatcagatgaagaggaagcgaagagatctaacgaacaagacgagagggccctgcaatttctgcgaattctccagcagcaggtacttggctcacagatggcaaacaagggttcgattttctagggttttcattgttgatttaggtctttgaagtaatttaggatatgggaaccatcacaaaatctgcttattaggtttattgattagctatttactcggcttagttggatctcggaatctgaatctgaatctgaggatatgattgaatcagacaataaacttaaacctaaaccccttggcctttttccagatatggatgcagctctgaagataagctgcaggagcaagacaatgaagcagtggtatgtaattacttatgtactcatatatctatctctttgtatgttatacctgtgtttttgcttacattcaacttctctccttgcagctgcggaaagaagtcgagagattacggcttttgatcaagtatgcctgcgtgcgtttcccactttcttgttctgcatattcattttggttgatgagttttctttcatgattccaggagaatgactgggaaggaagatattgtcagcttcaccgagctgctagctcttcaaagtcaccttatggatgtccgatccattgtgctggagcaaaaggtgaaatagggggaaatattacttgactttttttttttgtttccgtgtcgttattatcaagaattttctttaactattggctattgcagaaggaggtagagctggaagaagctgaaaggccgcacaaacaggtaaagtattctaattcttaatttagctgtcttctttttttttgccctgtatccaaattttttttgttgaggaaagtcagttttaccctttccagtctaaaatctctcacaaggccattgcttttgcctctcctttttttcttcttaaagttccttgttgaccttgcaagttcttaagctttctcaccttttacttctttctttcttttttctgtcttctcgggtaattacgtatctgacatatatcacaatccccttcgattttgcagaagaaggaagcagagcatgatgctgacggtatgaggagaggggttttggttccttgcaaattctctgccagcaggtaatctctctgctaaagaattgagttattttttgttgggtttggtcacaacaatttgtgtgtctgtgcaaatgggaaccattttttttctagggtttctttctgtcgaagtgagtgtatatgaaacctgccctttttttttttttttatgagctatataaaccaaaatcagttgtagtttcgtccttattagctactattggactcaacagtgggagttgaatccttcatctctcagaatctgagggagatcacttgtttttttttgttcttcttttcaaagttgtagctgtcttggtgcagcatatcacgttatgatgtcttgctttttgatcatcgaaaccaattgtgtaaaaggaaaggctgacttgacttgttctgcatatatataatacagcttgggagaaagacaggaagatccaaatggtgaagcaccactggtgcgcgtatattctcttctcttccttatctcttttctttcctcagactgtgtctttaaaatcctcattttcttgcagctgcaaatgcagagggaattcgagcaacgcagctctgaatccttgcagagcgagttcgacaaattatggctttttaacgagtaataactcaataccatttcccacttcttgctctgcagaagtctctgtttctttttttcttttctttcattttgggttttctttcatctcacaggagaatgaatggtagagagctcgagggtatgacttccttcgacctgtccatacttcacattcagatattacgagctctacgggctttgattgaccaaaagttgggaccaagacaagaacatagggcatggcagcgcggagaggtaaaaatttatctatcagtgtatattatatgtttttagtaactagtgtatctgaatcgtttcttctattcacacattttcttagcttgtttgccacaccgacaaggaatcagtctctgggttagctgagcccgggagatgttcgtcggataatgacaaggatgctgactcttccttgcaatgtagacttcttctcgtttcaagaaagctcagaagattccataattcttatcagcggaagagcatgccggagaccaggtcggtctgccagagtcgagtgacttccgattgaccttatctgccctggttgctgctttctctgtttctatgttgacatatcaacttgccactttatttgtcttagtcttgaagtctacgcatcttggattgtaaacttagaaataccaattagagtttaatttattaccaaggtaagatgttgttttaagactcgaggggtttcatatctcaccatgttaggacttgtgggtttcatagagcatcaatgagcttcttttatttgtaagagattctctaacacatgacgatcgattactctataaactagataaattaatccgtatgttattctagttaataagggattacgtttctttttaccgcatttctgattaataaaaaccattgttttcaagcttgacccagatcattcgatccgaccagttaacctacgacccaaacatttttccgatttagttttagtgctaatatccgacaaattcaaaaaaaaaaaaaaaatcataaaaattcaccattgatccgcaaccccaatgaaccggttgaaccatctaaacttattcagttatctttagaaaaaatttcagtttttaaactcatttgatgtttttttttttggtgaagacttcacaatatcaccttaagagaatgaatggaattatgagagagacaaccaaaattatttgtttggattcgcgatgttttcttagtttatttttgtcattggtgattttttactatatttgttatggttttaaacttatagttagaattaaaaaatttaatcactttattattattgtttgatttcatgtttttgttaaacattatatgattatttgttgtttttctatttatagaagctatataatctttataaatattaagtatattaaataaattataatcaattgatatgtggtccagcaaggttgattatgtgaatcagaaaataatctggtttaccgtcacgctcggatttaaaaacattgataaaaatacattatatatatatatatcttattatataatgtacggttttaaaagttactaactcaccaaattatgacacgtgacagttttatcaatttaagattttgacatgtgttagagtttttttttttacttttttccttaaataaaataaaggaaactaaaaaaaaaacatatttacaattattaatttatatagttaatttttaattttcttaactaaaatagaaaactaacaataagatataaattttaagatataaatttatttaaatatttattgataatatttaaaataatatggaaaactaacaataagatggaaaacatatatatatatatatatatatttcgaaacaaatgtaaaaaacagaaaaaggaagtaagtgtaatgtaactttttccgttttccattacaatttggggaatttttttatttttttttgggttaaaaataaggtttgccttggataacaagaaattgcttttgctttctatcagatattaactttgggtttccttcgatccgattagaaatctcgagaatggggagaggaaggattaagatgaagttgaaagggaggcgaagagatttgacgaagaagaaggtgagagagctctgcgattattgcggattctctagcggcatcattaggtaaactcgctgaatcaattattattattagcttcgcttcttgcggaaagggttctattttatagggttttgttgttgaaatagttcttaattaggttattgagatgtagaacacgttggttatgagttacataccctagccatcgcaagatctggttctgcaatttttgattcatcgtttcgtttttctgggctagagctattactgttgggtttggtagaattatttggatctcatattaatatctcttttttctgcaacataactatgcttgtaatcacctaaacaacagtttaaaccaaagccctgactttcttctgtgtttgcaaactctttctaggtatgatgaacaaaggccacacgaacgagatcacgaagcagtggtatgtatcttgtatggactttgatctctctgtatatcttatttttgctcacaaattgtttttcacacttcttctagtctatggagaatgaactcaagagattacggcttttaaccaggtctaactcattaacatttcccatttcttgttctgaaaagttatccctctcctctctttgctttgtgattcttatgatgtatatcctttattcccaggagaatgacttgtaaggatctcgatggtctgactttccccgagctgctatcacttaaaagccatctacagactgccttgctcattgtgaaggaccaaacggtgagtaaccaaaatttaaaatcggggaaaaaataagaaataatgcatcttacttctttcttctatcattcaaagcgttaaacaaaccacctttttttttatttattttttaaactgttacagaagaagatagagcagctgcttaaagaagatgatgggtggatgcttatacgggtaaacatttcctaggcacttcatctgccctatgaaattattgtttgtgaatctgctaggagctgctgttcatgttgattcttgtaatatcttccatgtttgaagctttcttacattttttgtagaggaaggacgcagaggatggtatggggagagaggtttctgttccctgcaaattctctaccagcaggttgtctcctccttcctagcttaagtaggaatttttggttctaagttgtagttgtctggtgccccattaaagcctgatttggtcttggtatatctacagcacgggtgagagacaaggtgatgaagcaccagcaccaccgctggtatgtatattaatattctttcacagtcctgcatgcctctctctttaccccacattgtcttgttatacttgtgcatcttttattgcagtcgcaactgcagctacaattcgagagacgaaatgctgaacccatgatgatcgaatacgggagattatggctgttgaaggagtaaatgcgtcgccatcccacttgttgctctctacagagtcgatgtcagtttcactttgtttctgatggtttgtttctttttccttcttttcgtgaaaactgacaggagaatgaacggtagacagctcgacggtatgaacaatgccgagctggccttacttcaagctaagatagtacatggattgcaggagttgcacgagcatatgtatgcaccaacaatggaaaaaatcgctaagaagcgcagatatctgttaagagaggttcccggccggagctgagcgcgagggacgatgaaagctcagaaggccacacccggccatcaaatctttctatgagactcttaagtgacttctggtttctctatttctattttagtttatcgtcaatcctgactttcctcatgtcgggcctctcttagttgattttaatatgtcttaagtaaatttactaatctattatcatagtcgtggcatgttacagatttctgttatatcatttttttgcttcatacttagaactttccgacctcttctatcaacatcaccttgatcctcaaaattaggcgtgggcgttcgggatcggttcttttttttcgggtatcgggtctattcggataggaggttgagaactattcgggtattctaaaaatttggttcagattcgggtcggtttagttattttagtaaaaatataaaaataaccaaaaatatccaaaatattttcgggtttgggtcggattcgggattttttactcacatatacttaaatctacccaaaatacccgattatcagtaaatatattggttactttttatccaaatgtaaccaaaatacttaaattacctaaaaaaacctataacattcgggttttttcgtttgatgcgaaaagtctcgtcttgactcttgaagatttggttttttgactccacaagtcgtcgatttgacattcgaacaaatgattagtcagacgatcagaaacgctccaaaacgcagcgctttggctagaacagagctttaagacacctatgttaatacgaaaataccctctgataaacttatttatacactcgacgtttcgtttttttttccagttttctgaaaagtaaattatttgaaatcccgctctgaatttttacaatggcgccaaagagagcatcgccgatgcagtcttctctgtactctatcggtaagaactcggaaagcccttgattttattcagaatactccgatcaatcaaatgaatcttcgtgtgttttgattcgatttctccaggtgattacgaggttgcagtggatggtaagaatttcacctgtgaatctggacccaaaagcattcaaattaaatttcccagaaactacagagtaaaaatctcaggttcgtctagaatttggattcttgcggttttgttttttttccactctaatttgattgttagtcattttgggctctatgatttgattatctaattcaatttcatctattgatgttatgcggctactagcaaaatgtgtaacaaacgttcaagttgtcaacttttctgcataatatcttacttagtttcttgtttggttttgtttagagaaggataaaatcgtttctgattatccgaaagaagacatgtttcttcttcttaatcctcgggatgaagatgattttaccaaatctcatctccaagtaagtggaatcttaccaaagcacttaaaaattggtttcttttgagaaaaaggcattactttagggaatctattgctcataagtactattaacttaactcattcaggaagttttgaagttatatagcaaagagttacctgacatgagatatgcttcaaacactgggaagcaatctgcatttcttgagagatgtgtctctaaagggtaaaaatcgtctctttatcataacctttctttatgtttcaagctggacttttaagtatagagacttcttttggccgtttgtcactaataaaaacattgagaacggaacccatttttgatatgaatggaagagttatctaatgctgtatttatttgaattgcattatcttgcagaaagtattgttcattggttttgaagtccacgcttggtggagactcagatgaggtaattaataagctttggtttagtaagttcttgatcaaaagcagcctaggccttggaagaatcttgaagagacgtattattctaaccagcatgctgttttgttccaataggaagaatctgttttattcaatctgccaatgaatcgtattttagattgtctgctttaccacatctgaattgattatttggcgtgtgcttttgtagatcttagctgcaatcacttatcaaatagtccctgctgatacacagtatgctgagatacctcttgctgctgtaacatatacacaccagaaaaaggttcgttttgctctgactcttttgacacttactgttgtaatagctttttttgtgcaacgcttttactaaaggtcttgtgtttaatagttcatgtctataagtttatgtattagatattgcatacttggttttaagtgcttcttagaactgtaaactttttctttctgcaactggttttactaaaaatagcgtgctagaaacctcatcaaaaactaaatagatgagtttcttttaatacattttcagggatttggtaagctcgtctatgaagaattaatgaagaggcttcatagtgttggcattcgaactatatattgttgggcagacaaagaatctgaaggattctggcttaaacaggtgatattatcactttatcactatgtttatggttgttggtgttttatctttattagtttgttggattcaaactaaactatcttttttaagtgctttgactgtttggtttcttatattactttacgaattttcaggggtttataaaattagcagaggtagaccacaaaggaaaagcaaaggggttgcacattaagtctaatattcgaaaagccttgtgttttcctggcggttcaactctcatgctttctcatctgaacaaggaatttatttcaaaccttgagatttcctcttcatggaaatatcagtgtgagggatctccactctcggcaagaaataatagcacaggtcctgtgactggagattcagttaaactgagagagagctttggtgaaagcgtatatcttgactgtaagtttaaaactatttctttcgtcaaatagcctaagagaatgtctctgaagaagataccacatcatgaagcatttgaatatgtctctgaagtttctgttataatgtgccgtacacaggtatctctggtatcagaagtccaatggactcgatcacaggaaaggaaaacaacaacgtgatctctgatcaagctaccacagctgacagtgagaccaaatgttcaacaccaggcttaaagagatcttgggaagcttcattgtcctctctacaatctaaaaggattcgggcaaacaacaataataactctgagatagcaaaaacagatttggctcagagctctgcaaagcaatcgaaagatggtaattcctcccaagtagatataaccaaggattccctgcccacaatctgcaaaagaaacgacgttgaacaatgtagaatggcaactgggatagacatggaagctcgtccaaatggacaacactatagaatcttgttgatggacatttgtgatgaaaacaagagagcttggttaacagaggtatataaatctttctgagttatttgttccttaaatgggttttgtatccaccttacgttgtcttctgatttctatgcaggtaataagaaaacttggtggtactgtgaccttggatggcacaacgagcacgcatattgtcaccggaaaagtcaggaaaactctgaatctctgcactgctctttgctctgggttagtctcaaatatacaggcatcatattagccattgtgaacttatgcgtaaaatcataggaatgacgcggtttatggtccatcatacttgcttgcagggcgtggatagtatcaccaagttggttaaaagaaagtgtccgagaaggaagatttgctagtaagatgagatataattatctatctctgatgggtacttactaatgaattataatgctgacactatttttgtttaatagatgaagcttcacacatactgcatgacgaagactaccagttgaaatatgatactgatctaaaaagcacagttcttagagcaaaagctagaccaaactcgttgctaaaaggatatgacatatgcgttggacctaacattgaactgcctatcaaaacttcatctgctatcatcaaatctgctggtggaaatgtaagtattagttaacaacttgtttcaagtgtttcacatttgaatccaaaacattgtaatattcatgtgttatctgcaggtgataagtggagtgaataaggtaaaggaggcgtcaaaagcgatatacatagggtgcgaagaagacacagtaggggcattatttgcagcaaagaaaggaatttggacattcagcagcgaatggttcatgaactgtgtcatgaagcaacaacttgatcttcaagttcctcagtttgttgagtccttatgatgatgactcgaactcgaaacctcctatgatctttagcttggaaaatctcacttattatctttttatgtttagagacattgtcggaagttgaatggataggctaagaagcaaactcaagtcgccggtctatttatgtataaaaataaaaatgtgttacttgaaggttggtttaagttacatttaaaagtttgagataattttgaaatatgaaaggaaactgagggttaaatcgcaaaaaggtaaagaactgagggatattttcgcaaacatttagaacaatgaatgaataagcgtaggagtttcaaactcagcccaatacacatctcagtaatgggccgactaaaactcagcccaatacacatctttaccctcaccagggcaaagctaaaacatttcggattgctctctcgcttgcacatggatccgttcgtgtttcgtgccatttccaccattatcgctccttaaaaacctttttccagctaattctctttgttaatcgtagcttttttgcttcatctgtctctttctgcttttgagctagaatttgttgggatctgtgttagagattacaattctaatgttctaaatcgcaaaatggattcccaaatgttttttgaaatcgacaacacttgaatcagaaagaaatcaattctaatgttctaaataacattgtttttttgaaatcaccaaatgtttgttgtcatctctagagtttgttgatttcaaaaaaccaatctcgggggttgatgcagaaatgaagatagtaaggtacttgttacagaattcagcaatcctcaagaaactcactatacgtttggtgaaaagatcgtggaaagcagagtgttttctcgaagatctctgctgcatacaaagaggctctagtgagtgtgaagtcgtcgtccttgattggtaaagagagactagagagtacaagtttcatgatgtcttgtgtagtgaatgaatctgcgtagtagtagtagtttcatggttgatttggcttcagctgtactttggaagtaaaatatcgttttattaaaggttttaagcagaacgagtcaaaagtataatttggtaatcccgtaaccatcacttgaagtcaaaggtctgaaattagattaccaaatatccccattcccaattaagtaacaatcctccattattcttcaataaataagcgggaagcttgagtagattacaagaatgacccaactgataaaaaaaacggctcctttaaatgcaaaaaaactcctttcagtttcaaaggtatcgtctccctcaaaatcacaagctctacatacaattcctgctcacatcatcacatggcttcatcagattcgtcttactctcggaaattcttactcatcacctttcttcctctttccttggcctgcttggccttcctcctccaatggcgaagcggagtcaacgattccgttacgcagtggtttgatgataactatccgttcccaggaatggccactgtctccgagaaacgttctcttcgttctgattcgagctgcgtttctcttctgggtcagagccgtacgcaagcgtttccttatctccgagatttgaagcttgatcacaagcccgatcttaaacctagggttagaaatcttggttttcaatttgatgggttttgagaaatgttaagacttgattcatttgatgatgtaaaaatcgatttttttttgtagatatgtataacgacgagcacttctgctgggttagagcagacattgccatggatattctatcacaaggtcattggagttgaaactttttatctatttgttgaaggcactgctgcttccccaaacgtttctcgagttttggagacaatccctgtgagcttttacgagtcttgttttgttatagttgctctgttcatgaatcctgatgtttggctttatgttaccttctaattctcagtgatgatatttgtttgcagggtgtaaatgttatatacaggacaagagagttagaagaagaacaagctaaaaggtattcttgtgttttgtctgtcattaagttatggatttagagccatgtagattagaaaaatggaggatttgaaggaaccacctctggttatttagacatacctagatatattggtgtctcattggtgtgctcttgtgttatgcttctttgcatcttgttcttcaaaactgaaatggttctttgcatcttgttctttcaaaaaagatcatttcatttgaagttttattacattttctttggtttatagccggatatggaatgagacttggttggagaagtttttctacaaaccgtgtaattacgaattattcgtcaaacaaaacttgaatatggaaatggctatcaccatggcaagggtacctgttacattcagttagtcactagaaagataaattatagaattgccaacttttttcacattctctccttttgcttggtatattataggatgctggtatggactggatactgcatcttgatactgatgagcttgtacatccttctggaacccgtgaatattccttgagaaatttgctcagagatgttcctgcagatgtggatgaagttatctttacaaattacgtgagttaaaagtctttgaagacattggaattggggtttctttctttggtttgacgatggtgatgactcgcaaatgttcctttttcaggagagcagcgttgagcgagatgatatcaaggaacctttcactgaagtacagaacattatcatctagagcttgctatcttgggacatatcttcatatgagttttatcatcaaaagtgtttgtttttgaacttttaggtatcaatgttcaagaagaattttaaacatcttcctagagaagtttactatggaaactataaagaggcaactcgtggcaatccaaactattttcttacctatgcaaatgggaaatccgctgctcggattcaagaccatcttcggcccaatggtgctcatcgctggcacaactacaagacgtatccaaagtatgttcttttcctcacttagcttaaacatagacattcattcttttgcttttgtaatctgacattgattccatctttgttgtgacagcatcaaggaactagacgaagctgcgattcttcactacacttactcgaaattttcagatcttacttcaagacgtgatcgatgtggctgcaaaccaacaaaaaaagatgtcaagagatgtttcatgctagactttgacagagccgtaagctagttttgatttgtttatgtcgattagtatagttcttgttcatcacattttgtatttgtttttgtttctgcaggcattcatcattgcttcaacttcaacttcagaggaaatgctccaatggtacagagaaagagttgtatggactgacgataatttgatcctaaaacttcttaggaaaggaattctgactcgcatttatgcaccaatggtcagttagttttactactaaatctacatcctcttttaaatgcttttcattgaacaaagctatcatctatctcaggttataatccaagagctaagagaagccggtgttttcagctcagtggtaacttcagctcatatgtctctctcaaagaatagaagcaactcttcaacctcaagcaactactaggaaggtgttggagtttgatcttgttggtgaatcttaagcagtatcagcgataccaccgaaagcatctccaggcttggaaaaaatccaaaatgtttaattataactttcttgaaaatagacttcaaaaacttgcagagagatgaaacagagattttctgtacattttcgacaagattttttttttgcttaggtaactatacaagaagaacattagagcaggctttgtggatctacttggaccattaatatacattctatgtaaaatgcttggatttttctgttggtcttgaatcttgatatgaagaaggaatcatagtatgatagtgtctgtgtttaaagactagtgttatagagtgaccaaaagacagtggagtgggcgcgtgtcatatacgcgcgtacgagctttttttttggcggttctttgcctctccttcctctcgagtctcgagtttgtgccctttattcgatgaacaacgttcttcagtttggtctccagagctccgccatatatgtcgccaagtacggttctgtctgaaatcttttaataactgattcgacttgtttagttgattatccttgaaaatttaggtttagaaccccagaaaccagtttggtttagaacgactgaattgtcgcctcttcttcttcttgaaatttagggcttattttgtgttgttgttactcctgaatcgtttcggaaaaattaaaccttttagtcgttgatttcggatttcttctaggttctgtttcatttagctgatgtttggaatctcaaagctgtgaccttttttctcaactttttatgttttccaaaattttattgtatgaaatttcgtgattgatgatgattctaggtttctggtggtgcctcttaggagtttgagagttggttcatctttcgttggagttggagtgggaacaagaagtttcaacaagaggctaatgtcaaatgctacagctttctctatcaacaacagcaagcgaaaggaactcaagataccaggagcagctattgatcagaattgtcatcagatggtttgtgctaagattgtgattcatttgttcacttgcactagtgtagctaagggtttttgtttggtttgcttgtttaattgttggttttgatgtgtagggaagtgatactgatagagatgaaatgggaactcttcaagatgatcgaaaggaaattgaggcgatgactgttcaagaacttagatccacgttgaggcaagcttatgctccccttcttttctcttgctgctttgttattgtttatgtggacatccagattcttgttcattatttaaacatgtggaacgtttttgtattgtgttacaatggttttgattataggaaacttggggtacctgtgaaaggacgcaaacaagaacttatctcaactttacgacttcatatggacagcaatttacctggtatgtaactgcacaccaagaacacacacttttctatttcatataatcatatcgagaaaaaggcatgaacttgtttgcatttagtagttgtctaagcttgttccatttgaattagaataaaagtctcaaaactgctatagcttctgattatttggtgaaagcagtaaagaattttggttcggagctgcgtctgttttacattttctcttgaagtgaaaaccaagtcctttcctgtttatcaatgtcagatgaaatttctgtttcagatcaaaaggaaacttcttcgtccacccgttcggatagtgtcaccatcaaaagaaagatcagcaacagggaagagcctactgaagatgaatgcactaactctgaagcttatgacattgaacacggagaaaaaagagtaaaacagtctactgagaaaaacttgaaagctaaagtttctgcgaaagctatcgcgaaagaacagaagtcattgatgagaacaggtttgtcgcgtgttaaaataaacgaattttatgtaataaatactggtatctacatagagtattataaaacatgcgtgtgattaatctacgtaggtaagcagcaaattcagtcaaaagaagaaacatcatcgaccatctctagtgaattactgaaaactgaagaaattatctcatccccgagtcaaagtgaaccgtggactgtacttgctcataagaagcctcagaaggactggaaagcttacaacccaaagacaatgagacctccccctctaccagagggtaccaaatgtgtgaaagttatgacttggaatgttaatggactgagaggattgttgaagtttgagagcttctctgctctgcagcttgcccaaagagaaaattttgacatcttgtgcttgcaggagactaaactccaggtcataactttagacccttcttaagttgtttctgctctatattttaaacacagccaatctagaaatctcttgtactaaagacatacgcaaacttatgacaggtgaaagatgttgaggaaattaagaaaactcttattgatggctatgatcatagtttctggtcctgcagcgtctcaaaacttggctactctggaactgcaataatctcacgggtaacagaagaatgtactcatttgttatctgatacgtcaaagtgaattgtatgtgttttgatcagtttggtcttttgacagataaaaccactctcagttagatatggtactggtctatctggtcatgacacggaagggcgtattgtaactgctgaattcgactccttctacttgataaatacttatgtccctaattccggagatggattaaaaagactggtactcaaataatagtattgtattttattgtcacggttgacatatatactctactaatctttgtattctaacgagtggattccgtgggttttcaagtcatacaggatcgaagaatgggatcgaaccctcagcaatcacatcaaagtatgaaacgtttcttcagagtttctttattttgttgtatttgtccttgttacacgagctcaatggcccttttgcatctgcaggagctggagaagtctaagcctgtagtcttgacgggtgatctaaactgtgctcatgaagaaattgacatcttcaatcctgcggtaactataactcgaatgcttcttctcgaacagtaatctctcagttttcttagttcttcaccatatcttgtaactaggggaacaaaagaagtgctggttttacaatagaagaaaggcagtcctttggtgcaaacttgttagacaagggatttgtagatacctttagaaaacaacatcctggtgttgtcggttacacttattggggttatcgccatggtggccgcaaaaccaacaaaggtaattaagtttgtttggtacatattcagattcatatgtttggtttttaaactggtgaaatggtgtgaaacaggatggagactggactacttcttggtgtcccaatcaattgcggccaatgtccatgattcttacatcctccctgatatcaatggaagtgatcattgccccattggccttattctcaagctctgatttgttcaaaatttcaccattcccagctttttgctaaagtcttgagtagattgtagctagagagtcacatgttttgcttctagagagagcttgctcatgtaaaaatatggaataatatatctatcagtaaacaggctccaaacaatctgagtcttgtccaatctctcattgctcttactgtatttcttcggaatagaaacaacaaattaacccatcaattgagttagattggaacctcaccatctctttctaaacactaataagcttcctctcgatttattcaccgtcaggttcaatggctcctaagcgccgtagttacatatcctcccaatggttccttccttagcacaagctttatactcgtgcggatggtggaggatgatgctctctgtattcttcggaattggatcagccggtatgacgtggcggagacaaatcgcgtttggtcgatcgcagttgttgcagatctgttggcgacgatgcgcatctggctcgctcctccatcgtcactgctctgtcccgcgagcgaatccgagattaatggaaatgtcgatacgtcgtcgtttggtatattagtggtattgcatcgttttaactaaggttgtgaatggtgaccaaaaccgcactcaaaaccgcaccgcaacagtgctgtaacagtatcaaaatctctacatatacatatgtatctatgtattttcgtaactatttgaaccataccgcacttctcccgcaccgcaaaacgcagtcaccattcagagcctaagttgtgaacgacgtcgtttgcgctattagcaactatgatgccaagtgttggaaagaatgttttaaaagaacagtaataataagattttgaggatgaaggtgatgttgaaagaagaggtaggagagtgcaagtatcaagaaaaaatatgatatgacagaaatctgtaacatgccataactataataaaagattattaaatttacttcaagacattaaaatcaactaagagactcgacatgaggaaagtcaggactgatttctgtgatacttaaaagtcaataatatagtccgaaagtataataagggaggagacgatacaagataaaattatgtccaagtcaataatattagggaggggaaataagaagcagctacatgagtctagcatagcatcgcaaaatgttccactattggtcatattagacatttagatgctcatgcaaaccatgaaatccgtggtgtatctgatcccaaagtatattcagctccatgtaactcatacttgtcagctctctgccattcattctcctgtaaggattcaaagaaacacataagaaccaaagtgacagacactattttgcagagcaacaagtgtgaaatgtcattactccttcaacagccataatctctccaattctctgtgcataggttcagcttttcgtttctcgaattctctctgccttcgcgactgcaacaacataagcaatgagaggcaagataagagacaaagtgaatatacatctatatatatagatatataggtaccactggtggtgctccatcctcctgtttctgttgtccctctccggagctgttatatatcccataatatacccagagcaagtcagactttacttttgcacaataggttcagtaattaaaaaaaaagcaagacaacataatgtgtttttattcacaaccttagaacctaagtaagtgatgatctctctcatattctaagacatcaaggattccaataatagctagataattaaatcaacataacaaagaaacgagagaggatcggattctgcgataaaataactgatttcatattttttttattagccaggtactgattcaacaaatgaaacccaagacaaaccgaacccattggacatagatagatagatagatacaaattgttataactaaaaagttttctatttattacccgcggttagagaatctgcaaggaaccaaaacccttctcctcctcgtaccttcattatcaacccctgcttcattcttctgcaaaagaaaagttggggctcactatttatgtcaaatatctaaatcccggagaagataagaaaaataattgggaaaatgtacgaaagcttcaaacatggaaataactgcaagatcaaacatgcaatatcagcatgccttttttttttttttttttttttttagtattataaattaaaatcccaatgggctgggccttgggccatacaaacttggaaacagatacaaaaaggagatcggaaaatgtcaccggaaattagaacggaagctcggaacttgttgattcccggtggcagagagtcatacaaaatcagcatgccttcttcctcattaattcacaaacaaatcttgttgggcgacactgacgtaatgtactgttgttttaagtctttacctttgcagcctcttccagcttcattttgtcctgtcataaattaaacatgatgtttgagaattacaagatttttcactaatatgagaaagaagaattctcatctgtctgtctaaatttgtgtactaaccatatgcttctccacaatgggcaagacatcatctagacggtttctaagtacttgcagctcctcgaaactcaaaccgtcgagatccttaccagtcattctccggggaatataaaggaaagctcagcaagtggaaagaaacaaacagagaaacttgagaacaagaaacggttacatacctggtcaaaagccgtaatctcttgacttcgctctccatagactaggcaattggtgtaagaacaatatgtgaggcaaaacagagagataaaaagttgaaaacggtattcgtgtacataccagtgcttcatgttcttgtttgtgtggccttagttcgtcgtatctggaaagagattgcaaaccaccagaagaagtcagggttggtttgatgagtaattacgttgcagaggagaatcatgaactaacagatcaaaacttagaagctagagctagatgatctctatagatagattatctctgcttctacaaagcccagtaatagcttaccaagaaaaaaaaactgcagaatcagattttgcaacggattccataccaattacctaggagctataattcaacaacaaaactctagaaatatacctgcggctgctggataatccgcagaaatcgcagagcaatctcgcatccttggtcaaatctctgcgcctcctcttcagaaatggcgaggaagtgtcatcatctttatcattgtccgatgaatacctctcttgttcagctaaccttgaggttgattccttattgttctggtaaacaaagtacgacacgattagagaataaaagaagtggtttcgatttgctacttggaacatgtatacattgataaatctataccttctcgcgctgccttgcagcaacttgttcctcccttggtctattcatttggacaagcaaacccaacaaagcatttaatatctgattgtcaagtgagagcaggtcacgagatgacataccctcgagctctctaccgttcattctcctgtgaggatgggaaaaaaaaaaaccaaattgaaaagctgagactcttgcagagcaagaagagggaaatgctgatgagttgtattactcgttaacaagccacaatctctcaaactcgctctgcaatgattcagagtatcttctctcgaatctcgccttctttaacagctgcaagaacaggagcattttacatacacaagctgaggctaaaaaagagacaggacaagaagagagtgtacacagaccagcagcgctccatcatctcgttgtctttgttcagagctgaatatattcataatacatggagagcaagtcaggttttagacttacacaataaacaaaaagcgagatatcatagcttgctattctgcaccaagacagctacaacaacatcgaaaaccaagtggtatctctcaggataaaggattcaagtcctagtgtcgagtcaaatagaagtaataagcaaagaagacgacaaaaaaaaaaaaacaggtttcacattcatatatggttcacacaagaacaaaagaaactaatttgcatagaggtacaaattgttctaaccaaaggtgacaagtgagttcattattgtagctatgagaatacctgttgcatgggaccaaaacccctctcctcgtaccatcactctcattctgagcttccttcttctgcaaaattgtaaagatatatataaggaaagggaaattgaatgagaaactagcaacgttttttatgaattaaaaaactttaccctttcgtcttcttctagctttatcatcttctcctgcaatagtgaaacaagatgtttgagaatgagagcattttcaataataggagaagggagtcggaggtcatccttcccacccccctaaatggaagtttcctcaccttttggtccaacacagtgcgactaacatccttaagacgactttcaagtgcttgcagctcggtgaaatgagcatcgtcgtcttttccagtcattctcctgagagtaagaaagaaagacaagtcaaagtcatataaaccaaagtgaagcagtagaacaaaaaaagtagtagtagatgtacatacttgatcaaaaaccgtaatctctccaccttttcccgcagctgcaagaagaagacatatatgtgtatatatatatatatatgatttggaaattcagtagaggacacaaggaaataattgcatataccacattgtcttgttcagaggagccacatccatatctggaaaaaaagtcaaggcttttattagctcaaagagatactatttggctaaatgagattgatcaacctttttctaatcataatcatgttggagccccagtaactagctagctaaagcaacaatctaaagatacagattggggatggtttccatattccaattaccagagactaattcaacagctaaaccctacctgttgctggagaactcgcagtagttgcacatcttcttcctcaaatctgttcgccaattcttcaatgaaccctatatggctatatatatgtttttttttgtcccaccgcttgtgtatattgaaagagcttataataaaaacgtgtttatttggggctgcgtttataagaagagtttatttagaaaagcgcttatttgggctgcgttttaaggcctctttagaaccctctaaacccggtttcgaccttgacgggcccatggtttctttgattatgaaacaaaaaatagtctttccttacctaattaacaaaatagattcttttattataaactttaaccaaaataaattctttgattataaaatttctataatgttgtgactctctagctaaaatctactcaagactttagccaaaaaagcttggaatggtggtttgaataaatcagagaaagcagcaaccatgtcagataaggtcaatcggaagtcactcgactctggcagaccgacctggtctccggcatgctcttccgctgataagaattatggaatcttcttagatttcttgaaacgagaagaagtctacattgcaaggaagtgtcagcatccttgtcattatccaatgaacatctccggggctcatctaacccaaagactgattccttgtcggtgtggcaaacaagctaagaaattgagttatattgtatatgtaacgttttccacataatcttcgtatacttagcacttgttgttccgtggctctttcaattcaggatcttggaatatcatctttagcctgcgaccttggtaagtacaagtgcgcggtggtgtataccgtggccaacaagcggacagtagaaacatgctcggggcatgagttgtgtgcattctgatgaatctctcatcttggaacaacgaacgccagcttttgcagacacatctaaaccgtagcaagtatttaaccggaacctttgcaagtatctcaatgaccaagtcaaaagcaagttctgccatccttgggatctaaacaataaaacaaactacaatagagatatatagacaaaactgaaacgaaaaccttcaaaagtagagatcctcctaacatgcaccaattgagagttcgtttggttgagatctatgtataaacttatgataaggatgagaataaacggttgtatagggtttagggtttaacttgtataacaagggacgtattttagtcacaaatcattactttccccaatttatatggtatcaaagccaccaagaccctaacttattcgtctttcttgatcaatttggagtaaattgcaatactacttgattttgcatgctattattttctatcaaaacgaagaaaaagaaaaaggctaggccacttcgcaagtagccacttgcaatagatcaaatcaacatacaagttttttttttctctcaaaaatacactcatgatcaacacacttgtacttcttctccaagttatgccatacaaatagcaattcaccgataatcacaagtccttgtttttaattattatatcaatcttacatagctgcaacggaagaggtagtactaatgggttgagaagacttggtattgccaatgccattgcagacattaaagccgtaccaaacagagttaggcaagaaaaggttgtagtagaaagtgactgatctgatggatgagccgtagatcttaacattctctggtttccagccgtcggatccttgcctgaggaggtagagataacaaacgtcgcgcatacacggtcccgatatcttgtatgtgtctgatgaacacttttcgaacgtcctcgacgatggatcgtctagtctcttcacatacacctgaacaaaacaaaacaattttttttaagccaaaaatattcattccttttccctaatttagacaaataaacaagataatttaacattttataacctcttgaatatgcagcatcgttactgctaaaacgcaagctactactatactttgttttatgggatgaacttaaaattgttcaaaataataaacaaatccaagtttcttggcttggtcaaacactcaaacctaagcccgagtttcttggatctcaagatccagaagctattcaagtttcttggcaaaccaaaaatctacttggataatctgaaccgggttgttgtaaactaagattccagaaaatttgtggaaaatcatattcgattgattacggatttatttagcagtgaaggaagctatccgaattatggatattttgtagatcaaaaccaagaattgactttaaagaaggaaaaaactaacctcgttgccgtagacatcaccaaacgatatactgatcttatctctagtgtaagacacagaggaacagcttgtcttaatgatcaccgtgtaagaacacgcagccgcattctgaattgaaaataaataaaatcaatcaatctgaattgaaaataaatgcaatgaatcgagaatatggtatttacctctagctttggtttaggaataaatgaatcaatcggaagaggttttgtggtgatgaaggatcttgcagaagaaaataatgtgaaagagcataatgcaaaaagaaacaaaggaatcgctaatctgagcattttgttttgagttgaaaaagtcgatgaacaaaatggtcagatcttagtggtttttggagatttggatcaaaccaaacaattactctaagagaccgacacgaggatcacgcgtattttaataaatgagagaagttgatattctttgttagtttgtcagaatctaattggttttcttttgccaaccacgatttttttgtcctatatatgcatagttttgctaaatcactataaaatggaaaacaatcattgatagaaaggtaatttaataaaaagagtattattggtaaaaatggaaactattattaattttttattcattattaattagtaaaaatggtaatttaacagaaaattcattattaatttgtttttgactatgttattttgttgataagaaaaaaaaaggaactaatttgattgtccatttgttgactatgaatactaacctttgtaaattattctgaaggaaaaaaaatgtgtatataaagattagcatatactgttttaccatccaaaacaaactcactattttttctagagaaataaaaaactgaaaaataaatattgaaagacgacaattacgtaacatgcattcagtgattagaaatctgaaacatagagaaaccgaatacatatactatatgtctttattcaaactagttcaccttggaacaaactttcctaacctcgccatcaacgtcagtctttacatcaatggaactcatcttaatcatagctttaccaaactcataatcaaacctaaaccctaacaaacctctaagacgactcgcatacttcttcaccacggcatttgtctcggcgtccgaccaaagccgttggtccgactctagaatagcgtttccgtcgcgtaagttcttgaagaaactttcatcgaattttgaggggctaccaatgtcaagagcaacacgtttcgaaccgtctccattgggaggacaaagagtcttgagctgtgtaagaaacgatgggcttatggttggatcggagtttccggtcaccgtgaagttgtataaacggtaacggaagaagagacagtcggtttgtccaattgtatgtgcacctgatcataaaatttaggtaaggtaattgattgttgttcaaagaaacaaaatcctggtatgttcatcagaaacaacaagtacaatttagttactctttaagatggtctaatcgcaagggtgtcttatattttcccttacaaaacaagagttgtgtcaaatgtttgttaaattcatgtctcaacttcttagtattcttgatctatttgagtacgacggcgacaaaagctagctacggctattacttttataactagttttttcaaaagtttcaaaaaagtatcaacaaaatgaaacagggttcactccaacttttaatcacttgcactttttcatgttggtatgtgatgtgtgcagcagctagcatattttactttcaattgttgaggaaactctttatgtttcttttgagcatatgtataactttttattataatataaaaaataaacaaactcaacaataaagtagaaaataatcttccttaaaagttctccaatttcctattataaaagagatagatagatatacctagtagagtaactagatcatgagtatccaatcctttatcttgaaacttttgcttttgaacagcaacagagtcaagtggagaaggtagattcgatgcttcagttgccaacgagattctcccgtctttacgacccgttggtactcgccagcttggcccatcactcttgttttcatacatacatatacatagctcagctgatatcagtaattttaacactagcaaaggaattaagtaccctaactaggtttagtaatcttgcgtaccaagtcaacagagtcacgagcagcaagtgcaagtatatctgcacatgacacaactcctggacacaccgcctcaagccgggctttagcatcatcgatcacttctaaacctcttagaccaagatttggtagagcagcttgctccgcagatttccctttgattaaaaccgaaccatcacaaccctaataataggtcatattcaacaattaattaacttgcataattgatagaaaggagattgagattagcaaaagaaaaattaaaattgaaacctgaacaaaacagtcatggaaatgaagcctaagcaagccaggggaaattgtgggatcagaatcaaagtgagattcaacagtggatctaactatcgactcagcttttggacatgaagttgaataataaccattttttaacaactggcttctcacttcttttcccaacaccaacactaacattattatcattatataacaatacttacctaagtacactcccatttttctaactcttatttgtgctgtgtgattaatcaacatgcaatgatgttcaagaaccaacttatatttatactcacacacatacatatgcctttgtctcaatggaaccgtgtggggacacatagtgccttcactttccttttgtttacagaagttgtttttaaaaaattgatttatattgctatatacacttggttgccactatgatgaattaatgggttttgatgtataatagttttattataaatttatttggaaaataaacatgcgttatttacgagtttcgtgctaacgtcctttcaaaatctgtttcaaccttaattacaagaaaaaaaaaacagttttaaacaacaacaacaacaacttcaaatatatatatacatcctcccaaaatattaatgattcgtttgctttacttaaagcttctttgctatatcctcaaagtttagcaatccatgaaataaacaaacgtgttcacaacgtaattcagatataagccgtcactatttttccccgttcacatcagcctcacttgtagttttgtctcaatcgaaatcattgtttttatatttactacaaaaaagaatctaataattgagatcgaatatagaagaaaaatgaaatactcgttgttacatttgaaattcgtaacgtatagtgtctctgtctgtatggatgcgtgacatgtaacgttgttacaatatatcttggttatctatattttatttcttactagataaagcccgcctaaataagcgggtataagatgtaaatgtaatttttatcgataatatttaaattttgaatagtaaaataataatcgatacattgttcttgatatataattttgaatagtaaaatagtagtcttatgcattttattttgttatacccattcaatcttattgatgatatttgaagtctaaatagtaacctacacactttttctttattgtaatttagtatttagaagaaaaaataaaattttatcttatacattcaattttgtaatacaatttaactatctatttcataaaaaactcgattttaattttacacacttcatcttacttgataatgatttcatgtcaaaataatatatatatataagatcaaatctatatcttagttaatattaaaaattattaacaattaacaaaacataattcataataataaaacatttgttaataccatatatattaaaaatttgaccaataacatatatatatattttttttgttaattttccttttggttaagaaaaataaaatgtaatattttttagatatagaaatatgaattagtatatgttaataatgatttctttttttagttttctatttctttaagaaaaaaaaagttaattattttcttacacatggcaacatctgatcgatagacttgacacgtggcataatcttatgagttagtaactttgaaaaccatactttatataataagatttttttttgttaatttttcttttggttaagaaaaataaaatgtaatattttttagatatagaaatatgaattagtatatgttaataatgatttattttttagttttctatttctttaagaagaaaaaagttaattaatttattttttagtatttctatttctttaagaagaaaatggttaattattttcttacacatggcaacatctgatcgatagacttgacacgtggcataatcttatgagttaataactttgaaaaccatattttatataataagatgttgatttattcttactttttttgctatatctttccttatatttcatacttaatattttttttttgtttctaagatacatacattaactctcatatttattgtcttaactaaattttacttttatttgtacacgtggcttccccccacaatatttttgacccaaatccaaaaaaaaaaaaacactatcaataatatttcctcttaccatttatgtcttacacacaagtgtcaaaatatagtagaagacatagaaaatgtttagattatgattaaatatcacaaaacttttgtgacataaatcatgatccatatgcatccaagttctaataataggtcgattcgatcttgtaaaaaaaaaaagtaattaatagtaaaagattttgtattgaattttgagatatttttctctcactataaaaagatgaattgtgtagctagagatcataacaaactctgaggagattcaagctaaggtacatttacaaaaacttattttaaattacaatgggttgttgcattttcgaaactgatcctacagaccaataagtactattcagttaatttgaaaacacttacaaaaaaaactaagatataatttagcaactttaacattttttattatgtttgtagggacattaatgggaaactggtgtagttgtgtaacaaaagatgaaaatagtgataattctagtagctctcaaacttctacggataaagaaagtagtgtgcaagtttcttctgtgagcactacgtcttcttcagagatttcatctgaatgttcttcttcaaaatgatcatctcaaagctcccaatgatggaagcgtaactagtgagcaaatgtcgcatggatcatcttcttcatcttatcaataaaaaaatcttcaaaataaataattttctatgtcaatttttatattaaaagaaactttgttaaaaattatgactattaattaataactatattattacataatcttttaaatataagttttagttttaatttttaatagttgctttatgtcatgctgatgtgttgctacaacaaaattcttagcaaaatttatgcatttttttcttaaaaaaagagagttctataagtataatccaagatatattcttgtacttaatacgaataattaaagttatgattaatccataaagttctatttcgatgacacggtgtcgtatttgaagcgacgtggcaaatccttattggtctatatgacgcagaacgggaattgctctgaagaatcctttctcaggcgaacggagtttggagtcaaaatccagagcgcggggaaacgaaacgagccaacaaatccgccatggcagctcgtaagagagcttcatcgatctcaattcccaacaaaccggacccgtcggaacccaactcagcgccatcggagcagaagatgacccgaaagacggtttctgcttccggtgaggaatttcgtctcgcgccgccgaaattaggagtgatcttcgtgatctctactcttctctgttcgctctatctataccttctctgttttcactacaaggttgataatgagctcaagcgatcgattctaattaacgcggggcttagcttggttgggtttttcgtcactctcaaaatgattcctgttactgccagatacgttctgagacgtaacatgtttggttttgatatcaacaaaagaggcacgcctcaaggagatattaaagtgtgagtttttatcaatctctgattttccaaagattaagattagtttgattaaaatttcttcatcctctttgttttcaggccagagtcattgggtattgttgttggtattgtctttttgatcgtggcgataatatttcagtattttaacttcactgaagattctaatgtaagtgtgcattaacgtcttgttttattaatctctgtggttattctcattatcaatgtttgtgagtctggctgatgattctgtgcagtggcttgtggagtataatgcagcactagcatctatttgcttcatgattttgcttggatttgtagatgatgtccttgatgtgccttggagagtgtaagtcctaattcctacatatttttttgatgaaattcacgcttatcgtttttgattcacatgtttactgttgtcaatttaaacaacagaaagcttgtcctgccatcttttgctacccttccacttttgatggcttatgctggtcatacaactattgttataccaaaacctcttgttgcttatattggcttggaagtgcttaatctaggtaatggttcttgtacatgataccacctatttgtacacattgacttgtatttttcttttgaggaggtaaatgattatgattagctcaatagatgttttaacgtggcaggaaggatatataagttatatatggggctacttgctgtcttttgtacaaactctattaacatccacgctggtctgaatggccttgaaatcggtcaaacagttgttattgccgctgctgtaagtcttatggtcatacataatgtctctgaatttttctcattttgtttcttttgggttgagatatgatgcatcccagttacctgtagatcctgatacacaacgttatgcaaatcggagcatctgttgatcccgagtatcaccaagctcatgccttctcgatatttcttactcaaccgctgatggccacatccttggcaatgcttgcttacaattggtaaaatccctagcaggctttctctttaaaactttttttttttgagtggaagtaatgatatttctgaccagttctcgcaatcttctgctgttaggtatccttcttcagtttttgttggagacacttacacagtcttcgccggaatgactatggcagttgttggtattctgggtcacttcaggtatacttccaaacccacttatcttctctgaggcacaggcacttcactaatacatggaaactaccaactcttagattgatcatttgcatcatatatccagctactgtatgaccatgcaactgattcccatgccatctttctgtattgaaattttgcttctgcagtgaaaccctcctcatcttctttcttcctcaagttctgaactttctattatcgcttcctcaggttcatatcaccttttcactcttctatggcatacgtataatcttgtcaactcatgtttcaaaaatttaacatactatatatgataactcttcagcttgctgggattgtgaaatgtccgcgccatcgtctcccaaggtaaccccctttgttttcttaccctttgtagactgattaaagaacagacgcatcactcatcttgtcttttgaaaatatccaggtatgatcctgctaccggattactgaccggcacaaaagatgggacactcgtcaatgtttacttgaggttgtttggtcctaaatcagaaaagtctctttgcatccatcttctcgttttccaggtaggtctcagatatatgtatatcgccattcgtatataatgaagtagtcgctttagtgttgtcatactctgcttgtttttgctacaggctctagcctgcgccttctgcttcatacttcgacactttcttgctggttggtataaatagtctgcaatcagagaagtcacaaatacagaacattactttagtaccttgtacaatcgtatatatcaacaatttttgttaacgtgttgaagtattctcaagtaaacaaagttcattcatttgctttttgttgaacgaaatggcaaaattttcaagacaatgtatcagcatcctgagtttctataattcccgacaagagatcaaatacaatttaatgagtttctctaacaagctaatctcgaaatccctagatcccaagttttttttcttgcacaaacatgaaaaatgaaactagagatctatgtccattgtttctttctcttcgtcttcatcatcatttccactgcttgtccatagcttgatggtgcgatcatgtgatacagtagcgatacacgagctatctgctgtgatatctagagaggcgacttttgactcatgccctgctaagcttttaacgagcgagaaatctcttcctgaccatatctggtagacaaaatataagaaattggaatcaaactataagccaatgaaacagaagactgaaaaaaaaaaaaatactaaggcaagggattatagaagtagttacattgactttcatgtcgtatgaggcagtggccagaaagtagccttcttgtggctcatacttcacttgagacacaaggttagcatgagctggtataatgtacaatgactttctcattcttagatcccaaatacggcattgattatcctccccaccagatgccaagtgataaccattaggagagaaattcacggagaaaacctgaagaaacatataaaacagaggatattaaaacaagggttagtaaataatcacttttgcttggatacgaggaggaccaatggaacaaaattagaatcttaccggtttgatgtgtccttggaagacaagaatactcctaccagtgcggagatcccaaactcgtgcgagtgaatcaagcccacaagaagctgctaatgctccatcttgttgaaatgcaattccgtagacactgcggctatggccttcttgcaaaagcagttctgctcctgtgtttatatcccacaatctccacgtcttgtcatagcttgtagttcccaggtatttccctgatgggtggaaagcaacacgtgccagacgatccaaatgaccttcaaacgtttgtaggagtgttccatcagttttccacagctttgcagttcgatcagcagaagcagtcgctagacaatcatccactggggagaacactacatcagttgcacgttctttgtgatccttcaagacagcaatcgtgtttgtaacttgaggcatctcccacaatttagtaactccactcagagaactagacaaaaaaaaaatcgatgaattactaaacagaagggaactatgtgaatcacacaagtcatgaacctagagaatgcgtaatgcagttagaaagggcaaatgcaatagacatggagtatgctatctataagataaactataggcctaactaacttcatggttttataaaggtgcagtgtttaaaagtgaggaaaatcagcaagttcagtgtttaagaacaggattattaagatacttctctactgatatatcaatgaaaatgaatatgcaggtagaatgcaatctagtccaggtaactctaatcaaatagagacgaggaaaaatagtttcaagcctaagaaacaatatgtggagaatatgtgaatttgtgttgagagtgagaaggagatagaagagagacataccatgtggcaagtatctttccatcgcgtgagaaggagcagccggtaagaggacgatcatctccaaaattactgcaatcaagggccatgtgtttagcatgctttaaagcccacttagtctctgcatccatatcttcatctggatcatccctccgccgctttgcacgctgaatcctgacagcagctctcttgacagaaaacttggcaatttctattctagcctctctaagttcctttggaccctcggtaaaaaaggggtattcaagaacttcatcatctacttcctcttttggagtcacatcttcttcgtgatctttaaccagtttatccaattgcccattgatatcatacctagtcaacagctgagtcagcctagctcgtctctccatttcctgttctccaaatagagtaatgggctccccaagtcgtctaagtcggtccctaacagctttgtcatttgttggaactgccatagcagcagcacgacgctttaccaacaaatcttgcaatgccttttcctgtctttctctgacctgcttactctcttcagatatctcaatatgttcatcatctgattccgaatccgagtcactggttttcactccaccattttgtgaaacaggtggcctaaaagtaggtgggcgggcaactggaggatgtggcatcataggtattggagccattggtgggggaaaagaaggaggaaccacaggtggaatggcagagaaacctgaagttacagtaaaagtgaaacataaattactagagttaaaggatcacgaaaccaaagaaaacccaatgcacttctttaataattggaagaacgaaacagtatctggactctacagaccaaatccttaagctctaatctagatgcattgcgagaaaaatacaaaaacaaactcaaccaggaaaaagtgaaacagatttaaggaattcaactgcactataatctttgatgtaacaatttacttgaatgctaattaattacctggcagagacgaggcatcttgtagaactggaggtgctgaaatttgagctgttgctgctaatgaaacattatcatccttgttgggttccatgtttcccttaaatcctcaaaagaaaacaccaccgaaacagcaatctagagaaaaccctggaacaaagaagaattccaaatcagttctcgtgtcctagtatacacaagacaatgcattaaacaaataagaaagaggttagctttattctaaaactcaaagtatcaagtgctctcttgggaatttaaacaaacacctaacagtcaaagtatcaagcttcctagtcacctcataaggggatactagagcatactcagtgaaagaagcaaagaaaatcaacaggtttcagtagaaaaaaatcgaaactgggatcgtaagtttaccaggaattgacgaaacccgcgaatctcgttactctcttcgaaagccccaaacacgaaacagtcttgtcagttgctcaagctccgtgtttcctgagaaaaaacccataacctaatcaacaacccaattgttaaaaatccatctttatgagaaacaaagagaagctaaatcagagaggaaagttggttcatacctctgagtctgaccagagacgacggtagcaaaaacggaaatttgatgcgagaaagccgagagggtttttcttatttattttttagtcctttaaaccgacctttgacaaaaaaaaaacgactttgtgaaaacgggccggttcatattgggcctttttcataatgggcttttattaattcgtaaaagtttgagtatatgaagcaggtcatgttcattttctgtttacgtaaaaaaatcttctaacacaattcaaccaaatccattcacggcccaataaattattgaatcttgtggtatgctccaaatttctttacctaaaactctaaatatttaaaaaccagattctattttgcaattatttgaaaatttggattctaaaatataaagaaaaaactgaataaagaagtaggacccgatgcactagcacactcagcacctcccaagagtcgggcctgattcacatacacaatttggtatactcagaaacgagcttctctacgaatttgtcgataacttttataataaaggagatcatcgtacgtgtccacgtaaatgtttttgttttggtcaaagtgcacgttttctattgtccattgaatcctttgtgtttactcattctccaaaacttgaaactatatgtacataactcatttttagtatagctttaagtgatttgctatctacaatagactatagtaaacgaatattttgtaacatgatagattaataaagtagagatctaattaaggagggaaggaaatcatcagtgtcttcaaaccaatacaaataagagtgagttttggttcattccagccctacacctagagcaaccgattcacaattttagtttattgttttcgaatattcttatatgattctcttataagcatcacacctgaacaaagaaacttctagcctttctacaatgttccgatagagtagctaattcggacaatgttccaacataaatccgtaacgtggcatacaaaaagttacacgaaatcttgaaccttgctgttaccgctcctgttttactttcagtcacagtttcttttttccacagtgttggtttcttctgatgtttcaaaagttggccaaccccacaatctttttctcagacagtgtagttagttttttttggtgaatggtatctatcaatcagtcaaatgagtcagtctaagattcaagatattgatcctaccatatcatattagattccacgtggcgcaagccaaggcatggcttagaggaggggtcccttacttcatatggcctgtgacattgttttcccaaaaagtggttccactttgttgagactttcaagctcagccactaagacttgctcttcaacttcttctactacttctggttcctaaatcttgtctgctcaatatttctaagtcatttagatgtcttttcgtgttatctcaagtccttttcttccccgtgtttgttacttactttctatctagtgcagtgggtgaggaaatggctccacttaccacgtgaagatagcttgaagataaccctttttctatgttttatataaccctctatagacaataactcacttgtcgctatcgtttgaaatacttggaactttgatgcttaatcattccttgttttgaatgacttatcttaatcctaagatggagatttcaaagatttacttgctagttcattgaacttaattgcaaagatgctctatactttgaatcttattaataaattttgcctctttatttcactgttctttcagaaaagcactcacagcgtatcttctaaagtgtccctactccataagaaattgttctacgaggtacttattgataattccatttttaatattattcctcatttttactattatcatttgtgtccactaacacacaagctt

SEQ ID NO: 362 - DNA, 91979 bp, Arabidopsis thaliana
aagcttctttgctatatcctcaaagtttagcaatccatgaaataaacaaacgtgttcacaacgtaattcagatataagccgtcactatttttccccgttcacatcagcctcacttgtagttttgtctcaatcgaaatcattgtttttatatttactacaaaaaagaatctaataattgagatcgaatatagaagaaaaatgaaatactcgttgttacatttgaaattcgtaacgtatagtgtctctgtctgtatggatgcgtgacatgtaacgttgttacaatatatcttggttatctatattttatttcttactagataaagcccgcctaaataagcgggtataagatgtaaatgtaatttttatcgataatatttaaattttgaatagtaaaataataatcgatacattgttcttgatatataattttgaatagtaaaatagtagtcttatgcattttattttgttatacccattcaatcttattgatgatatttgaagtctaaatagtaacctacacactttttctttattgtaatttagtatttagaagaaaaaataaaattttatcttatacattcaattttgtaatacaatttaactatctatttcataaaaaactcgattttaattttacacacttcatcttacttgataatgatttcatgtcaaaataatatatatatataagatcaaatctatatcttagttaatattaaaaattattaacaattaacaaaacataattcataataataaaacatttgttaataccatatatattaaaaatttgaccaataacatatatatatattttttttgttaattttccttttggttaagaaaaataaaatgtaatattttttagatatagaaatatgaattagtatatgttaataatgatttctttttttagttttctatttctttaagaaaaaaaaagttaattattttcttacacatggcaacatctgatcgatagacttgacacgtggcataatcttatgagttagtaactttgaaaaccatactttatataataagatttttttttgttaatttttcttttggttaagaaaaataaaatgtaatattttttagatatagaaatatgaattagtatatgttaataatgatttattttttagttttctatttctttaagaagaaaaaagttaattaatttattttttagtatttctatttctttaagaagaaaatggttaattattttcttacacatggcaacatctgatcgatagacttgacacgtggcataatcttatgagttaataactttgaaaaccatattttatataataagatgttgatttattcttactttttttgctatatctttccttatatttcatacttaatattttttttttgtttctaagatacatacattaactctcatatttattgtcttaactaaattttacttttatttgtacacgtggcttccccccacaatatttttgacccaaatccaaaaaaaaaaaaacactatcaataatatttcctcttaccatttatgtcttacacacaagtgtcaaaatatagtagaagacatagaaaatgtttagattatgattaaatatcacaaaacttttgtgacataaatcatgatccatatgcatccaagttctaataataggtcgattcgatcttgtaaaaaaaaaaagtaattaatagtaaaagattttgtattgaattttgagatatttttctctcactataaaaagatgaattgtgtagctagagatcataacaaactctgaggagattcaagctaaggtacatttacaaaaacttattttaaattacaatgggttgttgcattttcgaaactgatcctacagaccaataagtactattcagttaatttgaaaacacttacaaaaaaaactaagatataatttagcaactttaacattttttattatgtttgtagggacattaatgggaaactggtgtagttgtgtaacaaaagatgaaaatagtgataattctagtagctctcaaacttctacggataaagaaagtagtgtgcaagtttcttctgtgagcactacgtcttcttcagagatttcatctgaatgttcttcttcaaaatgatcatctcaaagctcccaatgatggaagcgtaactagtgagcaaatgtcgcatggatcatcttcttcatcttatcaataaaaaaatcttcaaaataaataattttctatgtcaatttttatattaaaagaaactttgttaaaaattatgactattaattaataactatattattacataatcttttaaatataagttttagttttaatttttaatagttgctttatgtcatgctgatgtgttgctacaacaaaattcttagcaaaatttatgcatttttttcttaaaaaaagagagttctataagtataatccaagatatattcttgtacttaatacgaataattaaagttatgattaatccataaagttctatttcgatgacacggtgtcgtatttgaagcgacgtggcaaatccttattggtctatatgacgcagaacgggaattgctctgaagaatcctttctcaggcgaacggagtttggagtcaaaatccagagcgcggggaaacgaaacgagccaacaaatccgccatggcagctcgtaagagagcttcatcgatctcaattcccaacaaaccggacccgtcggaacccaactcagcgccatcggagcagaagatgacccgaaagacggtttctgcttccggtgaggaatttcgtctcgcgccgccgaaattaggagtgatcttcgtgatctctactcttctctgttcgctctatctataccttctctgttttcactacaaggttgataatgagctcaagcgatcgattctaattaacgcggggcttagcttggttgggtttttcgtcactctcaaaatgattcctgttactgccagatacgttctgagacgtaacatgtttggttttgatatcaacaaaagaggcacgcctcaaggagatattaaagtgtgagtttttatcaatctctgattttccaaagattaagattagtttgattaaaatttcttcatcctctttgttttcaggccagagtcattgggtattgttgttggtattgtctttttgatcgtggcgataatatttcagtattttaacttcactgaagattctaatgtaagtgtgcattaacgtcttgttttattaatctctgtggttattctcattatcaatgtttgtgagtctggctgatgattctgtgcagtggcttgtggagtataatgcagcactagcatctatttgcttcatgattttgcttggatttgtagatgatgtccttgatgtgccttggagagtgtaagtcctaattcctacatatttttttgatgaaattcacgcttatcgtttttgattcacatgtttactgttgtcaatttaaacaacagaaagcttgtcctgccatcttttgctacccttccacttttgatggcttatgctggtcatacaactattgttataccaaaacctcttgttgcttatattggcttggaagtgcttaatctaggtaatggttcttgtacatgataccacctatttgtacacattgacttgtatttttcttttgaggaggtaaatgattatgattagctcaatagatgttttaacgtggcaggaaggatatataagttatatatggggctacttgctgtcttttgtacaaactctattaacatccacgctggtctgaatggccttgaaatcggtcaaacagttgttattgccgctgctgtaagtcttatggtcatacataatgtctctgaatttttctcattttgtttcttttgggttgagatatgatgcatcccagttacctgtagatcctgatacacaacgttatgcaaatcggagcatctgttgatcccgagtatcaccaagctcatgccttctcgatatttcttactcaaccgctgatggccacatccttggcaatgcttgcttacaattggtaaaatccctagcaggctttctctttaaaactttttttttttgagtggaagtaatgatatttctgaccagttctcgcaatcttctgctgttaggtatccttcttcagtttttgttggagacacttacacagtcttcgccggaatgactatggcagttgttggtattctgggtcacttcaggtatacttccaaacccacttatcttctctgaggcacaggcacttcactaatacatggaaactaccaactcttagattgatcatttgcatcatatatccagctactgtatgaccatgcaactgattcccatgccatctttctgtattgaaattttgcttctgcagtgaaaccctcctcatcttctttcttcctcaagttctgaactttctattatcgcttcctcaggttcatatcaccttttcactcttctatggcatacgtataatcttgtcaactcatgtttcaaaaatttaacatactatatatgataactcttcagcttgctgggattgtgaaatgtccgcgccatcgtctcccaaggtaaccccctttgttttcttaccctttgtagactgattaaagaacagacgcatcactcatcttgtcttttgaaaatatccaggtatgatcctgctaccggattactgaccggcacaaaagatgggacactcgtcaatgtttacttgaggttgtttggtcctaaatcagaaaagtctctttgcatccatcttctcgttttccaggtaggtctcagatatatgtatatcgccattcgtatataatgaagtagtcgctttagtgttgtcatactctgcttgtttttgctacaggctctagcctgcgccttctgcttcatacttcgacactttcttgctggttggtataaatagtctgcaatcagagaagtcacaaatacagaacattactttagtaccttgtacaatcgtatatatcaacaatttttgttaacgtgttgaagtattctcaagtaaacaaagttcattcatttgctttttgttgaacgaaatggcaaaattttcaagacaatgtatcagcatcctgagtttctataattcccgacaagagatcaaatacaatttaatgagtttctctaacaagctaatctcgaaatccctagatcccaagttttttttcttgcacaaacatgaaaaatgaaactagagatctatgtccattgtttctttctcttcgtcttcatcatcatttccactgcttgtccatagcttgatggtgcgatcatgtgatacagtagcgatacacgagctatctgctgtgatatctagagaggcgacttttgactcatgccctgctaagcttttaacgagcgagaaatctcttcctgaccatatctggtagacaaaatataagaaattggaatcaaactataagccaatgaaacagaagactgaaaaaaaaaaaaatactaaggcaagggattatagaagtagttacattgactttcatgtcgtatgaggcagtggccagaaagtagccttcttgtggctcatacttcacttgagacacaaggttagcatgagctggtataatgtacaatgactttctcattcttagatcccaaatacggcattgattatcctccccaccagatgccaagtgataaccattaggagagaaattcacggagaaaacctgaagaaacatataaaacagaggatattaaaacaagggttagtaaataatcacttttgcttggatacgaggaggaccaatggaacaaaattagaatcttaccggtttgatgtgtccttggaagacaagaatactcctaccagtgcggagatcccaaactcgtgcgagtgaatcaagcccacaagaagctgctaatgctccatcttgttgaaatgcaattccgtagacactgcggctatggccttcttgcaaaagcagttctgctcctgtgtttatatcccacaatctccacgtcttgtcatagcttgtagttcccaggtatttccctgatgggtggaaagcaacacgtgccagacgatccaaatgaccttcaaacgtttgtaggagtgttccatcagttttccacagctttgcagttcgatcagcagaagcagtcgctagacaatcatccactggggagaacactacatcagttgcacgttctttgtgatccttcaagacagcaatcgtgtttgtaacttgaggcatctcccacaatttagtaactccactcagagaactagacaaaaaaaaaatcgatgaattactaaacagaagggaactatgtgaatcacacaagtcatgaacctagagaatgcgtaatgcagttagaaagggcaaatgcaatagacatggagtatgctatctataagataaactataggcctaactaacttcatggttttataaaggtgcagtgtttaaaagtgaggaaaatcagcaagttcagtgtttaagaacaggattattaagatacttctctactgatatatcaatgaaaatgaatatgcaggtagaatgcaatctagtccaggtaactctaatcaaatagagacgaggaaaaatagtttcaagcctaagaaacaatatgtggagaatatgtgaatttgtgttgagagtgagaaggagatagaagagagacataccatgtggcaagtatctttccatcgcgtgagaaggagcagccggtaagaggacgatcatctccaaaattactgcaatcaagggccatgtgtttagcatgctttaaagcccacttagtctctgcatccatatcttcatctggatcatccctccgccgctttgcacgctgaatcctgacagcagctctcttgacagaaaacttggcaatttctattctagcctctctaagttcctttggaccctcggtaaaaaaggggtattcaagaacttcatcatctacttcctcttttggagtcacatcttcttcgtgatctttaaccagtttatccaattgcccattgatatcatacctagtcaacagctgagtcagcctagctcgtctctccatttcctgttctccaaatagagtaatgggctccccaagtcgtctaagtcggtccctaacagctttgtcatttgttggaactgccatagcagcagcacgacgctttaccaacaaatcttgcaatgccttttcctgtctttctctgacctgcttactctcttcagatatctcaatatgttcatcatctgattccgaatccgagtcactggttttcactccaccattttgtgaaacaggtggcctaaaagtaggtgggcgggcaactggaggatgtggcatcataggtattggagccattggtgggggaaaagaaggaggaaccacaggtggaatggcagagaaacctgaagttacagtaaaagtgaaacataaattactagagttaaaggatcacgaaaccaaagaaaacccaatgcacttctttaataattggaagaacgaaacagtatctggactctacagaccaaatccttaagctctaatctagatgcattgcgagaaaaatacaaaaacaaactcaaccaggaaaaagtgaaacagatttaaggaattcaactgcactataatctttgatgtaacaatttacttgaatgctaattaattacctggcagagacgaggcatcttgtagaactggaggtgctgaaatttgagctgttgctgctaatgaaacattatcatccttgttgggttccatgtttcccttaaatcctcaaaagaaaacaccaccgaaacagcaatctagagaaaaccctggaacaaagaagaattccaaatcagttctcgtgtcctagtatacacaagacaatgcattaaacaaataagaaagaggttagctttattctaaaactcaaagtatcaagtgctctcttgggaatttaaacaaacacctaacagtcaaagtatcaagcttcctagtcacctcataaggggatactagagcatactcagtgaaagaagcaaagaaaatcaacaggtttcagtagaaaaaaatcgaaactgggatcgtaagtttaccaggaattgacgaaacccgcgaatctcgttactctcttcgaaagccccaaacacgaaacagtcttgtcagttgctcaagctccgtgtttcctgagaaaaaacccataacctaatcaacaacccaattgttaaaaatccatctttatgagaaacaaagagaagctaaatcagagaggaaagttggttcatacctctgagtctgaccagagacgacggtagcaaaaacggaaatttgatgcgagaaagccgagagggtttttcttatttattttttagtcctttaaaccgacctttgacaaaaaaaaaacgactttgtgaaaacgggccggttcatattgggcctttttcataatgggcttttattaattcgtaaaagtttgagtatatgaagcaggtcatgttcattttctgtttacgtaaaaaaatcttctaacacaattcaaccaaatccattcacggcccaataaattattgaatcttgtggtatgctccaaatttctttacctaaaactctaaatatttaaaaaccagattctattttgcaattatttgaaaatttggattctaaaatataaagaaaaaactgaataaagaagtaggacccgatgcactagcacactcagcacctcccaagagtcgggcctgattcacatacacaatttggtatactcagaaacgagcttctctacgaatttgtcgataacttttataataaaggagatcatcgtacgtgtccacgtaaatgtttttgttttggtcaaagtgcacgttttctattgtccattgaatcctttgtgtttactcattctccaaaacttgaaactatatgtacataactcatttttagtatagctttaagtgatttgctatctacaatagactatagtaaacgaatattttgtaacatgatagattaataaagtagagatctaattaaggagggaaggaaatcatcagtgtcttcaaaccaatacaaataagagtgagttttggttcattccagccctacacctagagcaaccgattcacaattttagtttattgttttcgaatattcttatatgattctcttataagcatcacacctgaacaaagaaacttctagcctttctacaatgttccgatagagtagctaattcggacaatgttccaacataaatccgtaacgtggcatacaaaaagttacacgaaatcttgaaccttgctgttaccgctcctgttttactttcagtcacagtttcttttttccacagtgttggtttcttctgatgtttcaaaagttggccaaccccacaatctttttctcagacagtgtagttagttttttttggtgaatggtatctatcaatcagtcaaatgagtcagtctaagattcaagatattgatcctaccatatcatattagattccacgtggcgcaagccaaggcatggcttagaggaggggtcccttacttcatatggcctgtgacattgttttcccaaaaagtggttccactttgttgagactttcaagctcagccactaagacttgctcttcaacttcttctactacttctggttcctaaatcttgtctgctcaatatttctaagtcatttagatgtcttttcgtgttatctcaagtccttttcttccccgtgtttgttacttactttctatctagtgcagtgggtgaggaaatggctccacttaccacgtgaagatagcttgaagataaccctttttctatgttttatataaccctctatagacaataactcacttgtcgctatcgtttgaaatacttggaactttgatgcttaatcattccttgttttgaatgacttatcttaatcctaagatggagatttcaaagatttacttgctagttcattgaacttaattgcaaagatgctctatactttgaatcttattaataaattttgcctctttatttcactgttctttcagaaaagcactcacagcgtatcttctaaagtgtccctactccataagaaattgttctacgaggtacttattgataattccatttttaatattattcctcatttttactattatcatttgtgtccactaacacacaagcttggctttaaattactcgttcacatatgatatgatcattgtttttattctatttttaagtctaatctaatagtttcatcaccttaattgtatagacaaaacttgttatatggggtgtaacattatgcctctgaaatgattgtgttacaaactttatgcaaatgtatgcttatctatttggctgtttcttcataataagggtccagaggagactgatttgtcacaaactgattgagtctctaagacattaaaacagttcttgagttgttgaagaagactctctaactgtgtagagatgtagctttcttagtgatgtaagagtttctcaaatcttgaagctgcgcatgcagaagatggtcattgtcactaatctaaggggatcacttggccttggccttcgtttccctttcaaaccttttttccccctttactttgtatccaaaattcaaacttatgaaagggaaagtgtctgccacatgtgatatatattactaaataaaaactcagttgttgttttcatataccccttcatgactagttgccgcacataagtgtcaaagttttcatatacttgttagtattgacaatgaaaattaagaaaatagcaaagaggtggacttaaatactttttagatttttactgacaagacgtgtaatttctgttacatgttatctttggtttaagatatacctaatttatcaaacagagattttaggcaattttaaatacataaaattgtgttcaaaacgtgtgattttttccagtaccatgttagagatatctatgtagatatcaaatttgctcaaaagattttaatagtattactaaaccaatagactgcaaccatttggctactttttcatactttcttcaaaccagttattattattagctagtaatcaaagtttcgagtaattttgaaatttattatgtcaattatctggtatgaaaatagatgtatctattgatttgacttgtattactaaaccaatagactgcaaccatttggctatgaaatttgaagttctaactttaagatatacaattataactttacaagatactttatcaaaaaaaaaaaatatttccccacaagtcataccactatgaaattcaggatggagcccattagatttgtaatcccgaccacataatatgatttaggaagagattatgccaacatattattgaaattataatatcttcggatccaaatacatttcacccaatgggaaaaaaaatcataattagatgaagaatagaattggtttgtctcatcatgattttgaaacaacgatcttatattttttttagctctcattccatatctagaaaaaaaagaaaaaaaggaaacacaaggaacataatatgtagtgtagtagtttgttttaagatataattacgctcgtaaacttgtagtgtcataaacctctcgatcattgtttttattcgcgttcaaatatacctagcatctaaacgctagatcgtggattatttatagatatagatgaacgtgccatgacaagttcaaaaccgtgtattcatgatgtggatccacgctcgaaagttggatttatagccctaatatgttgatatagatccacactcgaaattggatttataaccacccttcatacaaacataataaaatatctattcatccacaagacaagagaaaaaggtgattagatatataatatgatgcgttgcactaaaaccacataaattattattaatatataaaagcattcttttgttcacacaattggtcttcatttggtttcttgatcctccaacaaaaccatcaaatgctatagttttttgcctttgaatatcttattaagaaaaggacaagtgctatgtttattatatatgatcgttagatattcggaacaaatcttaatgaatggttctcgcgctcgggaaaaggttagtatagttgttgtcgattactcctatggggctaaggttctacagtgattatagcatagcgaaaaaagaaaaccaatcataactgtttaaataaaacacctactcttactcacaaatctttatcaaacttcgttagtgttttcactttacatttttgcaaaaatattatatgaaaaaactgaaaataataatgttttatacacaaaaagtggaatcttttttgaaatttgtttcacatgtaaatctaataactacgatctcataaatatgtcctagctagtagctaaggtctttgatgaaaggtttggccaatgagactcattattcaagaaaattccaagatatttacatcaaattataagattgttttctcaatgtacaacttgtaaaagaaagtagaaaagactagttgtatatagtgaatgttctgaacattttgcgctaaattctaacatgctaaaacacattcattaatagacaaactaatatgttttcttcccctaaatagcaacattatttgtcttcttaccctaaatagtaaattgacaactttatataggtaaaaagcatatgttgaagatttgcttgcaggatttctttgcaataattaaccaaaaccaaatgaaataagaactaatatttctttggtgataatggaactcatagggtctacaacattttttgtttcttcacgggtgatacaacacaagctatataggcaaattggtaagtaggttcaaaatcctaaaataaaattttaaaaaacttttaagaggaaaaatggaggggaaagaagaagaaggagacatatagttttctgaaacgaaagaaagataataacccatcactgcagcaaaaggtatctctaaaataattgaagacaattgaaacctaatgtcaacgaactagccaatgagctcaaactccacaaatcaccacctcgacattctatcttgggaccatttctttctctctttactttacctctctctatataacttgaaattgagatatctaacaatttacaatggtgagagacaagaaaaataagatacatgtatcacatacatagagtaatgattaaatacgttttgtggagtttaaccttatttctgcggcaatggtggtagtttaatatttcatattgtgctcatcatgatgctatctaaacagtcttaatgcccaactatctacttattgcaatcttcacggcgatttacctgtgaaatttagaaaaaggaaaggaaaaataaatataaagaaacttttaagtggaaagtgacactacaatgagacctgcaaaaactcgacaagtttgaaataaacaactaaaaagaatccacacacagaacaataaacctttacaaagaaaaaaccaacaactttgtgccactaaatctatagagtgtcaataatgttgctgtacggaaagggattcacttggggtctacatgaaattcatggtgttctttgatgatgcattgattctctagaacaagaaataggagatacatcattcatattaaccgatatactctgaatttttaatacgaaaactagactaaaatgctctgttatcaatgtgtctaatatagaagaaagtatatcttacttacatgagaagaaaaatgtttctcctgtgtatttgtccactagagcgaccaaggtattgtgagctacgattacaataacaaaggtgaattagccaatgcccccaataattgggacaatgtaatcatgaaaatataaaaaaaacaataaagcaaacagaaaatagaatgtaacaatgaacaattaaaggttgcttctttagtcatgaaaaaggagtaataatgtttaggccactggttttcattgcacacaaaagtcacataagacagatacacgacgaagggtagttattcactgcaaatctattgacataattggttactgtaaactttttgctctcatagactcctttgagtcattatatcctaagactctacttgttggatggtagccacttaatgttactaaaaaagaaagtaaaagtagaagaaagaatgaaacatatcagtctacaatttcaacactctcctattccaataagcaatatcaataccttttcatttatatttattcgtaatgcctcctttgttcaaactgtcactccacattaccatcttcttcagcctttgcttccatttttcccgactatgtaggcgaggcccctacatctttcaatcacacaaaaaacagaacatgacgttattggaagaaacaacacatacccacaagttaacactatacatacatcatatcttctatgtttatttattgcaagtagcacaaagtggtatctatttttctgcacatctttttatgaattttccttttttatgataattctgagcaaagaacacatatcacctccaactaagatctaatttactggagaagaaaaatcatgataaggccttacttggtctatcaggaccaccaataagaacatcaaacttttatatgccctgttcaatatgtcatgctgaaagttgagatttctgtagtactgagataacgcaaagcggttccacatgcagctgtggtacttttttcctttcttaagcaatttacggcaagagaggatacacatgaacgtcaccagggagacctaaaatatgtatacacaacacgattattttctctcttaagatcatgaaaaaaggaatgctaggttacaacatgtgtttaggacagctctgtatccatcctgcaaagaagagtagccgatgctgatgtttggtcctaaggggtaacttacttccaagctttatagtcaaatttatatatactgcaagaactgacaggatcaagtgatgcaaaatggtcccaataagcatgatccaatagagtttaccagtgtagagggtggtgggcaagattgtcttctcttaaactgagctcaagtaccatgagacccaagtaggggccctagtgtacatgctctgacaataaacttagccaaaagacaaaataataacaagtaataactatgcagtaaaataaagtttttacctattatgcagtaaatcttggcagggagagaatgtatgtacccgcgatgtgaattactaacctaccataaaaaagatgagaaatagaagttagaaatacttttctagtaactttcacactatataatatgcaagaaattaattaaaaacgtcacaaagatatcttaatttgcagcaagagacaaaaagtaatggcaatccagctatatagtgaacacaagtatatgactgtaccgcctaaaacctttcctttaaattcccctttctacctctttttttttttccctcagagtagtactctaaacctcaagtttacctctacttctcttataccattccgcctcttattctttgcaatttctctcaacaaagtagaaatgggattgacctcatccttacggttccatagacaaaacaacaagactttcctcggaatcttcatgatcttagttctaagctgtataccaggtagaaccaatctttgttccaatcattctgttagtaccccaaaagaattaccttcttcaaatccttcagatattcgttcctcattagtttcactagatttggagggttatataagcttcgacgatgtccacaatgtggccaaggactttggcaacagataccagttaccacctttggcaattctacatccaaggtcagtttttgatatttcatcgatgatgaagcatatagtacatctgggctccacctcaaatcttacagtagcagctagaggccatggtcactcgcttcaaggacaagctctagctcatcaaggtgttgtcatcaaaatggagtcacttcgaagtcctgatatcaggatttataaggggaagcaaccatatgttgatgtctcaggtggtgaaatatggataaacattctacgcgagactctaaaatacggtctttcaccaaagtcctggacagactaccttcatttgaccgttggaggtacactatctaatgctggaatcagcggtcaagcattcaagcatggaccccaaatcaacaacgtctaccagctagagattgttacaggtatttcattcatgctttatctctgcggtagtctcaaaaaaatatgcacctgtaaagaatatccatctcttcatgagcaaaaacactgacgactttaaataatttttgactataaaacaagagtgcataggcacaaatgtgaaatatgcaacacacaattgtaacttgcaccaagaaaaaagttataaaaacaaacaactgataagcaatatatttccaatatttaatcagggaaaggagaagtcgtaacctgttctgagaagcggaattctgaacttttcttcagtgttcttggcgggcttggacagtttggcataatcacccgggcacggatctctcttgaaccagcaccgcatatggtaaagttctatcttgaacaaagttcaaacaatatacgctatgattctaagaaccactttcctgacacagtcaaataacttttaataggttaaatggatcagggtactctactctgacttttctgcattttcaagggaccaagaatatctgatttcgaaggagaaaacttttgattacgttgaaggatttgtgataatcaatagaacagaccttctcaataattggcgatcgtcattcagtcccaacgattccacacaggcaagcagattcaagtcagatgggaaaactctttattgcctagaagtggtcaaatatttcaacccagaagaagctagctctatggatcaggtaagatgtgaaagcaatatataactagacttagtttccacagagagctccaaatcaaccgttggctactagcctactaacataatgaatggttgccgtgcaggaaactggcaagttactttcagagttaaattatattccatccactttgttttcatctgaagtgccatatatcgagtttctggatcgcgtgcatatcgcagagagaaaactaagagcaaagggtttatgggaggttccacatccctggctgaatctcctgattcctaagagcagcatataccaatttgctacagaagttttcaacaacattctcacaagcaacaacaacggtcctatccttatttatccagtcaatcaatccaagtaagtgagcaaaatgccaaaagcaaatgcgtccagtgattctgaaacataaattactaaccatatccaacattttgtggtttcaggtggaagaaacatacatctttgataactccaaatgaagatatattctatctcgtagcctttctcccctctgcagtgccaaattcctcagggaaaaacgatctagagtaccttttgaaacaaaaccaaagagttatgaacttctgcgcagcagcaaacctcaacgtgaagcagtatttgccccattatgaaactcaaaaagagtggaaatcacactttggcaaaagatgggaaacatttgcacagaggaaacaagcctacgaccctctagcgattctagcacctggccaaagaatattccaaaagacaacaggaaaattatctcccatccaactcgcaaagtcaaaggcaacaggaagtcctcaaaggtaccattacgcatcaatactgccgaaacctagaactgtataaaagtttcctgtgtccgtccttgtaaccgctcaggctaggcagcaagaaagtgaaaaattctttcttttttgtttcttttggtgaacaacaaattttacagtctgaaacagattgggacaattgtataggatctccataaaaatcctacgcagtgtcattacttttggtgctccaaaaactcaaaaaacatcatttttaaatctactataagcaaacaaattacaatagctcaaaaaatcaccaaatcagaactctgggtgcaaagcgatttaccttgaagaatcgattctcaattgggtccacgaatctcgttaatggagccaagctacgatttttccaatcgatttttgtactgaaacaacaacgattatcccaatttctcatcaagatggcagaaatttggcgcctttccgccatgaatagtcacgacgagattattttctctcttcagattgtgatttcaaatttcacttcgtttgtcacacgcgtgaagcaacaaaacacacgtgtgtgtatatttttattttattttttgctgggcggtcaggcgaagcagaggctcctgaagaaaatggcgcaacaaagtttatttatttcattaatattacttcttcttcttcttcgttggtaataataataagcaaatcccaaaaaccctaacggtactgtgtagaagctatatacattcctcttacttcacctcaacacgcaagaccagattcgtttccccgagagattcctttccttaagccctaaagtttcgatttttgatttttattttgaaagaatccaatttttggatgtctcctgcggcggtggagattgggtctccggttgaaaaagtctcttctgttctaaaccctatggaaaatttctctgcattttttccggagagtgttcactctcacgatcaacgaaccatgggctcttcgttctccttcggatttggagctggttcaggacaaaccacgaagactcgacacaagccgaggctcgtgaaattgaggaagaacggaagagaggtgaaaaaaccttctttttccggcgagatcctctcaggtttcaatccgtttgcgccgccgggtaaaggtatttttttttgttgcatttgtgccgaatttgatttcattgaagatccgggtttcgatattttgtgagctgattggtttagtttgtttctgtaggtagtcttcatatgaacagtgggaatgatagagatgctggccaatcacctggggataaatgttttgtctttggagctagtgggaacagttctggtgcaaaatctagtccaggcaatgccacaatagcttctttgtctgatgaagaggagtttagtacacctataggggactctgagttggattcggaatccattaaagaacattcaaatggagttaggggaaaggttgataatgatcgggaaaacatcagaccgtgtagtgagagcacaatttttgatgccacaaatggatttaggtttgatggtggtgttaacggaagctggaaaagtgttgagaatccagatgctgtcaaggagttttttcgaagacagaatggcatggacaaggcatcagcgagtaaatcttgtagcaagtctaacagtgtacaatatgctcatggtaaaaatagggatgatcctgaattgaacctgcttgctgacatggagaagcttaatatcagtgattccagagttcatggtggcagcgactatgaggaagcaagcaaatccaataagacacctgtatttacttttagtagctttggaaaggttgatcctatatgtaaagaaggtgcggcgacatcagagccatactcgttcagttccaatggttttcagcaaagtaataatgcgtcgggtgaaaaccccacttttcattcccagaccacctacggaaacaacttaacaaacactagctttgctacaaaaacattctttgatgatttcaaagtacctgaatgggatccttcgttgcttaaggacagtctgtttccagaagtagacagaaatccagtacatgcgcgaagtaatcgttcgtccaaggacaagagatcaaagaaagttaaggaaaaaatgaaacagggtgagccagatcgatgcaatggtcaaactgctgagggaattgaggctcaagaaaaactcaattcccctggatattgctcacccatggattattctccttatcaaggtgacaaaacgagcaatcaatttccaacagaaactcccctggcaccatcacattcaagagaacatattgattcccgctctagcaatgactttaaggttgcgtcagccagggattcatctctcttcacggcagaggatcatgggagtacttgtattccgaatttttctttctcagcgtccacctctcaggaaacaatacgacataaaaagcttcaagctgtaaagaaatataggaggaaagttaacaacagtttgccgaaaagcaatcttaatgccaccatgcgaaacaatcaagagaatcaacctgtgaatacaggtcaagccaaacaggactcgggctccacatcgatgatgcctgatgtctgtgaggtttggcgactaaggtatcatatactaactcaagagcttcaacattggccctttttgaatattttctttctcagaattgagagatgtaattgtttgtatcaggggaaatcaagcctacaaaaatggttatatgtctaaagctgaggaatgttacacacatggtattaattcttctccgtcaaaagataattcagaatactctgtgaagcctcttgcgctttgctatggtaaccgcgccgcagcacggatttctcttggaagattgagggaggctataagcgactgtgagatggctgcctcacttgatcctagctacattaaagcgtatatgagagctgcaaagtaagtttaaggcgtacctttccagagttgtttggttatgattcatatgaatcatatctgttgaataaaggaacataggttatgtccagaaattattgtttcacctcaagtcaatttgtctttttttttgcttaagctttatagcttgaatttagtaaatcccgtctgctaaggttttagatacgaattttcttgcagtggccaagaaagtctatatctaagaaataatgttcacactgtgtatctagtaaaatcaataattatgttatttattttttcttctatgtttgctttagttgtcatcttgtgctgggggaacttggatcagcagtgcagtattttaataaatgcatgaaatccacctctagtgtctgcttggatcgacgaactactatagaagcagctgaaggtttacaacaggctcaagtatgcattctcttctcagcttttttattgttctaccatggtctagtcaaaattgttttatactttatcagttaagatataattggatgttaattttgcgaacaatgtgctgaatcagcacatagttctgttattgtcttattgaacacatttttattttacttacctgcagagggtagctgactttaccagctgtgcatccatatttttggaaaagagaacacctgatggcgcatctgacgcattggttccaattgccaatgccttatcaattagttcatgctcagataaattgcttcaaatgaaggccgaggccctatttatggtgagtagcctttcgttttcacttctcaaaatttaaactttgctttcagtgggcatgatcttctatgtcaatcctgcagatccgacgatataaagaagttattgagctttgtgagaatacccttcagactgctgagaggaattttgtttcagcagggattggtgggacgacaaatgttaatggattagggtctacgtatcactcgctaatagtttggagatggaacaaaatttccaagtcgcacttctacttgggaaaccttgagaaggcccttgatatattagaaaagttacagcaagtggaatatacctgcaatgagtaaacactttttctatgttctgcaacaatgaatttattgtcatgtatgcattatcttcatctgttatcctaactgaaaatgtacgatttgctccccagaaatcaggaagagtgtcgtgagtcaccagcttctttagtggccaccatttctgaactcttacgttacaaggtatgctctatgttagaacttagggattcttcatatttctatctttaacatcaacaggtctgatacaatccttcattatgcttccttgttgaataaaatatttttttatgcgttgattacatttgcctaagttttcttttgtgattacagaacgcaggtaatgaagctgttcgggacagaaagtatatggaagcagtagagcagtatactgctgcactatcaagaaatgttgactcacgcccttttgcagcaatttgcttctgcaatcgtgcggctgctaatcaggccctagttcaaattgctgatgcaattgccgactgtagtcttgccatggctcttgatgaaaactacacaaaggtatatcgtaatctttcttttgcttttaacttgtgaacatgctcgcatgaaccatctgagctaaaactgaatgcttataaacttttgtattcgaattgctataggcaggtgcagtaagattcgtttgtgaaatacccatcttccgaaaacaatattttcctctagtcataaataagaaaatattataaatctttcaagttctcaaataagaacactcctgcttagccgtatagagcttcttccaagaattttctcacatttgagatggatagtccattttcttgaaatgtggcaaggactgaagcagcatgtaaccatcactttctaagaatgaggtttcattaaaaaaatcaacatgactcatgcttccattttcaggcagtttccaggagagccacattacatgagatgatcagagactatgatcaagcagctagtgatctccagagacttatcagcattctcgtaaagcaaagtgataaaacaaaaacgccagagacatctgtcgatcgtgcaagtagcaggaaagaactaaagcaggcccgtcaacggttgtctgtgatggaagaaaaatctaaagagggaattcatctggatttcttcctaatcatgtatgctcacttttgacaaagtcaattatcacattcatattattggagacctggttatcatttattttatacatatattcagtataattgtatgctcatattgaggctatcttctgttctcgttttgctaatttgcaggggagtgaagacatctgactctgctgctgatatcaaaaaggcataccgcaaagcagctcttagacatcacccagacaaagtaatctgtgttttacttactgataatgatccaaatcattattttcaatcagctgatgtgttctctttgatgtgtgtggactcaggctgcacagattcttgtcagaagcgaaagtgaaggaccatggttgaaggagatattagaagaggttcacaagggtgcagataggctcttcaaaatgattggagaggcatattcagttctttctgacccaactaaggtttggtttctcgcctattatgctgttaaaccttaaaatgcgattcatgtttgtcccctatgaacacttactaggaatagaacatcctaggacctgccgcacagaaatggttactgatcaggtttttgttgtaacagaggtcggattatgaacttgaggaagaaattagaaaagccagggcatctagagaaagctacaggagcagaaaggctgcagaagcaagtagccctccatatcagacaagcaggcgatactggaaggacagttggaggacaaaccaaaacacgccttcttggtggtagaaggctaaaattcttggtggcgtagcaaaaggaacgcagtactttttgtggcataagcaaaagggatccactgggttcctcccaggtgttattccagaggttgtgaagtgtaaaggtccgctacacatcaatacagcaaatgataccagcttacattgtttgcttcaatggtgaaaaggggaattactgcgaggctgtgacccaactacacagtaactgaaaaaaagtttgtttgcttttactgactatagtgtttgtaagttgtaatacattcaaaagatcaaataaatgagaaacctgaattggtctgaacatattactataatctatcgtaaaggtgcttgtcatgcctaattttgttattaacatgccaagtttcatcatgcagccactttcaagcagaaaaaggaaaaaatgttaaggatgctctacctcttcatactatttcatcttatttggacccccatgaaagtcataatttgacaaacacacagaaaaggaactcaataataattaagattagtgctgttgctgaatgaccttaatgaattctttcaatttgaagccttcttcttttgtcgaatagtacaatttattcgtccccacacttttatgtcttaccatactaacaaatcaaaacgctctttcatgccgacagtcctttatctgagtcttcatgtggtccaaaattggccctttttttggcctactaagactggtcaaggagacactatctttgtatttaaaagactcttgccttatacattatgtgttctcgtgtctcgttgaatgaggtatgatatgaagcaaagatgattttcttattattatcgtagacaaaagagcacacaggggagttattgaacataaaacattacaagtccacttgctttattgagatactaatacttggacaaacccaaagccggtttccaagcagatgaagtgagctatagctcaagggcttgagcatggtgactaatgtggtcttcgatgaaggtggcaatgaaatagtaggagtggtcgtatcctggatggaggcgcaataagagcggtgcattcactttcttgcacgcctcctcaaacttgctgggcaataactgatcagggtagaactggtcgttttctccctatatataggtagaagcaaagatggttcaggctccacgtaaaggaagacagataaaccagcaaaaacacatggtaaaaggggttttacctgatcaattagaattgttgcagaaagattgttgtactttgaaataagacaagtggcatcgtattcctgaagatttacaaaaggaacaatgcatcaaatttggggaaaaggaactatgataatggttttagtttgggttggttttacctcccaagcagctttgttgtcacctagataattggtgaatgccttctgtccccatgcacaatttatgggattcgtgattggtgcaaacgcagatacagactgaacatgttacacagatgaagtggttaaattaaaagaatgatataggagtaacaagtatttggttcaagcacattatccaccatgaaagacaatctatctttagatttgagattccacgtttcaagcatctaactcacattgcattgccacaagaaaactctttgaaatgaataccttgtatttatcgaggttcctcaggtatatagtaagagctccatgtccacccatggagtgtccagatatagatgcttttgttgtgtcaagctgggaaaagttttcactcaggagttttggcaactctttgacaacatagtcatacatacgccagttcttccacttttcctgagtagcattgaggtagaatccggctcctagtcgaaatcaaacaggaaagaaagaatattttatcacccttgatcattaactgaatacttaaagaccagaccaataggtccaaagctacaaaaagaagtgtgtgaaatgcaaaccagaagcatgtaacgttgcatacctacaccaaagtcgtaactgtctgcctccccttcaacatttagtcctcctacaatatcaaaaccatcacagagtgttaaaaatacacatcaagggaagatgataaatcaaaaaaatgaaaatagtgttggctcacttggagaagtgtctggagcaacaagagcaatgccgtgagtagaagcagcacgttgagctcctgatttgataatgaagttctcgtccgtgcaggtgaggccagaaagccagtaaagcacctgtcaatcaacaacatggagaatcattcatccaaaaatccaatcagttgttttggcatcacaacgaaatcaaggcaataaaaaatccaaaaacaatcatgcaaaacttaaagttttcgtctttagaacaatatgggagaaacccacaaatatcagtaatacttggttcaaactagagacatgaaatcagatgagtgaagataagagtgaaaatttgagaaaagtcacaaaagagcccttttttactgtagaaacaatcaaatctctacctcagaacatgaatcgtgaaaactacaacaagaaatttagatcaaagtaatgaagaagaaggaatatcattgcatacaggagatttatgggaagaagaagcagaaggagggaagtagatggaaaaggtcatggaacatccaagtgtctcactgaagtgtttgtatcttttgttgtagccatcgaacatcttcgtgctcccgatctcgcttagtccactcgccattatcactctctctatctcactcactatctctgtgattgcaaagtctagaagaaacaacagatgcaggctgcagcgaagacgaagaagaagaagaaatgatcgaatgagagaggtctatcggtttctacagtggatccgagagagcccatagaaataattcaacaacatatctccttaaaacttctggcccaactaaaaggtcttgaaaggccgatttgagtatcttaatgtaataatcaaatccggtttattatagtgacatgaacatctttaatgtaaaaatcaacttcattagtacaaagtgtgtctttgttaggtgatcaaatcatttatatatacatgacacatcagaagataacgcatagatttttatttgcggcggacccatttattgattaatttgtatatctatttgttttgttttcggtgtataataaatgccggtataactaaaaaaccatttcataaatgttgttcagattgagaaaccaaaaaaaatggaggtgatgaagaagactggtaccaaaaaaagatggagtaattttttcatgtgccattaatgaatgtatccgaagttaggcaccttcccttaaatatccccataaccaaaatataatgttacaaaaaagtctctccctttccccaactgtacccatcaatgcctatgtccattcctctcccttgcacataagctttgctctgtctatttaatttaactcttcttctgcatgaaagttttatgctttcgatgattcccaaaatctttctcatgcgttttttactttcttgatttggcaatcctcatgagctgattttgatttcttctttatggttgccgacacgaaaggtttgttgttcttgacttgtgtttttattttattggacagtcttcttttggtagatgaacaactcaaagacggagctaacaaagttgtttttttgatattccattaattttcctttattttattccttaatctttctttgatttttctctgcattgtgtcatgttttgtggcattactatttaaaggaattttttggtatctatgcattaatgtctgatttcttacatgacagaagaagctaggacacaaaacaactcaaattttgtttggtgagaaaaatcaaccaagaaaatattgattcttttggagcaaggagttggtttgattggtaatgctcaagttggtctctcttttttcttttcaaatccaacttgatttctttgttctatatgatccaaacccatgtagtataaatctgtagtggattacataaccaccagaaaaaatcatttctagtcattgttcattattgtctttggtttgtttgaactttcttgtgtgtgtggaccataagaagaaggaatggtgggaagcattgaggcaaagagtctgcaatcaaacgggtctgttcatcatattggtcttaatttggaggagaaacttgatgaatttcgtcgtcttttggggaaatcagaaaaagatccgttaaggattgtaagtgttggtgctggtgcttggggaagtgtttttgcagcacttcttcaagaaagctatggaggtttcagggataagtttcagatcaggatatggagaagagctgggagagctgttgatagagaaactgcagaacatttgtttgaagtgatcaattcaagggaagatatcttgaggagattgataagacgctgtgcttatctgaaatatgtcgaggcaaggcttggtgataggacactctatgctgatgagatattgaaagacgggttttgtcttaacatggttgatacgccgctttgtcctcttaaggttgtgacaaatctgcaagaagctgtgtgggatgctgatattgttgttaatggattgccttcaactgaaacacgtgaagtgtttgaagagattagtaagtattggaaagagagaataacggttccgattattatctctctgtcaaagggtattgaaactgctcttgaaccagttccacatatcataactccaacaaagatgattcatcaagcaagtaagctttttcttcttccttttgctccttttatattgagtctattgacacaatcttgcttagttttcttgaattggttcttactttggtgtttgtggtagctggtgtgccgattgacaatgtcctgtatcttggtggaccaaacattgctgctgaaatttacaacaaggaatatgccaatgctagaatctgtggagctgctaaatggaggaagccactagctaagttcttaagacaacctcatttcattgtttgggacaatagtgatcttgtgacacatgaagtaatgggaggtctcaagaatgtctacgccattggagctggtaagtttctgtatgtagacacggatttgagtgataattatcaagttttcacactttgatccttcttgttgtgttcaggtatggtagcggcgctcactaacgagagcgctacaagcaagtcggtgtattttgctcattgtacatctgagatgatatttataactcatttactagcagaagagcctgagaaacttgcagggcctttgctagctgacacttatgtgaccttattaaaaggacgtaatgcatggtacggtcaaatgctggcaaagggtgaaataaatagagacatgggtgatagcataagcggcaagggaatgattcaggtacttaatctgttagaacaaagccttgaaagaagtttgaaatgttttggtatctgttttgcttatgaggatgtgggatttttgttgaatagggtgtttctgcagtgggagcattttaccaattgcttagtcaatcaagcttaagtatattgccctctgaagagaagaaacctgtagctccggtcgaatcatgtcctattttaaagacactttacaagatactcatcacaaggtagataatatgaagtctgaaaagtttatacttctccaaaaaatattgaactttgctcagtcagatttggtgtgacatgatgggaagttagatatctagttttcaagaatgtcttgggactttgtgagacatcaaatcacttgaaacttgcttcttctattatctaataaaattgttgttgttctattttgcagagaacaatcaactcaggccattctgcaagcattaagggatgagacattgaacgatcccagagaccgtattgagattgcacagagccatgcattctacaggccttcccttcttggtcagccttgattagtcagtcatggcttttataagagattcaacataaattacttctgcaagctgcagatgcttcattcaaaacattatagctttaatgggaaggggtagtttcacatctgtcataacttaaaatggattcttgttaagtctctgagtcaatgcaatctttgtactgtatcattttctttatgatcaatgagagctttatttgctccaacaattttagtaaaagaaagaaaacacagattttagttactaagcaaatatcaacttcattatctcaataagcattctactttagactaatttgaaacgctgcactctaaagccaagcaacctccgtatgattactcaagctagtggttgtaccatagagacaaagaaacaaaagagaaggactgttgtgtaaggcctaatgttaactataccactgagatcggttatgactccattctctgctttgtacaatcggctaactgggggtttagttgattggttatccgttgaagcagatcttctttcttgagcttatagtaatgttgtactttcagatccttcgctatgcttcttaattccttgcctgtcttcttcttcaactcacttatggataatgatatcaatgagccacttacattttttccacctctctggatttttccgtccatggaagaatccaacaacgaatctgcatgctgtgtgggaacactcgaacccctgatgatctttggtgtcgactgggttgagtttttaactggatcaatattaatctcaccagctccaccttgtactttctgcttgatgtttctgataaaacttgtgttcgcgcctttattgtcactgctattagactgtctctgtctcttctttataaggactgacccaggattcttgctctctgccttttttcttgcctcggtaagcaagcttatgatcagctcgtctttaactacagtcttcaccacagcttcaggatgtgattttttgcttctctcaccacatgggatatctctgcctttgtccggttcatcacacatttctaagagagactctgtggtaaaaggttccgaaacagttacaatgtcttgcaagctatcgttttgctggtgatccttcaatatatctccatcttcgtctgtagtatttgccttctcccgggtctctaaatgcaatggtctcagtgtggaacctccaatactctcacggcttatagcagatgaagatttgttctcgagggcttgctttataggatcaaagacttggtcagtaaccaaggatgaacaagaatgttcttcagcttcgtcaatcttgctttccaacacagggctagaagaggtatctgcatcttctgcaacctatcataaaaaaaacacaaagttccatgatacaagattcccatggatgcatgacaaaggattaagaaaactcgacagacctcaactgttagtggatcattagctgctgtctcatgaggcatcaatcttgtttcaggctctatatcttcagtgtcgtcgttactagaatctctgatctgaacagtttgagcagtctgagcatcgctgatactagaagtgttttcgtcgtcatcaagagccagtttagcagaactagtatcagaatctggaagagtagtactgagagtcttatcctgtagaagacataacaagttactcctagtcaaaatctgtagtgaatacaaaatcaaaatcaaatatttcttaaagtctcttacagaatcagaagagtctatctcatgcaagtcaccaccactcccagaggaagccgtatcattttgagccgatactgaaactgaaaccctctcaagctcagcaatttcagtaacttgcctcttcttctctgtcaatatcctccaaactagctcacaatacttttcgttctggaaattttcttcgagcacatctaaaaaaagcaacaaacgattgttctcaaaagagaatcataacaacaattaaaccaaaatccagtgtatacctgttctgaaatcgaaccaaaattcacaacgacgtacggtctgtttacgaaaggtatcgtcttgcacaactacaaaaactaaaagaacacaaactttgcatcatcaagaccaaaaaaaaaaaaaacagtagataccataattgatccaaccagatttacctcgtggcggaccccagagatcatcatcatcatccatggtggtcactcactacgataagcctcaaaattcattctgtaaaaaaaaatcagccttttcacccacatttccaaaatctccaaagcaattctcactaagaagcacaatcacaagaacacccaaagttctaaccataccgttgtgagcttcgtcgatggatcttccagaaattaagcgtttttctagggtttgaagaaggtcggcgagagaatttagtgagagagagaaaaaaaaaggctggcagtgaaagcgacgaacaaaacactctgcagtatttagagtagagtgtagagagagagaaagaggtcggttcaaacggtgaacgggtttgctacaaatggataaaccaacggaggcgcgtggataccaaactaagccgttttattaactcatggggaccactcttcgtccaactgaaaatctcaaccgtcagattcattgacttttatttgactcgtactgtataaatgcgaatatatgttcctgtgttttcgagttactgtacactctccagattctgcctttttcatcggacggctaggagtaaatgacgagtcagatggcacaatcgtaataaagtggaaaaccgaagggtcccgctattcttttgcttattgaacttaacatctgagagtgacgtccgtacagttattgcttttccaaagatttcatacgcgtgaccaacttctttaacttcaataaataaatgaaagtgtcgaaaagtttcaagtaaattatgcatgaatattttacttttataaaagcattttaaggaaagttggtgttcttttttgtttttgttaaagtttcatgtattggagaagcaaagttggtgttctttccatctttttccgatgttttatttacgtgtatatacagaaacgaaagcttcatgtacattgatgtgagatagaggaaaattcttctattttattatgctatatgatttgatttaacatgtcatccagagaataatatgtcattctattttcacaattgcgttttattatgtttatactttacgtaagcgttctgattcaacattatagactcacctacgacaaggataaatactggcattatacatgtcacaaatctaattagatgctactataacttttatcaaaaacaatatagatttatatttatacgaaaaaaggtagatgttctgatcataaattcttgagaatctactaatcaaagcatctctctagattttctaatacttagcacagctcttgatagataacattcaattaaaatgcaaaatttattgcaaaatcgtattagagtattggagtaagtcgaaaacaaaattccattcgtggtataaaaaaaaagaatttgaagtagcaaaaatagaaaacttacatatttgtgtactcctacccggaaaacaaaaaaaaagtgaacatagaaacggtatcaggcagagttggaagaagaaggaccagaaggaagcaggtcgtagccatcgtgatggtgacgagactcgacaggtacgcatttgaggataacggctacaatcatgttcaatgatcctatcaagattgatagtaaccaatgttgccagctcagaggaacggtgctagcaaatgctccaagaaactccactatgatcacttgaaacactaccgtcacagtcattacccaagtgaacacccagctattgaacattcctttgaacacatttatcttctctatttcccggctattgatctcattgaacacctgtttgtacaccgtttgattctcttgttacttatcttttatataagagttgggttggtttttgtttgcgaatggtacctggcaaaagacgaaggagttgaagatgactgtgttaagaacggctgtggagtcagggccatctagtttgagaagtgatttgcctgcgaaattgagaattcctaagacaatcaactggtaaacgctttgaccagcgatgtttctccacatggttttggtgataaagctggcggttctagctattggtgcacgtttcattaaaccttcattgggaggttctgttgctagagccaatgcaccaagtgtgtccatgatcatgttgacccaaagcagttgcacagcagtgagtggagcagatcctggaaaagaaaccaaaagaaatggttactatatttgaccaaacgctagaagaaagatggtgtttgattggtttttctgtcgtacctgtgatgcaagcagagacaaagttgatgatcagagcaaccacattaacagttagctggaactgaacaaacttctgaatgtttatatatacagcacgtccccatctagccacatttactattgttttgaagttatcgtccattatgatcacatcagcattctctttcgcaacctgcatatcgggaattagcaccaaacgaaaatgttaatctcgagatttttttattaaccaaaccaataacagagaataactatagcttacctctgttccagctattcccattgctagtccaatgtctgcctcatgcaacgcaggggcatcgtttgtcccatcccctgtcactgcaactacctctccaattttcctcaagttgctgactaaagtatgtttgtccaatggcagagaccgagccattacctaaaggcagaaacaaggaattttagagatacttaaacattttcaatagacagataaacaataacaattcattctatctatcatatatcaaaggacctgaattttggggataatggccctcatttcgtgaggagacaagtcccggaattctgaaccttctatagctaagcctccttcggtatatatgccacattccttagcaattgctttggctgtgcttatgttatctccagtgaccatacggacggtgattccggcagcttgacaagtctgaacggcttccctaacacccggacgtactggatccttgattccaacaactgctaccattgtatagcctccatcagggagctctccactgggagcttcatctagatctttgtaaaccaagcagagagtcctcagagcctctgaggcaaaaccctctatgatatcagagatactcgtaatccgttcttcagttagcggaaccgattctccgtttgaatccacaacattctcacacattttcaacactatttcagatgcccctttgcagaaagcccgtgcaccacctccaggaagagctataagaacagacattttcttcttgtctgaattgaacggctcaatcttgagtatcttatgctctttacgctgcgtgttaaaatcaccacctaaaagtaaaccgaattcgagtattgctctttctgtcggggatcctaggatctgagtgtttccatctttatccttaacaacttccgaaccagtgttctgaaatataccctgcaaaagagtgctctgaacttcttccgatagttccaactcaaagctttctttacttccctcttgcctctcttgaaccttatcacagatccatactttgttgaccaccatgtgattagtagttaaggtccctgtcttatcagtgcagatgcaagtagaagaacccatagtctcacatgcagcaagatgcctcacaagtgccctgtcactcatcagcttcttcatagcaaatgccaaacttaaggtcactgccagtggcaaaccttcgggcacggcaacgacaatgatagttacagaaattgcaaagtagtcaagtagcgtcaatgcatcttcagatgaccagttggtgaagctaccagacgttgctttgtccaagacaaaccttatgcacaataccacaaatgtaagcacagcaaagcttaaaccaatcttaccaatgattgttgcaaccccatttagcttcacctgcagaggcgtctcatcttctccaccatcaaccagcgtttccatcaactttccccactcagtcctcataccaactgttgtcaccagcatttttgcagaaccgttttgtactttggttcctgaaagcagaaaaggcttctctttattcacatgtgacggttcactctcacccgataagcttgactcgtctatctccaagttgtatccagatataaaaatcccatcagctggaacttgatccccaatagatagatgaactacatctccaacgaccaagtcatgaatggagatttcttgtctgctcccatctctggtgacctggacaataatcttcttcttctctcgatccaagtctctgaactgcaaagattgcttgtaatcactgatcgcagtaaccatgaccaccaagagtatacttagcaagatccctgtcccatcatacattccccttggaaatccttctgtagcaacacccacacctattgatactacagcgcagaccataagaatgataagggttatgtcgtggagcgcttcccacacaaacattaagaatgatctggctggtttctcagtataacgattttctccaaatatcttttccctaatgggcacttcactcgaacgaatgccttcagagagagatacagatacttttttagcaagttcttcaactccacctttctgtgccaggctcttagtgtcatttttgcgaaccatagatgcaagttcatctgcttcaatagaaaatccggctttcttaacctcatcagtgagcttgtattccggcctagcagcagctagagaaaaatacaaataagaaaagaaaagtttacataaccatagaaagtagaaaccaagtcgccttcatacatctctcaaaaaatgcagctgcatatcttaccatcaatgaaatgaagagctgccttttgaacaaagaaagcaactcggatcttttcctgataatgagtacagacagtgagctaatagataaaacagcacaacataggaatatttggtcatacatgaaactgaagaaagaacaaacggtttctgtggtgcaatcatcataagccggacaaattagtaaaaagatccatcacccattgcttgcttaaattttcattttgctttttaaagacagaatggttctgaaacaccattggaacgtcaattatatcactgatcttacaaaagagaaataaagctaatgtagctgaaatatctttggtaacaaaggttaacataacatctatgtgctaatcattccccccggccacagtgaagaacattttaagttaaagctgcaatttctttgactcaacagttaggttataaaacaatttgctttatttataaaaagactgaaaagtgattcgatttcaatgcgaataagtagagaccaaaaaggaaaaagaagaaaagacaatgagctcatcatatccacaagaatcccataaaaatgcttctttatttggtttgtgcaagtggaaagaaccttatgaaaatacacctggccaagtttccgtgtgtaacgtccttaagctaataatttattgcacacaagaagtcctcgtaccataagtcaaatttgaatttaagttaaagaaaaactggtatcaaaaagctaagaagtcttgaaactgaaatttcgtcctttggtgtttggattcagtcgctaagaagagaaaaaaactcaaaaaaaaaaaaaaagggtcagacttttgctggcctctcaagattggctcatcttcctagtagcgacaagaaattatccaatttgtaaacacagtagaggacacacactcaagcaaagatacaacttgatgtcagcatcatgtgtggtgccacttgaattatttttttcttcggtttccgcaattgaacaaaaaagataacgctccaaaagaataataatttcatcctttagatattttaccatatcatcctttgattcatatttctctagagtttgtattagcaaattgcaaaattttaatgtgtattttgaatctttgattacacatagcatcgagaaaaaaagagttttaagttcatgaattaaaaaaaaagtttcgtatgcaaaagtgtggattagactatgaaaaaaaacaagtaacgcctttctgataaagtccttttgtacggatcatcaatggcagaaaaaaaagcttaacagggtcaaccattatcaattccttcttcaaaaggttttaacttttaagtatcacaatgaataattttctataaaaccttttaaccaagaaaatcaaaatcatactcacagcaaaaaaaaaaactgaataatagagatagagaaaccaaagaaataggaacctggatctggtgcttcttgttctcgtagtcagcgagcttatcgagatcccgaatgttacggaaacgacgagtacggttcttcacgatagacacggacgacctccatctttgacgcgcttccagcgacggattcttagcctccacctcgaaatcccttagcaagttcgacatttctcacgctctcactaccactctctgttttcacagagacaaacttcgccggcgcgaaggcagctgagagagagagagagaggattgagcaacggattggtgtgagagttgctttttatggaatacccaaacccgacccgaattactcggattttatgctcggatagggcccattcattcaaatttcattttcgtctcattcggataattagtaggcaaccaaatcaaatgatccgacccagacgaatattattaggtccataaacatgctcttttttttttttccttatagtattacttttgcgtctttcaattagatacctcatacctcaatcctcaaaaaaaactctctgttctcttttttaggaggtcgtttttggataatactttgctcgccgtaattaacgccgtcccgtcaaattgggcttaagaacttctccctcaaatcatcgattctaatagagcggagccaggatcagaagaatcttcgattaccttttgtcagttttgagttcagctgttgccttgaaaatctttctctcttctattctattgggatgagtatggatttggatcaagcgattcaagagatgtcaatcaaagatgaggaaccacttgttttgtcaaaccaagctcagttttgttcgattgaaaggaatacttgcagtatcttaggaagatttctgaacccttctaatcaaaggatgtctaattggattttagacatgcctagaatttggagattgtattccagggttcgtggtgttgctttatctcaagaaaggtttcaatttttctttaaatcagaggatgatctattggaaattttgaaaacaggagtgtggactcaggatgaatggtgtgtagtgatggaacgttggattgagaagtcgacggaagagtatctgatgtttcttccggtgtggatgaggctgagaaatattccagttaactactacacacaggacacaataaaaaagatagcatcttgtgtggggaaagttttaaaggtggaacttgacttagagaagtctcaagcacaagactatatcagagttcaggttatcatcgatgttaggaaccctttaaggaactttaaagagattcagcttccaacgggtgaaatagtttctgtgacttttgattatgaacgaattaggaagagatgcttcctatgccaacgactaactcatgagaaaggtgattgtgattctggtcggccaggaaaatcgtcagtcatggatgggtttcaaaggtctttttttgagaaaaaagaggataaagaaaagtctgatcttaggtttccacaatcaaatcatccccttcctagttcagatttagataggatagaaggaaacagtgctttgtcaacaaagacaaaccttctgaattcaagaatcatgtcgtctacaccttcagaggtacagtctactggtttagtggaaaagattcgaaaagaagctaaagagagtcaggaacacgagaaggcttatcaagaagactgttctaaaggaattattctggatttggatctggatttggatcagggattcaactctgccttaaatgaagcgtgctcatcaggtttaagttctagacagaaaaatccaaggaaaagaaaagcagttgtgatccgtaagaaattggactctctggagcctagtgagaaagctattgatacagaggttagtaaaatctttgaatttcctaatgttttcaaaaggaaaaaggatttggttgcttctgttaaatctgaatgtagcaaggatgttaaggaaacggtggttcatgatgaaccaccgcagtatcagtaaggcatccttagctggaattgccaaggcttgaggaatccttggacaattcggtatctaaaggaaatgaagaaagatcatttcccagacatgttattcctcatggagaccatgaattctgatcagttcattatgaaaatattcagatggttaggctatgattattttcactctattgaaccgattggaaagagtggtggtttggcaatcttttggaaacaacacttggagatagagtttttgtttgaagataagaatttactggatatgaaggtttctcaggatagtaaaagctggtttgtttcttgtgtttatggaaatcccaaacagcatcttagatatacccttttggacagattaaaggagataggtttgacaagaaaatcagcttggtgtatgatcggagattttaatgatattctatctaacaaagaaaaaataggtggtcctaagagattagaatcttcctttcaggattttcaggatatgatttttgcttgtgatctacatgtgatggggagtacagggaatagttattcctggggtggaactaggaataatgaatggatccaatgtaaattagttcgatgttttgggaactcataatggtttgctttgtttccaaactctcaccaatggtttcttgaaagactaggttctgatcatcgaccagttctggttaaatttgtgaatgatcaggaagtcttcaggggtcaattcagatttgacaaacggtttattgaggatcctaattgtgctgcagctattctcgtttcttggaatggttttctggataatcaatcttcttcagttatgcttcgtctagtggaatgtaggaaagccattagccagtggaaaagagagaatgattttaatgccaaaagtcggattacaaaattacgaagggagttagataaagagaaaagtgctaccttcccatcatggacgcagatttctcttcttcaagatgtccttggtgatgcttatagagaggaagaagatttttggagattaaaaagcagggataaatggatggttggtggagacaagaattctaagttttttcaggcaacagtaaaagccaatagagtatcaaattctctgagattcttggtagatgagaatggcaatgaacaaacagtcaatagggagaaaggaaaaattgcagtgactttctttgaagatttattttcttcatcttacccttcttcaatggattcagtgttagaaggttttaacaaaagagttacagaagatatgaatcaagacctcacaaaaaaagtcaatgaacaagaaatttacaaagctgtcttttctatcaatgctgagagtgcaccaggtcctgatggcttcactgctctttttttccaaaggcaatggcctttggtcaagaatcagattatttcagatatagagcttttctttcagacaggtattctccctgaagactggaaccatacacacttatgtctgattccaaagataacaaaaccagctagaatggcggatattcgtccaatcagcctatgctcagtcatgtataagattatctcaaaaattttatctgctagactcaagaaatatcttccagtcatagtctcaccaactcaatcggcttttgtggcagagaggttagtttctgataatatcattcttgcacatgaaattgttcataacctcagaactaatgagaagatctcaaaggatttcatggtctttaaaacggacatgtcaaaagcttatgacagagtagaatggccatttcttaaaggaatccttttggctttggggtttaacagtacttggataaattggatgatggcttgtgtatcttcagtgtcttattcagttctgattaatggtcagccatttggtcatattactcctcatagaggtttacgacaaggtgacccgttatcaccatttctgtttgtgttatgcacagaggctttgattcacatcctaaatcaggcagaaaaaattgggaaaatttctggaattcagtttaatggaaccggaccatctgtcaatcatttactgtttgctgatgatacactattaatttgcaaggcttctcagttagaatgtgcagagatcatgcattgtctgtcacaatatggacatatttcagggcagatgatcaattcggagaaatcagctatcacttttggggctaaggtgaatgaggaaacaaaacaatggatcatgaatagatcaggcatccaaacagaaggaggaactgggaaatacttgggactcccagaatgttttcaaggctctaaacaagttctttttggattcatcaaggagaaactccaatctagactttcgggttggtatgcgaaaaccttatctcaaggagggaaagatattctgttaaaatccatagctatggcatttcctgtgtatgcaatgacctgtttcaggttatcaaagactctatgcacaaagctaactagtgttatgatggatttctggtggaattctgttcaagataagaagaaaatacattggattggagctcaaaaattaatgctacctaaattccttggaggatttggattcaaagatctacagtgttttaaccaagccctgctagctaaacaagcctcgagacttcacacagattcagatagtctattatctcagattctcaaaagcagatactatatgaattcagattttctctcggctacaaaaggtactagaccctcttatgcctggcaaagtatattatatggcagggagttactagtttcaggcctgaaaaagattattggaaatggagaaaacacttatgtctggatggataactggattttcgatgataaacctagaagaccagaaagtctgcagattatggttgatattcaattgaaagtgagtcaacttattgatcctttttctaggaattggaatttgaatatgcttagagacttatttccttggaaagagatacagataatttgtcaacaaagacctatggcttctagacaggattctttctgctggtttggtaccaatcatggtctttacacggttaaatcagaatatgatttgtgtagtagacaagttcataaacagatgtttaaagaagcagaagaacaaccatctttaaatccgctttttggaaaaatctggaatctaaactctgcaccgaaaatcaaggtattcttatggaaggtgctaaaaggtgcagttgcagtagaagacaggttaagaacaagaggggttttaattgaggatggatgctcaatgtgtcctgaaaagaatgaaaccttgaatcacattttatttcagtgtcctcttgctcgtcaggtttgggctcttactcctatgcaatcacctaatcatggttttggggattctatttttaccaatgttaatcatgtcattggtaattgccataatacagagctttctcctcatttgagatatgttagcccttggatcatttggatactatggaagaatcgaaataaaaggttgtttgaaggtataggttctgtttccttaagcattgttgggaaagcacttgaggattgcaaagaatggttaaaagctcatgaactaatctgctctaaggaacctacaaaggacttgacatggattcctcctttgatgaatgagctcaagtgtaacattggaatagcttggtctaaaaagcatcaaatggcgggagtttcgtgggtggttcgaaattggaaagggagagttttacttcatagcagatgttcgttctctcagataagttctcactttgatgcaaaaattaaaggttggaattatgctgtggagtctatggatcaattcaagtttgatagagttacatttggagcatctactcatgatattattaaagccatgcataaaccaaatcaatggccagcattaagagctcagatagatgacttgttgatgagagctaaggataaagaattatggttcatggcaatggaaccgcatcattgtaatgagggagcttctgagatagccaagagtgtgattactggaatgagatggcaaagctatgtagcttcagggtatccaagatggttacaaaatttttttgaggcagaaggtaatctttcaagatgacacagctaattttcttctcaaaggaactcgtagctatagatttgttggaaaggtctttccttccagataggggatcagaatttcgtctcattctcaggatcttaggattgaatcagctatgactaagcacagtccttctcttacagcaagtttctgaagaaacagatgtttaagtggaatgattaaatttgttgtcgtggcttgttgttaattagggtggatagctaggggttcacagctcaacttgatgtgataggagtgaagggtggattaattttgtcctcttatagggtcggttgctttaggattaggtttctttctcgttttgttaattgttgacttagtctaaatagtttaggttatagttttataatgttatattattagaataagtttatttatatctttttagttagtcgcttatgtccttagaagttctatatatagtgtctttttcccttaggtttagtccaaaccctttccttctagacttcctcttcattagctcaatatgtcggatgagttgtggaatgagatacaaaacctagaattaggtcaagaagatccagccctttttatccctcatgaggcttatgtgatggtggaagctaccaatagacttagtatgatagctagacctctgaacccaagggtccagaacctcaattctgttgtggtagcattaccaagaacatggggtttaacaaatcaagttcatggcagaatacttgatgctacttatgttcagtttctttttcaaaatgaaattgatctaatgatggttcaacgcaaggagccttggctttttaacaattggtttgttgcagctactcgatgggaggtggcaccggctcataacttcgttactacaattgatctgtgggtgcagattcgtggaatccctctgccatatgtttctgaggagacggttatggagattgctcaagatctgggggaagttcttatgctagactaccatgatacaacatctattcagattgcttacatacgggtgagagtgcgctttggtattacggacaggctaaggttctttcagcgaattgtctttgactccggggaaactgcaacaataagatttcagtatgaacgtctccggagaatctgcagtagctgcttcagattcactcacaacagagcttattgtccataccgaccaagacctctcagcattgcaagggaaagagctctgtttagggatagtgtgcatcgttcctccatgaactctcagtctcagatgactgatagttcatttccaattccccagactccaccaccaagaatatcccacccaccactgaatcatgatgagtttgtagctgcttatcctcacttggactcaggtaggaatgaccacatcagatgtgagggagaatcaagcaatttcagacaagacttgtcttcagcttcaaactccataactccaagaagggaaccacaatacctaactgatagaagacactttgaacctggtcaatcctcaagaagacatgatgttcgggatttaagaagagggtcagagaggattgggaatctcaatcaacagaactatgtgcaaagatcaggagggatactgaaacctccgaagaaacgctaaacactctaccaacttctgttttttttggattgaagtctgcaggttaacaaggaagcagcttcaagatactccttttggattgaagactgcaggtcaacaagaaaagcagcttcaagatataatagatgagtatggtttttggttaggacatactcctacttatctttaaattcagcattgtcttagtttatgtttcagtttggaataggcttgttgccttttatgtttaagtggaaagtccactgatcaactttttgtaagaacttaaaatgttatcaatgaaaagatatcagttcagagagaaaaaaaaaaaaaaagatacctcaagatctatgctttttttatcgttttcctatgatgttatgtcacgttaacactatagtattcacacaataactgatttatcttttccagaataattttactaacataagttctttttagtgttaagtgatgcttgcttgacgctgcgtgctccgaatttttgttctctctcatttgccttttttttgttcgtaaatttttttttattgcattttctcactttttagtcctttcggagaaagatcaaaagacattataggtcaagtattgatttacaaagataaatacatgaatgagggtggttatgtagatgtcgattactactcactatctcatgactaatcatcttgaaagatcaaagatcaaaccaagcttgcttgaaaattcaaaagcatacgatttggggtcccatttgttggaaatattacagttaacatgtattcgtcgatacatcttccctcaaaacatccattgcaaggactctcttagctaataatactactcctaaggcattttaccattgttccaaaaacaaaacttgaaaagaaatgagcttatggagtaaacactcacggctttggagaatgtgacatagttgattcaagcctgcgtaaccagttaacgtattgatcctgctccttcttgttcaggtgacacaaaaggaaattagttaagccttcactgacccccttagatattaggtattgctccagtgcactgtgtagtttgggatctacttggctaaagaaacaaagaaaataacactggtcattgaaatcaaacatatgcagacacatgaacctctaatagtctacttctttttcaatatatatagaacaattactccagggaaagaacaatgggaagtgtacccaatgctttgaggtttggatgaagtaaaacagatatgattcaagtaacttaaacaaaatgttgagagattatcatttatgagcttacttcacctgaaaaaatggtctccataagtggaagaaggagcagaaacaaaagagcggataaagtaggcgctctcgatgtcgaaatgagaagatccagatcctgattcgtaaacccggcaatgaaactgcaagatagagctgagaccaggctttttgatacaaactttggcatgagcttccctaggaaacactaaatcatcttctagttctataggttctggttgcaataaagcagagaccacaaccttctcgcctgaatcaaactgtctcttcagaacaatatcttggctttccggtgaatcccaatccaatttgaaatctcctagagaaccggtctcaacgccctgtggggttcaagcacaaagcaaaatcataaaggtagaatgtaagtacttaaaatcctagggtttatgagatccaacatcaaattcaaattcgcccatctggtaaatcactctaatgttcatcaattcagaaaaatgaaattgaaactgacagagtctgatcgaactaatgttgagcaccattgatcttaaaactcaattgagagattactgagagcaacgaagaagaagaaggaaagaggaagacaacaatttacctggaaacgaggatgggagatttcgtgacgaatttcactttggaggatcttcaacaaatcaccattttcaatagccttcaagcctcgtttcagaagcggattcaacttcctcatctctctcttttccctaaaattggcttctctcaatctacggagcacaaaaactaaagtagactgaatcatgatccggttcggtttaattcggtttatttccgtagcaatttcagtagaccggaatttaaacggttaaaccgaattctcagttacgtaatcatgcaatttaacaattacacagaaccaatcaatcatcagctgcacaccaaacttttatttcccttgaagatcaaggcttctctcaatacatagtttcattcaaagggtgattttttgtattaataaacaaaaaatgaagatagaattcagatttcagatagagtttcattatccattttagttcaagcatctataaccagacaatgaaagagaatcaaccatatgatgatgtcacgtcacacacactccttataaactatatgtgtagcttctaaggaaaccaaaaacatatagatcaaaacaaaaaaaacaaacaaattatgaattcagaatgggaaatggattctgatagaaagaaaacatttttcaaatgcacaaagtggcaattcgaggacacacttgatcctattaactgtcctttccactatttctgcgacagcatctatgccggcgactaccctcaaatcaccgacgttctagttttcttcttcgttacggttacttatttgacgacgctaattgttgtcgtaaggaaggtaatatcaagaagaagaagagaaaatgatgatgatggtgatgatgacaaagcaagaaggtacttacttccttctggtccaatctctcttcctttgatcatcttgattcttgcaaaaggtcaaaggatcaatacccttttcccaatttccatctttggacctgcgatactacagcttgttcagctctcagtgcttttatttgagaacaatatcgaaaaagaagcgagttttgtcttcttcgaagcctctactatctctggtattctccacgctagtctttacttagacgctgtgattctcccctattatacaggattcgatgctctggtcacatctactttctctggagtctgcaagtcttgtatatgcaggaaagagccattaatagtgggagggaagattgtctcttaccgaggatggtctagtacaacgttcttggtggttggtgttttgtttttgaggattatatgcaagttatgcaaagaagaaggaataaataaaagagttttggtggttaaaaatgttgtgcaaggactgacattgcttgttcttataagagattgtgtgtacttggccgttatgtctcctgttgaagagcctatcttgtttagggtttttgtgtttggttttcttcttctgttgatatgtgtttatgtaatcacaaaagtatgttgtttggttagtcggagacagagtaagaagacatcagacacatgaaatttgaaacaaaaaggaaaaatcagaggcaagatgaagtaaatgtaaatgattgcttaatgatgagtttatattggatgtgatgatgaaatggtaaaacttaaacattacttctatatctatttatatttatccttattgtaaatagttaaatcaaaacagtgagaagtagtagtgtcaagatgacgcaagatagtggttacagttttaaacaagaagaaatagaaaagtggtgtaacacttgctaatttgctagatattccattaggaaattgcttttgaaagccttctgagttggttcatcactttacccgaacaaaaaaatgactttttacttctactaggcataaataagtcttggctttttaattcaatatattggttatgttaatgttgaacaagattatattacagctagtatatatactgcgatgcaatgttaaattttagatttaaactttgttaaagaagattaaccttaagaaaataaaattcctagatttataaatatatgactaaccatacatacatacatattcaagttcagaagtcatagaattatatcaataattaggtggtaccactgtactatcttgtattgttatttgtagcattggatagttttacgaagtttgtacttatacataatgattaatgagatcgtcgatctctggtatgctattccgatgactaatttatccccaagaacctacgaacagagattattgttacatgagttctcattgatcatgggtgtacttttattgatattaattgatgagattctagatcgaacctcacttaaacataaaacatacgagaagaagagattcgtgatccgtagtagctctgcttattcagatatgaccacaccaatagagatgataaggacccaaaagcatgtacttaccgaattactatggctattgtaaacttatgcttaaatccacgtagaattcaaccataagccggcgtaaagtaggtttaggtaaactataaatgattagtctaaatttttaattttttttttgtcaatcaatgattagtctacataaaaaaatatttctagccctaacaatttgctcaaacactaataatatatagaaggttttgttaatcaagtacgcaagtgaatttttgtgcgaaattagtttttattttattattatgatttataccagaaacaactttataagcaaaaatgcactcaaagtacttcaccgagagtatggtgaaggatctagtaagaagagcactaagagaaatttatattggtgtgatatggagagtctggattctcctgatagggtattagtagttgataccgccttggtttggtctatgtacaccgagtttgttcagttctttctatatatgaaacctcaaccctaggcacatgtcccaaaatctgtataggatggagctgaacatactcggtgtacataaaccaagccaaggcggtagaaataccaatgcttcacgaactcgtttagttgtgaaaactctgttattttcattcatcatgaaatatatacatacaagtactgttgccctaagagaatattaagagaatattacgagaatattacgaacttgctataaaagatataaatcttggcaataaggaaatataggatatgggcttatacggcccatgcagaaattatttttcataaactaagaaaacttggaacctagaggatctatctattagattattttctcagatttcagattctaataagatccaaagtaagtagctattacggtcagataaccaaggataaaaactgcagaatcacgatttagccatggtaacaaaaccctagaaggacagacatcgattacctggaaatttcgcaggaattgaacatctctctcttcttcatctcttttctcatgcccttttctccatcctacttttaaagctctgtttcaccatatcttcgtcaatgaaaattgcttcggatctgtttaaattcgattttgcattaaaaactttcaataaaaatgacaaaactagttaattttagttgaagttatatcatcttagatataccaaaattaataacaatttcttatcagaatccactacatcatataactcacacaaaacatcaaattctatagaaacaatatctgcaatattacatatggcacctagatattgtgtccggcctaataaaaagctgcatgaaatttgtatattaatgtatcccatttttatgcgccagagatgaatcgtcaaaaagtcaacagaatcactagattcgagaacttgacttgacgataagcccaaaaatactcaaaagcttcgagccaccttctcgtacaagtcacgaggccagttccggtgcgtgttgcttgcaagaaacccagcaatctgcgcaaagcagtcagaggctcaagtttcatgacttttttaatagattcattcaaccaaactttatgtttttgttcattcatgtaccttggatctcatggcacggatcgacccatcagtgtcaggtacattgtccagacacgttagagcaactttgagcaggtccgggacacaagtctggaagtaaggagatgcgctctggaacacatcagcggttgcatcgggcattcttggatcaagatgaagaaatggaagttttgcaatttctctcaaagcatccagatgattgcctaatctacccaacttgtggatcgatagtattgcctcaagctctcttagtatggtttcttgttccatcactcgctctctttcctggagactgtcagtggcagagtaaaagcaaacaccttgagtacattttcaacttaaggcgaagtacatttctagcatgcaataatatacctaacttcagggtaatatttgtaagtctcaagaatatcgttccctgcgagaataagccctgatgttctactttcaccatccaaccttccacgggcaagagaacagatggcttcggatagacacttgtttatagtctccaaggcagcggaaaatgcacccaccctcttctgtaactctatggactgagatgatagaaaacatggtgaaagctctattaaaagacttacttgctgtgcaacgaaacaatgttagatgagaagttacttactttgtcatataatccagcttcttgacattgatgtgcagcttcgaccaagaactgttgtctcaatctagaatcagggaaaaatcttccaagctgaccttcttcaccagaacctcttgctccaagcaaaaagtaaatacctctttctcgaagcagaatctcagtcagtagctgcttcagcattaggtttctctgcctttgttgatccacattacttcttccagaccaagctaattgtcccccacctacagtagcagcagcttgtgcataatactctaccgtcatttggagatctccgtgatgcaaaaacattgacccatattgcctaatcatgctagatgcctcagcattagaatccatcacacttagtttgtggccagtcccagagccttcagataaaacggaatgatccaccaaagaaatagctatatgaacagcatcaatattataccctccgtctcctgcttctttggataagtgcatgatggccggtagcaactgaacactgagaagcaaaacatatggatataccaaggggtcttttccattctttgtgtagtatgaaggctcaaatttattgagataagcctgaagatcatccaaactgtatggcgcaaggccatcattcaggaccacagatgaggatccaccagtgacgtctcttatgcatgacaatttgaaccataagaaatcttcaattgtgttaaagagtgtagatagatccctcagtatgcgctcaatttgcctacgggaaccagaaatgatagtgtagagtaggagttttttcttgtcataagctgttcgacccaaccgatcgcccatccttagcattttctcacattcttctgatgcaatagctgcagactctgcagccaccataccatctgtggtaatccactctgtaagctgccaaaaaaaggaaatgtaaagaaagagctgattccaaaacgcttgtataatatatcaaaatctaaagtaaacctaccagtggtgcaaattgctgagatgaccgtgttgaccgagcaatttccctagcctcctcataatacccagttcgcaagcaaaaatatatctggggtttacgagatagatataactcattcaggtccgcagtgtaaatctctctatctcaatcatatggtcctgaaaaggtttaaaattcaaagcaagagggagataatccaaaacctgttgccaagtagtatcaacaggaggctgcctacgagcatcagttgaatcaaaatctaaaactccatagtctctcaaacgaatctgcacagtatagataacatgaaaataagaaagctaaacagccctatgaacattttctgtgtggtttcaatctgggacactaacccgaaggaaagcacgaattctttgcaaatttccaacagatccaccaagagcagcctagaacaggaatataaaaagcaagaaacatgtcaaaatgattaccaacattcttgaaataggattgaaagatcatggaaccttttcagacagcacccaaccatttgaggcagaggataatcaaaatatgtattgacatacaagtcttaactcttcttattaagtatacaaaaaatggatacctgtgtagggtgagtttgaattgtgtccattataaatttctcatgcccatgttgtaaatgatgtcttgcacctatcgcgagggccatcctcttcgaaacaccctgtcgaactgctgaatcttcacctgttattgcctggaaaaagtttgtcaacaatcagtcatttgcatgaaattaagaaaggtggaaagataaaaacaatccttaagagggtggttggctggaagatatagtttccagtcaaaagattacctgaacaagctgccatattttctgcatgttgactgattttccacgagttacctcagcaccaagagtatcataagcgtccttaaaacacatagcaggctatacaaaagtaaaaataggatcagtagaaagcacaaccaaacaatcaatatgagggtagccagcttcaatggctgctgcatgaaagctagagtgcataccgaacaaaaagttataacaattctagctagacttctaaaagtagataaggaaatgaatttttttcagctacaagtatcaacagtaattcaattcaagtgaaccaatactaagttttaagacaaggtataggaaatacatactctaaatggcatgcctcgttctcttgaagtgttaagtttcttcacaacctccccatagacatatgcttttttctcatgaatgggtatgttagccagagccacgagttctttgcctggagttgaggatactcgaggactcgaacccaccggcactagttgaccagcatgagcctctctgcttgtatcaatcatatttgttttaggtagcattgatattctgctgaggctctgaaggaagtcacgtttttcttttctccaatcctcctgtcaagtcaaaattcacattcaatatttagcatccatatctttctaatatatcacttagcaaaccatccacatccatgaaaagtctctttacaaagataaaagcatagtacaaatgtagaattgacaaacaacaacattgcagaattgtatcacagtgacttatcattaaattaaaattaaaaatagccagaatacaaacctccaacactttcatcatgtagtcattaaagcttcgaacattatccttttgggcttcctgaatagctgataccatagccatttcatgaacctaaaacaaaacaataacaatacacatcatatcgaccaatcctcgccaagaaaatcaatctatatgatgatagatatagtaaaccttggagaaatagaagtacctgttgcaggtattcttcaacgctcgtcgcctcagcagggaacacatcctcaaatgttgtcttttaagagtattcaaaataaataaaaacatcacatagtggcaaaaaagaataatcacatttgaatagcagacagcaagctgagagatgtgtaagcatacaaaggtgggactccaatgccttacaataccaatagtcggaccaaagacacagtcagacaacagcaagtgatcatgaatttgtttgctaagacagctaaagaagtagattcgtttgacgacatatgaaaaatttgtttcactacaagtaaaaagaaaactacttactcacatattgtactttcttatctcaaggaaaaacacaccaatagacaaagtaatccttgaagcacattataaggagagacagctaagatgaaaaatgtcaccttgagctcgaaagatttaagatcacgagctagttgctctgcattgattccctcccgtgcgagtagtctgcaaaatgtccaacgacaaaaaagaaagacaagagaattaacgcttgcttttgggtagtagctacgtcccatttgaaagctgagcaatgaattcaagacatttcaaattcttgttcgcatacaaaacacaataacaagtgaatgagacggtaaaaatgagattaacctagtggcagcaatagactgagaaggagcttcgttcctcagggttttagccttgagcttcttcgataacgcttccaactgatctaaatttctctgatagtgaaacagacaaaaatcaatcgaactaatcttaaacgatgaacctcaaaaccagcggaaagaggaagaacctgaagaggaggaaactgagaagaaggagcagcttgctccagaagcttcgacgaagaatggagaagatcagtccaaccactcatctcttggtcgttcgccattgattttggattcgagctactactacgcagtcggggaagcagcaaagagagggtttccgtcgggattcaaacctttttgatttattttgttttatgttattaccttttacgactaattatacttttctgttaatatatagaatttctttaaattcgataagaaaaaatagctatttactgtatttagcccatttttaagaattagacaaccaatgaagacaaattaaaaagccatcaaaaatgctctgtaaatccaaacatatttttgtctcattttcttttcatgaacaaagtttttttccgctttgcgaatattgtatgggggaataagattatgaaaaaattaccatcttactataacaataataatattcctttcttcaagttttttaacgccattacaagaatcttaagcaaaggacttcaaaaaagatttgaaaaagaaacaaaaggctctactagagagagagaacaattgctttgtatcttcctcagtcgatatagatttatagatatagatagttctctattgcatatagaagaatcaagaaacgacttcaaggacttgacaggtttttcagatcctcttcctttgcataccaacttggtgctatctttgacagatgtggatacaagtctttgtatgaattccttattgtcccttctgctactcctgtcgcatgcgatatatctgcaccccaccccaaatattaatcagtctatgttttgtttaaaacgaatcaatgagaataaatgagacccgaaagaatgaaaaaaccgaacctttgagagtcttcttgtcatcagacagctgggttatgatatagatgactactgctgctattgatataggactcctcctgcaatttcccaaaataaacatctttaagattctgctgtgtttatctccgtcccgaactgagggaaataattgaaatgtaccttatatcaaattcctcagatttttgcacagcttcctgagcagctttcaccgcatggttagacattgcaaggttggagcagaaccttctctgcaatttcatcaaatacagagttatgaaaccacgtagtcaatgcagccagcataatcaactgtttcataacataattagcacactctagctaggttctggtatcagcaacaattttagttttagacaaactcaccatgaaatcaccagcgtgtatagttcctaaatccacagactgaccaggctccagtcccaatgtcttaacaatgtagtcttttgctcggccaatttccttctttgtcgccccattggcaataacgcatatttctattcacaaggttcacgagtttgattgacttatgtcaaagctatatcaagaggtaacaagactctctcaaatgagaaatctttgaaatgtacccttaatagttcgtggcttgtcctcttggcgacaagcaatgtacagacaggctgcataaagtgcatcctgatttcttcccctgcttgacttctgatcctccagcctcttatataactcattagcccgatcctacatatcacgaaaatccaccaaagctgtaaatgaaatgctccaacagcacatcctaacatatacattccacaaacatattaagttagcagagacgaacaagtttaccttgatagttgcaacaagtcccaacctggaaaaaatatcaacaagttagtgttctctattatcacaaggataataatgtacatacacagcagaacataaatctggcaatgtaaacaaacactctaaacaaccaacagaaacttcatccctttgaggaacagactaacacatcacgagctaaacgcataaagtacaaggaaagtgaaaactctcaatgaaagattaaaaaggaagctccttttgttctttaattgacaatgtaatttcacaaacgtatgcaagaggcgtgatgataaatcaaagcaagttcatacaaaatcaatctccaataggattaaggatcgtgtgatctaaacgtttcaattgtttataaagttgcaatccaatctcagagaaggtgagatctcaaaatggggactacctttcagacatggtagcaatggttttaaaagcttgaatcaaaccacgatcggaattggagttacgattctgccacctcccgagagaagaagacaagaaatcaccagatgaaccattgggcttagcgataacagtggttaaagcactatcagcgagaagcgggttggttggaccaccgacacgattgggatcgctgttggaagattcattagcgaaggtacgccactcagaggtctcatcaatggagtgagattccaaaaccaaaccacactcggagcaaagggtatctccggctgagtgatcgacaaccaactccgtctcctttttacaatccgtacaatacgcatccgacatgattccaaatgaaaaccctaaaaaaaattaacccagaaattgaaaaatcaacaaccctaaaaattgagatcttaaaatcggttacagattccttcgatttctctacttctctctctatctctcgtcttcttcttcgtcgcgaaaaaaatcggagacaaagaaaacaaaacacgagagatgtaacttatgtggagaaggagagaatccgtaggtttggtttccggttttatagacaaagagatgagggaaaattaagctctagggcggtgcatcgtgaggagaagatctagatcgtttatttaagtgggacctattaataatcaatcggacggtggattaattttctccagcgattgacgtttgttttttatttttattttaaattagcttgcttgtccgttttaggaggacagaggaaaaagaaacaagtgacttgttagggaagtcataccggtcgcatgtgttggaatttagttggaagattttaggagtgtttggatataggtacagatataaactcggcattgagcccattgtagtactattgttatcgccatttgggtcactaaatggaccctttttgaactttggttcagtatacaatcaaaatacagaaaccaacttttgggtaattttattcctgaaatagctaaacattagtacgtgagacaaaactggtcatttgctttgaaggtgacatatatcacccctttttatacgtgtctcacaacatttacagaaattatttaactttataaagatgaaaaaaaaaaaaaaaaactttataatttaatgatatatgaatgctttgaatcaacaactttaaccaaaataaaagaaaattaatgctttggatttatatccatattatgtgagttcaatttttttgcaacaaaatcttactcaggataagttatatttatgaatagagagtttttttatttaagatattactttataaaagaaattaaagatatttctgtctaaagttattactgattacacctaaacattaaatattacagattttatttttattagatgtaaatctttaccatgtgaaaggagtagatactttcaaacagattaaagcaatttggatatccgatacaagaaattaatactatgacattgcagattattaacattgctgacattgtatcagctatatctctccatgatgattttcatttaccaaaaccttgaaacattttgggcatgccaaactaggtgaccactaagacaaggagatagactgtgtccttccacgttaaggaggcaaatccgtgctaccattcgcaatttttttgagtagcatgtgagaaaataatttagaaacaagcagtaaatctgaaaatatgatattactcttgatataacaaaatatgatattaattactcttgggtaaaggaaaacaaatatgatagttagtactctctgtgtttggacaaaaatatttttgcctgcttgcatcggattaccgtaatacgactgtttgtcttcactccgaacaaccggagatgagtacaatacgactacattaaatataagattgtaatatgaattgagagtcaaattaacaagggggaattcagttatttctttgtatgtttaaggaataggtgatgggttagcctggtgtaagactatatatgtttgaatataggaattatttggacttttcttaacagtaatgcattgtgtgggggtaaataatgattgggtaatacaagggtattgctacttattacagtacaagagttctgaatatcaatagtttggactttacaacgttcaatttctggaatggatcaatgagattcgatgatacatatttctatcatgctcataatttaaaatgttgttgaaaaggtatgcagatcgtgttgtgtggattaaaatagcgttggatatcgtttaaaacaagtgctgccgcgatataactatcttgtccaaaaaacgataatagctaggtgtccaaaaaaacgtttcatactttcatctcttttcttttcttgcaagagtgccataaaatgaaagtatgaaacaaattaccacctttgcttgtatacgttgttgttatcagttacaattaaattcaatttttaagtttagtcaatttcacggacgcggttaagatgttaggcggtagccgaccatcaaaatagagttaaacattggattattctctatatatagctacataacaaattcattatccgaaaattttcaggcaataaagaacatattggagcaaacaataatttatcgtaagagtttttttaaaattcgttggaacttggaagggattttaaatattattttgttttccttcatttttataggttaataattgtcaaagatacaactcgatggaccaaaataaaataataaaattcgtcgaatttggtaaagcaaaacggtcgaggatagctaatatttatgcgaaacccgttgtcaaagcagatgttcagcgtcacgcacatgccgcaaaaagaatatacatcaacctcttttgaacttcacgccgttttttaggcccacaataatgctacgtcgtcttctgggttcaccctcgttttttttttaaacttctaaccgataaaataaatggtccactatttcttttcttctctgtgtattgtcgtcagagatggtttaaaagttgaaccgaactataacgattctcttaaaatctgaaaaccaaactgaccgattttcttaactgaaaaaaaaaaaaaaaaaaactgaatttaggccaacttgttgtaatatcacaaagaaaattctacaatttaattcatttaaaaataaagaaaaatttaggtaacaatttaactaagtggtctatctaaatcttgcaaattctttgactttgaccaaacacaacttaagttgacagccgtctcctctctgttgtttccgtgttattaccgaaatatcagaggaaagtccactaaaccccaaatattaaaaatagaaacattactttctttacaaaaggaatctaaattgatccctttcattcgtttcactcgtttcatatagttgtatgtatatatgcgtatgcatcaaaaagtctctttatatcctcagagtcacccaatcttatctctctctccttcgtcctcaagaaaagtaattctctgtttgtgtagttttctttaccggtgaattttctcttcgttttgtgcttcaaacgtcacccaaatcaccaagatcgatcaaaatcgaaacttaacgtttcagaagatggtgcagtaccagagattaatcatccaccatggaagaaaagaagataagtttagagtttcttcagcagaggaaagtggtggaggtggttgttgctactccaagagagctaaacaaaagtttcgttgtcttctctttctctctatcctctcttgctgtttcgtcttgtctccttattacctcttcggcttctctactctctccctcctaggtactactatttctcccacacaatcttaacttcttcttcttttttggtatttctatttgattcatcacttatcttctctgttttttactcttctccagattcgtttcgcagagaaatcgaaggtcttagctcttatgagccagttattacccctctgtgctcagaaatctccaatggttagtctttttatttcacctttttaccaactcctgaagaaaacagagttttgatcttttcatcttaatattagaaacagagttagtgtataatctgcataaaacttacggttatcgattcttgtttatgcacgcaggaaccatttgttgtgacagaaccggtttgagatctgatatttgtgtaatgaaaggtgatgttcgaacaaactctgcttcttcctcaatcttcctcttcacctcctccaccaataacaacacaaaaccggaaaagatcaaaccttacactagaaaatgggagactagtgtgatggacaccgttcaagaactcaacctcatcaccaaagattccaacaaatcttcagatcgtgtatgcgatgtgtaccatgatgttcctgctgtgttcttctccactggtggatacaccggtaacgtataccacgagtttaacgacgggattatccctttgtttataacttcacagcattacaacaaaaaagttgtgtttgtgatcgtcgagtatcatgactggtgggagatgaagtatggagatgtcgtttcgcagctctcggattatcctctggttgatttcaatggagatacgagaacacattgtttcaaagaagcaaccgttggattacgtattcacgacgagttaactgtgaattcttctttggtcattgggaatcaaaccattgttgacttcagaaacgttttggataggggttactcgcatcgtatccaaagcttgactcaggaggaaacagaggcgaacgtgaccgcactcgatttcaagaagaagccaaaactggtgattctttcaagaaacgggtcatcaagggcgatattaaacgagaatcttctcgtggagctagcagagaaaacagggttcaatgtggaggttctaagaccacaaaagacaacggaaatggccaagatttatcgttcgttgaacacgagcgatgtaatgatcggtgtacatggagcagcaatgactcatttccttttcttgaaaccgaaaaccgttttcattcagatcatcccattagggacggactgggcggcagagacatattatggagaaccggcgaagaagctaggattgaagtacgttggttacaagattgcgccgaaagagagctctttgtatgaagaatatgggaaagatgaccctgtaatccgagatccggatagtctaaacgacaaaggatgggaatatacgaagaaaatctatctacaaggacagaacgtgaagcttgacttgagaagattcagagaaacgttaactcgttcgtatgatttctccattagaaggagatttagagaagattacttgttacatagagaagattaagaatcgtgtgatattttttttgtaaagttttgaatgacaattaaatttatttattttattaagttttttttggtaagttatttattttattaagttttgtagtatatcgtcgttattcgttaagataataatcaatttgttttcaatattttaggaaatatttgaagcacaagaaaagaaatagtaggtggtcctattggacctatataaataaactaaaatatttattgaatatcaaaattttgtaattgataaagaagtttggacttcatcgccgctcactcctctctcatcaactatcgcctttctcttgttcgccctaatttcagccgcttcttgccgttttcttcgtcggagaccagtggccggtggcttccgtagcattggaactggtttttttgtccttgtagtttatgctttgtcttgtagtagtagagatctcgtccttgattcagttagttttggatagatctgagtaagtgcttggttgattctgcagatctattggccctcgtttggggaatttttcggtttgtttcaagggatgacttttgtttcgttgaggttgcggtaggagcggttagatctgttgatcttttcccgaaccttgcctttccctccgtctcttgtctccttgcttcagccatcaattcccatttggattgccccatttcttttcagaggtttcgttatgtttttgttgtgatagtcttctttgttggcagtcggtctctcctccttagtgtagtttgttgtggttgttagctttctcctacctttgtggtgttctctcacgatgaaggttctcggaggctaggcttctctctttgtcctgcttcagatcttttttgatagctttttgaagacttctatttagatgtatttagacgcctcagtcgtcaccgtcgcacccggaggcttgttcgagtttattccagtttggttggcttgctgggttatgaagttcttggttctggtttcgagagattggctctctttatgataggaggtggcagattttttttcggggtggccgtgggcagccgaagtaagtctcatcgcaagtgcttatgaggaggaggtcttatttgccgcttgtagctattgttttctttggtttttagtcttgttgtctctgtttatgtatttgggttcgttctcttacgtttagggtccaatttttgctgctttgtgttttagtttcttttgtttccctttcatagggctatgcttccggggatatcttcgttttcctccggctttgtctccgagaactttaatttcgttcgtcggctttgtttctcttgtttaggcatcgtgtaattccctggttccacatcaagtttatcaatcaaatttcagtttgagtgacaaaaaaaaaaagaagtttggacttttgttgtcatatgtgtttattataaatagcccaagataagaaaggctaagtggcccaataacaaacaaatatatatatcgaaataggcttcttcgtctcacacgttattgaccagaagagtgaagaaccctagttcccaacaaggtgacgatggcggcagcgaggtaatccttttttgaaccctagaaattttctgatgtgctttcttttgtaacctctttttaacatagtatttattatgttagcttgaatgcatctggaaaaggatcgaagaaaccaaatgggttgaaggagtttctggaaagtctagaagctctgaaggcagatcttaaaaccttgagtaaggaggagctgcttgaactggaaaagcggctgaaaaatgtggctcgtaaggcgagggaagagctggagaggcgtatggagcagccctaatatgtctctgtttaccccttttaaaatgtcttaagggtcgttgaaatttagtcttaataatcgatttagtagctattgtcttaagggtcgttgaaaattagtcttaatatgtagtaaatgatcgatttagtacgtaatgttttagctcctgtactgagagactcagggagttgttatgttgtatctttggatctatatatgcttgatccttgactatttttattgatgcttatctctctctgctttctattctgatagagaaattttgattttggccaagttaaaataaggaactcaacgtacaagcgaaaaccattttttctaccggttagaacaaaattatgaataaaatggacttcacaacaatgctaaaaaactggttgtttttggcattggattctttgatacaatatgtgtttctcggtgaaacattcaaaagctgcaatggactaagcatcaaacacaaaggccattggctctaggattacttttgtacttgacctcaaatattttctatgggctgtgttgcagttgccatttgttgaacctctatgcaaataagtttcttttgttgaatcagtgcttgtgtgaaccatatatcaattttgattttctcgttttcttggcttatcacttgtattggactcactcgacagtaggacttgaatcctttatcctgagagatatcacttggttttctatgttgtagctgtcttggtgcagaataacaaattatgatatctcgctttttgtttattgtgtaagatctaaaacctgacttgctctgcatatattacgaatatattcagttctgaacaaagacaacgagatgttgaagcgctgctggtctgtgcacactctcttcttatcctgtcccttttatagcctcagcttgtgtatgtaaaatgctgctggtctgtgcacactctcttcttgtcctgtcccttttacagcctcagcttgtgtatgtaaaatgctcctgttcttgcagctggaaacgaagaggagattcgagagaagatgctctgaatcattgcagagcgagttccagagattgtggctttctaacgagtaatacttctcatcagcatttccctcttcgtactctacaaaaatttcatctttcaatttgttttttttatttgaatgtcagatattacgttgctcaatggctttggatgaccaaatgacgagaccaagaagggagcaaattgctgcaaggcagcgcgaagaggtatagattatcaatgtgtttattgctgctctggttactgatttctattttgacataatattaatattcctgcctttagttgtcttagtcttaaatctatctatgcatctcagattgtaaacttattagactcgagtctctttaattagagtttaatatattgtttcaagactcggattttatctatatttagaattttatagaaggtatggcttatgaactatttaatgatcggaagaatttgagactcaataccgaagttcgaagacgagtggacaaaacagcaaagatggttcggatgtattgcttgatgaactcacgagggtaatgatcagagtacatgaagctgcaatgactcatgccctattttttcgaaagcaaaaaccatattcattcagataatcccgctagggactcattgtgcagcatagacatactatggagaacaggtgaagaagttggctacaacgttgtgccgaaagagagcttttcgtatgatgattaaggcaaagatgatcctataatacgagatctggatactctaccctaacaatttacaagggacgacaatttgatgtataataaagtttgtttatcagctcaggagtgacaatatgcaaaacttttggcttgggataaagatgctaaatttgtgttgatgaagagaagtggtaaaattgtagaattttatgtctattagtttgtgttcactttaggtgtttaagtgtgcttattgaggtacgtagaattaaaaaaatgtttcataccagtcaaaaagaaacctatgtgtccgataatttgaaatttgtgattcagttaattaggtaaccaacatggtaactgttacatcattaacgaggaaccatatctcatgttcagaaccgcccgaataccgtaattggatctccctttgtattttatgttatcggtttcaactataacacttttagcttaagatggttatgattaattatagtgaaagcaaggttacgtgcgaatttatgggtactttgtggcctcacacttaatttaaacataggatggttatgattaattctaagaattcttaagttgtggttctctaatagtcgatgtggttcactaataatcgaacacatacactatgttataccttcttcgtcccgatatctctagaattttatttttgaaatacattggtataattagatttggtgtaaatggtgttagaagagttcataatcacatcaaaaacttgtccaatgcaaaacatcaagaagaagaagaaacaatcaaatcttgtaattcttttgacaaaaaaagaaagatttggttgagacttgaaatttgaaaataggtatttgttacacctagcattgttttgacatgcgagaaaagccttatttccaatttccattcacgtattaacttatactataaaagtatcacttgtgcacttatgtatttaccatttaaacttaatcaagaaaaccaactttaatctccgtagtatatatatgttatgtatatcggtaacattatttacacaaacatttgacacatgttttcgatcgttgtggtgttagttaccataaagtagtgctatttaacatcccaatttattttgtatcgttttctttcgtttatgagtcacgtcactacatatacgaccgggacaatatggaaaaggatctctacgacaccgtttaaagccaaaactaacatgttcaacgactccagttgcgttgtcccttgtcatttatctgtgatccaaatgtcaacatattgatcaaaaagagcgtcaacgtaaaacaaaattccaaaatcaaatcaaattaacaatttgttagccgggtccatcgtggacctaccctaatggacggttgggattagagcatggaggcgagactttttttcttttctttttgataataacggaggcgagactttgatgataatgaaagtgaaatctgactctataaaattgtagggacaattaaacccaaactatcatacgtaaggaaaaaacattacatatcgtaaacacactctttgttaacaactgcatatggtatatatatatgcctaattaataatttttgtctccaaaaatgtactttataaaataagctaatgaaaacatatattgcaaaagataatcaatacacatgcgtatggatccaggatgtgcgtattggtaacaagtaatatactgtactaaattactaatacttatattgttaaactaactctatgttttctagctgataatgttatccttaataaactaacaatatatgtttaattttatgggggcctcccaaatgataagcaataaatattgatgcaaaatgtgtataaatacacacacaaatcggccacacctcttgaacactcatcatcactttggtcggccgctttcttccttccttcctcctcaaataatctacacatatataacatccctcttagtttctctgtggatccattgagacatatatcataagtaacaatggtgccataccaagaactcactcttcagagaagcttcagctacaactcaagaaagatcaatccagtgacttctccggcgcgtagctcacacgttcgttctccttcttcctccgccttaatcccaagcatacctgagcacgaactcttcctcgttccttgccggagatgctcctatgtccctctctcctcctcatcgtcggcctctcacaatatcgggaaatttcacttgaagttttctttgctcttgcgttctttcatcaacatcattaacatccccgcttgcaaaatgctctctcttccctctccgccgtcttcttcttccagcgtctctaaccaactgatctcactcgttaccggtggatcctcttctctcgggagaagagtcaccgggactctgtacggacacaaaagaggccacgtcacgttttcggtccagtacaaccaaagatccgacccggtcttgctcctcgacctggccatgtcaacggcaactctcgtcaaagagatgtcgtcggggctcgtcaggatcgcgttggagtgcgagaagcgtcatcgatcaggtacgaagcttttccaagagcccaaatggacgatgtactgcaacgggaggaagtgcggctacgctgtgtcacgtggcggcgcgtgtactgatacagattggcgcgtgttgaacacggtatctagggttactgttggagccggagttattccgacgccgaaaactattgatgacgtgtccggtgttggtagtggaacggagcttggtgagttgttgtatatgagaggcaaatttgaacgagtcgttgggagccgtgactcggaggcgttttacatgatgaacccggacaaaaacggaggtccagaactcagtatttttcttcttagaatataataaagaataaaatggtttttaaagagaatttgacttcttaaaagtttgaaaatgtctttaaatgacgtattattatgtatatgtaatatgattgcaatgttgtgtcatgagatatatgtaagcgatattgatatgaaagaaagagagaggggcctagagtatgataaggttttgtttttctagttgtttatttgatgtgtggtatttttgtatctttgttattgatcaataagaagaaaagaaggatttgattattattagtttgtggttgcttatatgcaaggcatgaagatccccacatggtccgtcatgattaatgccaaatttaagattcttgttgtcttttattataatctctgtttaatttgagcaatgcgaatttgcttttacttgtaaagcagcgagcggtttagataaaactaaaaaagaagtactaattatatagaaagcgggattgcttttgagtttcgagttgtaatgtgtaacaatcaattcataaccaaacacctttttcatttatttaagatataacatataataataccatcaaattagtcagttacacttgtagttgtaggtaaacaactataacaaaaaattaagggataaaatgtgtacaaatatataacatataaaagaatggggaagaaataagaggaaatggaaaatagagggatggaccgtggaaaaaaagtgggtgggaaagagcggaaaggcccacagggattgattgagaaagtccaaaatctcatcaaaacagccgcaaagccaaaaattccctttttacaaaaattcttttgcattttaggaccacatttgttttgcattcagcagcattccctatatataatcggagaatcgtcaactgaaatccaaactaagttctaaactctgtaaaaaacttaaatattttttgtcatttaaattgtttatattgatcaactatgactagaataacattgggaaaaactcaaattctactattctaactccaaaataaaaatttcaaccccattttagtttatggttgttttacattcgttttcaatctacgtagttttacaactccaaaataaaaactaaatccaaaataaaaattgcaaccacattcggatctaagcaaaaaaaaatcagaatagttgtaattattttgttgatttgccggtctacacaatgatcaagtctaagtttttttttttttgagactttggtactttacttgattatttgttaaataaattaatcagtttgtttttttcaagttccaaacaagataaaatataaattctgataaacttcataaatcttaagaacttgtcattgtaaattattcgttaccaagcaaattattagtgggctccgtattataaaacgacgcatgcataccttacatacatggctacatgtgacatataaaagaatttgcatcggttaccaatctgatatatacaaatacgtataaccaagtaaccaacctatacgtatatgcatcatagctagcctagacgatagagagcggatcatatggagacagaaatgtcaagaccacagttgtgacttttcctatgagagaaaaagagaagcatatttcaaataaaattgtgaaggtataatatttttccaaagagagcaaatatgcatcatgaacacatgccctcgcctttttttttaagtaaacaatttttctttacatcactaaaatgcatgtgctatcgtttttggataaacaaatttcgacactgaacagatcccagcgctctgaagtttaagcgctatgcatatctatcttacggtaacaagtggtcggtcaatgaatatcgtcgatcttccgtttaacaattgaacgttattttccattaatcaacaaggaacacaaaatgaaaaagttatgtctcaaacggaaacactaagttcttcgttgttcataaacgggaaaaaatacaaagaagtatggaactgtacgtgaatcagaaaactaagaaatgagcaatttaaaccaattcatgaggaatcatgaagagtataattaattgagcaatatatacctagctaacccacttactcagtttttttttgttaaacacttacttactcgtacgtaaatttggtaacgggaaaaattatcagaaatatatgtggctagcaatagcttagtgctatacaaaaatacttttaataagtcatgctataaatgatagcaatatactcagaaagcacatgtatccatgcatatcatataaggacggtgttgcattattgaatacgcttgcatacctgattccagattagaacacatatgcatcatgaacacatgccatcgcattaaaattttaatacttgcactttttctcttcgggcaagtctaatctgcatcgtgtacattttctgtcttcctgtttttcttacactagttctgtcttcatatgatcccctctttctatattctttcatttttaacggatctcttcctccatttttctatatatataaaagaaatgacttggtggagtcatggagataacattttcaataaaaatatagggcaaatatttttgcatggaagtatgcatggaagtatctacatgtgacaaaatactaatttttataaataacttctgcagtaacaatgacaatcactttttgtgaaaactattcttataaattattttccgtctctacatattacatgtcgcttaattaggaggaatattatgcattttgcgtttctgattcaataacctacgctgctttgcattatagtttctcgaaagttatgcattataatattatggagtaatgcgctttttgggttggcaagtctgaattctcttgcccacggcatatgtatacattgtttctgatttgtagtgatcttcacgtgtatagctgcggagcgttaatactagaaataataaaaacaaagttttatattaatttttttgagtgttaattcttaacgtagatttgtcatttgtttttctttttcttatatgtaaaactattgtatactgtatatccaatagttgtatagtgatctgacattaaaagaggattccactatgggcgcttagctcaattggcgatgataaatcataattttcgttgtgagaatatataataaaagttcgtagtcaaataaatgaacctcaattagccttactatcctaaaacttcctttttggggtttaacgttattatatcataaaccttatatatctaccttcgaatttaaaatgctaagatgctttttctatatataaagattgtctcatatggtgcttcacgagtcaatttccaaccaaccatataacatacatgatataggtgatcgttcaatcgtagtggtaacatgcgcctttggtcacatagatcaatcatcactctcaacaccctattttgtatctaataatgatttttctatatcttataattttcttataggttcatatttttcttatgtttagagatcatcaagtagaattaaatgaaaactcgttgaattcgttctagcgcgttgcgttaatcaaatatcacgggagttaaccaagttggtgaacctttttcaactcttattaccatatcattggtagatatgattgtttttcatgcacacatttaactatattataatataatagaacgatctcatcatttatagaaaaatgaccctattgttgagtatgacgctggataagtcatgtagtaaatacatattactaatattgttatttatttacttattagctttaaattgatcatccacataaatccttgaattttatcatcagtgcaactgtgcaatgatatatatagtgaacattcatgaatgtaaagaactaaatattagagtttactcattatatacttactaagtattactttacaggtttcgatgggttattacgatttgggcagttatttttgtttttgtttttgtttttgttcagcttaatagatcaagaggtcaacgtggctaagaaatctaccataagtcgaggcttaataaagtcgaaaagaaacattaatttagttaattgtattatatatgtacgatagtctaatatatctttgcaggttagagaagaaaatcaaagacgagagatctgaaatatcctaacgttaccaaacaaaagaatactttttctttacaaaattgattgaatacctctctataattgatattatgtaacttatatattcgtataaaacacacgtccacgtattcgtacagagtgattaacaatatttaattatacatataaagaaaacattatccttacagtctacagaaagaaaggacaacgtgaatgatatttccatgcatgagatattttcacgatattatttttggatcttaagccgacaaaggtagtgactttttctaccttaataatacaatagttatttaacaaatcataatattcgaagctaaattattgctaatcttcggactatcaattatatccctctaaaaacaactagtgtgttcctaaagtgctcatccaaccaattaacaactcgatgaaaattatgttaatcaaacacgtgtattagcttaagctgaacaacataagtatctctttaacagaaaaacataaatatcttctaagtagttacagatatttgatcatttctcaataatcaactaattaagagtggtaaccgtactactatcatatgtatataagtgtgctaaagggtctagccctcttaccagaaacagggtcttaccgtttttaatatgtagtgaatttcaaataatattgaattatggccatacgtgatacgtgtagtgttaaaaacaaatccaactaaaatgttatcggaagctaaatttttgtttgggataaaatgtaattttattttaccaaaatggaacatagttaattacaaaagtttataagggtaatgagttttaaaaaggtaaaattaaaatgctaattagttagttgaaagttgaactaataaataaaacaactatgagataagctaggaatgtgcaaaccattgagccaaccagctactacaacctttacgataacaacgagcaagcagagtgtcccagagacccatctatctcctacaaaaattggtcgtccaaactgttttttttttttgttacacaaacgtatctctatgtaaaaaattgtaataagcccaaaatttaatcatatgaagcccatcttaagcccaaatcctataaccaaatttggatttattttgcgtgacgagctgtaaaaccttagaaaacccttctttcgctgttgttgccggagaaaatggtgatgatgttgaagaagacagtgaagaaaggtttaatcggcggaatgagcttcgctaaagacgccggaaaaatcaattggtttcccggtcatatggctgcagctactcgcgccattcgtaaccgcctcaagctctccgatctcgttatcgaagttcgcgatgctcgtgtctgtaaacactcactcacactatctctctttatattcgatccctttatcatcgtggaaggaataatctgaattgtcgttgtctttgtttttgggtatttttgcagattcctctgtcatcggcgaacgaagatctacaatcccaaatgtcagctaagagacgtatcattgctctgaataagaaagatttagcaaaccctaatgttctcaatgtaattcgtttttttgtgtgaacctttgtctttctttaacctcttgttagtctctgtgaggttgagtttctgaatttttatgcaatttatagaaatggactcgtcatttcgaatccagcaagcaagattgtattgccattaatgctcatagcagaagctctgtcatgaaggttagatgatcctctttacatttaggttggtgtgttaaaaccagttatagtttcttcacacatataatttgatgaggattttctactactgcgcattgaaaagttaccttctttgcataatttttcgtatgtagctgcttgatctcgtggagttgaagctcaaagaagtgattgctagggagcctactttacttgtaatggtggttggtgtccccaatgttggaaaatctgcgctcattaactcgatccatcaaattgcagcagctcgttttccgggtaagatattggtgtctcagcttatcagcagtgttgagtacacatttcacagatatagtccggactgtgaatccgatttctccaaacttaaacttacaagttaattatttcatgaacagaatgatgaatgaaatgtaacgtggcttatttcgttattgtatgcattatgtgcatagtgcaggagagattaaagagagctacggttggtccattgcctggtgtaacacaagatattgctggtttcaaggtaatctttatttgaaaatcctcttttttccgtatgcctgttaattgtttgtggatttgcttcagcatgatttttgaacacatgatgaaaatgttctgtggtacagattgctcatcgacctagtatatatgttctagactcccctggtgtgttggttccaagtatccctgatatcgaaaccggtttgaagcttgctctttcaggttcttatctatatctttatctcctttctcttctttcttcttggtgctagatcgtgtaaacccgtacactagatttagttcatcaaatgatgatacagtttaggtcttataatctcagttcttagtttttctctaatatagggccgtatttcttacagcatatgatctctctagctaattgttatgcgtttgacattctaagggtccgttaaagattcagtagtgggtgaagagcggattgcacaatactttctagctattctaaacattcgagggactcctcttcattggaagtacttagttgagggaataaacgaagggcctcatgcagactgcatcgataagccaagctataacttaaaggatcttcgacaccagagaaccaaacaaccagattcatctgctctgcactatgtcggggttagcataataaccttatatctctaccttgctttccttctgaaattgtcctgaccaatgaaaggttccctgtcatctacaggatatgatttcagaagtgcaacgatcactgtatataacactctcagaatttgatggggacacggaggatgagaatgatttagaatgtttgatagagcaacagtttgaagttctacaaaaggcattgaagattcctcacaaagcatccgaagcaaggttaatggtctccaagaaatttcttactttgtttaggacaggtagacttggtccctttatccttgacgatgtccctgaaactgaaactgaccaccccaattcaaaacgggtagttgttttgtaaaatcttaaagcaaattgtaccacattatgcgtgcagcttaagatgatgattctatttgtttacatttgagattcaatggcgttgctccagtaactccaaagtatttgaatgaacaaaattgaatcatgataagatttggcatctgccagaaacaatatctatctggtgtcctcatttattggcctcaatgaattctcggtactctttcttcatcttcacacccgatatagtcctacacagactcggaatctttagccaaacctgaacacaataatctatgcaattttaaaactgagagaacgtttcctaacctgagcatttccttgttcttgaagaactgcacacatggggttcccataattccagctgcttcagcaatttcttgatcttcctcgatgtcaatctcaacaaaatgcacatcatggttatactcatcgaccacctgaaacaaaatgaaggagaagtgaacaaatggtcaagtaaatcagtccaaaaagatctcttccgatgagtttcatttcgactaataaaggaataccttgttcaaaataggcttcagagtcctacaggggccacatgttggtgaagtgtatagtaccaatataactcttggactctcatggtatagttttctaagagcatactgaaagcaggggaaaaaacataaggagaaagatgtgaggcagagaaaatgcttgtaggtaacaagttaaggttcatatgttaacaaacctgtcccttgtgctttgtaagagtgatgtcaaacttttcttggacatcccgttgtgtgaattctttcttggcctcttcagtttgaggctgtaacgtgaacatgaaagagagtaagccttgtgacgtgtgcttaagagataagatatttctgaatatttcctacctggtgaaattcaacaagaagattgttacttgtgaggtatctctcggctgacaaagcagctatgcatcctgatccagcagcagttacagcttgtctccattcgtggtcctagagtgacaaataggagaatatagcaaacacaattatcgaaccaatatgacttaaaagagttaataccaacaccgaaaaattgctaaaagttccgaagaatacctgcacatctcctgcagcaaatacaccttcaactgatgtatttgatgttccttcccgaaccaagacgtacccggagctgtcgagttcgacttggccttccaataactgactgtttggcgaatgccctattccataaaacaatccttttgcctccagctcagtttcttcacccgtatcaagtcttctgagtagaatgccagacatctgtcccttggtgttgctcaatacgtccacggtttccgtgttgtaatgcactgtgatgtttggattgttgatcactctgaaacattcgccataaccaacctgttaaaaaaacactcagggtgttgaaaagactcaacttacgttgtgctcattagtctataattccgatagccagcaaaaaaaaaaagcactctactggttggttataaatttacatgcaacggaaatcataaccaaaggctttcccagatatatccaatggatttgcgagggaacaggggatagcagtcaatacatgcaacaaagaacgctcaacatagctatgacaaaacacatttcctagtttggacatagcatttatctagttttaactgtttatcttcagaaatcaaagaagaggagtagaatataaggcagacgtgatgaatataagaactcacctatcttgcatagccttggaagctctcaactgatctctgcgaacaagcaaatgaacatgacgggcatatttcgtgagatacaaggcttcctctgtagccgtatctcctcctccaaccacggcaagtacttgccccttaaataaaggcgaagctccatcacagatagcacaagcacttatccccctactccagaattcttcctctcgaggtaaccttaacctccttgctgtagcgccagtggcatatataatactatggcacttgacctataaaaaatggaaacatcagaagagagctgaagccaaaaaaaaaaaactatttagaatttgaaaaagaaatagtgagaaaacaaagaaagataatcaccttacgttcactagtttgcacagtaaaaggagcagttgtgacactaagagattcaacatcttctggatacaactctgctccccacctctctgcttgctttctcattctacaattttcacacaataaataattgcatcagaaacatataagaaacgccacaaactaacaaaagaatcagactatgttatagctcacttctccattaaatcgggacccgtgataccgtctgggaatcccggaaaattctcaacttcagtagttgtcatcaactgtccaccgggaactccgcccatctgatacccttcaaaaaccaccggcttcaaattggcgcgcgctgcatatatcgccgccgtataaccggcgggaccggagcctataatcactacattctcgataatctcgcctgcaattaattattaaaaaaccaacacagagctcgattacttacactgccaaaaaccttaagaaagaagcaaagaggaactcctcaagtacctcctgaagaagaagaagacggagaattggcggtggcggagactctgaggcggagggaatcagaagagcgagttcgggttggttgacggaggagataggagccgccgtgacgtgtggtagtagtagtagtgagaaagaagagatgaggaggaggagaaagagcggatgaggcggcggagacacggtgaggcgatgagacggaggcaataccgatgcctatcttgggagacgcagccatattttttttgattgccttacctttaccagagaccatacaattgtctctttggctttgcagttaaaaaaaaacatcccgattttctgttggcgactgtgcctcacgcgcctcagcattatctctttgcttccaagtccacaggcttagatgattttcagccgttggatatatgtgatgaagcgactgaacggtggagatgtgttttgactgattttacttcgtcttttcaacggagggataagccaatcgctttttttttaagtgggaaagatcgccaagagtttaagtggacggacgacgctttttatattgggccataaatgggcctgttttggtactgaatatttagtcacgacgaagattcttaaacccaccggaaaatgggctaatctgtgtgcggattgcttcgccaaaaagttagtactaataatttataaagcataactagctaaatgcgaagactatatagtttacttagttctgaagaggttgaagtggaaatgaaatgaactaggagttggtgagggaaggtgacagactattttttcttaagtcaaaaagttaagctgaccaaaaaagagcagcccaatgaaagcaaggatctttatctttagtctagtgtctgaattccatgcacttccaatgttttagtcaacaaaatgtacttacatttgatgacttgatgttgtatagattcgttaggaagccacatcactaaacgttaagcataactttatggttaaaaaaaaacccccccaccgtgttcttacttgtcatccaaattcgatctgccatttgaagtttcctaagctgttcttgatgactattcttaaattcgatgtttatatcttaccatctaaattaagccttacaagagctacatatccaagtagtatatgctggagtagttttgtgatcccttaatcttattgttcaacaaataatttcaacaggacatatatatggatcactactgttaaaacgatatagtagagcttaagcgttaggatttgtattattagttgtctctctcttttacagacgcgtggaaggtacgcgccgtcataggaacattgtcggtaatccccttcaaacaccagtagtcagtagatcgatgacttgaattacatcactgtcccctactttgaccaatagagatctaaaggtttcctttcttgcattattgtgctaaaaccgacatttacttaagttacttgattatgtcttggaaaaaaaaaaagattttaactttgggaacttttattcaactgaaattttaaagaattatttaatttggaattccttctataaatttactggcttttaccgttatacgttaccataaacttatatatatgatcaaattcgaccgtgatgaatgatcacttttttaactttccattcagatcaactgaacccccttactttttctatatatactcttttaagcacttgtttatatattatcaacaaattaaggtgtcgaaagtaacatacaattagacaaagcatgtatagtcaaaaagatagatagtcatcaattttgaaaaacgagcaatttacatgatcctacaaaacaacaaaactaactatatgaaatatcaagtttataatcatttttaaaaataccattacaaaagatttgtactttgaatataatttaacatgaaatttagaaaacgatctgtttaagaatataacttctgctatgtggtattttaactggtactttatagagaaaaaaagattggtaattaatgtgatatttttgcaatccatattatatattcgagagattttactaatgatagtacttgattaatcattagagaaaactaaatcttacaaatataggtagacatgatgaataatatgcatgatttgcgtttcgtaaattgatagtaccacctcacctaaagggggtccaaacgagttgcttcatatcacaatatccaattttaccaacatacattaatatatgtgtattcacatatatacctcgtgattaatattttttttaaaatcatttttcgtttgtttcctatacgtctaatcaaacacacacgttacaactaaaattatattgacaatatagctcggttggtaaaagcaacgactactgcagtttccctgaaaaacttaagaccagtactaaatatcaactatacaaattaagttgatatcagtttttttgggggtaaagtaatccaatatcattctaaaattaaaagcaaaatgtcgttagttatacatgttagagacgagcgttgtgtttgagaaaaaaaagagttatgtcgtatagtggattcgacgtaaatattatcgatggttggtttcaaacctgaaaaattacatgtcatattgtcatcaaacatcgattttcatttgatataagaaaaatatatttacaaacacaatcgtgtgtgtgtgtatgcatcatgattatatgcatgttagtgttagagttacatattctatagaatatgtaaatagttagaagcgtacgttccttgaaaattgttcaaagtatttctattattgttttcttttgttaaagtatttctattattgtctcaaccacctaattaaattaaataacgtctctatctctttctatggagtcgtgttacgtctttctagtttgagatcttctactacttgttttcttcaagaataataattttcgttttatatatggaagatgctggtgaacatttacggtgtaacgataacgttaacgacgaggagcgtttgccattggagtttatgatcggaaactcaacatccacggcggagctacagccgcctccaccgttcttggtaaagacatacaaagtggtggaggatccgacgacggacggggttatatcttggaacgaatacggaactggtttcgtcgtgtggcagccggcagaattcgctagagatctgttaccaacacttttcaagcattgcaacttctctagcttcgttcgccagctcaatacttacgtacgtatatatgcttcactgtttcaatcagtattttaaactatttgtgtttctttgagtttactaagtgtatttgcttaattaaaggcattaatgagtgttgttacaaaaatattatagggttttcgaaaagtaacgacgataagatgggaatttagtaatgagatgtttcgaaaggggcaaagagagcttatgagcaatatccgaagaaggaagagccaacattggtcacacaacaagtctaatcaccaggttgtaccaacaacaacgatggtgaatcaagaaggtcatcaacggattgggattgatcatcaccatgaggatcaacagtcttccgccacttcatcctctttcgtatacactgcattactcgacgaaaacaaatgcttgaagaatgaaaacgagttattaagctgcgaacttgggaaaaccaagaagaaatgcaagcagcttatggagttggtggagagatacagaggagaagacgaagatgcaactgatgaaagtgatgatgaagaagatgaagggcttaagttgttcggagtaaaacttgaatgaaactagattgctagattgatattcgtaatataccagtttcttcatattcttagaagttttgcataactatatatagtactcttttaagacatgcaagatcagaacatatgtccgagaaatatcggattctttgctgtattggttaagtctcgtgttcataacatggtacatcgtgtgtatatatatagccattaactaagagaacgttttctcatgtatttgcgaaatttaaaactattttgggtagatgagatgagttacatctcactttgggctgtggtcaggatgattttggttatgtaagccgcgttaataatggtatcactagctgcaaaatggttgaattttggtaaatctcaactctcaactttcaactctcaaagcaggcctagaactagaagtaaaagattggcattctcttatttcgaatttaggccagaacatacggcacattagggttttttccagatttttagttgatggaagataaaatatgaggcatcatgtatatagacattaagaccacaggtttctcatgtatatgtcatatttacaactatgttgagtacgcagatgagattataataagtgatcagatctctctttgggctatggtcacaaagggtttttgttgtacaagccgcaataatggtttcactggctatgagttagctgcaaaatgattgaatatggtctcaagtgtggattgacttatactgtattcagctattcccagccgattcctgccatagaatgaagcaaatttctttcctcagacttacaaagactgatgttgtgtggatcatggagaagaaacagttaaaagaagaatgtcttaccggtttctttcaagatgtccaaaggcatccgcaagtgacaatcctccttctccaaatggcaactgcaacccaagagagacaaatatggagcactagtccaagagtaatcttagagccaatagattttgtgtttaataatttacctggtacttgatactcagtccattgcagcttttgaatgttgcaccgggaaacgaagattgtatgaaagaatccaatgctgagaacttttctttggttagccaccactcggcaaatattggaagtggaataccacctgttcagcatcaaacggataaaacatatatttatgctacaagtcgtgaaataaggcaaatctaaaaaagtatgtgacatgtgtgctcctaccatctcgaaacagctgctctgataactggtcatcgaatcgcacatcttcctcaggcaatggaggtaccagagtactcactctctgctcattaccaagaaacttggcaatcctctgtaccatttctggtgacaaactgatttctgatgctgaagccgtatcaggagtaatcgagtcagagacacctatacaaacttcgagatcacccagtaaacttctaggctgcgtaggaacgttaaacagccactgctgaattatttggcaaaagttctccaattccacattgctgacttcattgggtttgacctaattggtaagacagccaacattacgcacaagctttgagaaatgatccttcctaccattgaaacaaaacaccattgtaaaaaggtacctctaactctaggtggtttccgtagcgtgtctttaagtgttgtggactacctatgcatcttaggcggcctcctacctgtagtttgaggagtatggttctgtgaggtggaaagatttaaggaactaacgccctaaggagttcaaaatgagttaagaaaataccatgatcccgatcctagtgcaaagtgcttgagcttcattcatgctatgagtagtcagaatgaccgctgtctttccactccttgtcgacaagcgggatatcacatcccacatgaatcttttggcaacaggatccatacctgaagcattaaaaacaaaaacacaaaaaactttacccagtagctaagaactagtgtagaacagagatgaagtcttcgttagtgattttaaagtcaaactggtcaggcaagtcaaccaaaatcttgattgggttatacctgtagatggttcatcgaggatgacaataggaggatctccaatcattgcaatagcaacggatagtttgcgcttgtttccgccactaagagtgaacgatggcttgtgagaatgtttcaacaagtcaaactcgactaacttttccgtaaccacctgttatcagataacacatatcagacaatgtccaattaggaacttccactagttagatttatgcctaatagtaaggttgtgattttgaatatatttttaatttatcctagacggtagagaaagatgatttgttcaaatgttatgtaggtatttaacttagccaaacacctatacttctattggggaatcacagaactcattaaggcgtgtaagcaagcattaaacgtaccacttacattatcaattctatgatcaactactcctttgatccttgcataaagttcaaggtgctccttcacagtcaaatactcgaataaagcatcgaactgggggcagtagccaatctgagtaggaaacaaaatatttctttaaacattcaatgttgattcaatgaattggtaaagtcaatgaattgacatacatgctgacgaatagctttgggactcgctactatgtctttgccaaagatgaaggcagttccactagttggagtttcttctcctgttacacccaaagaagtgagaatagtcaacgctattgcttcagaagttgaagttgtttatttgggggttacaaagtatttaagataacagctcggaatagtttccaaataccaaagacgcacaacataccagataacatagacaaggtagtagtcttcccagctccattcgtccctagaaagccaaaacattctcctgcttggactgagaaagtcaaagactgtacagctacttttgggccgtgatgtttgtcaccaggatagacctgaacagtagtattttaggataaaaagagaggagaatctctgttaacgcttgggtaaaaagagcaggcttcaataccttcctcaggttctgtaagtagagcatcgtgttgtctgacaaccccgaaatcaccctgtctctttcctcttgcacgtctatgtcatcttccatatcagtggaaatggctccagtcgaatccttgagaagtggctctgtagaactagaaccagcaccttgcttgaaagccttcaaattctgccaccactccccaattgagaacgacatcactttttggacaggcatgagctcaagcccaagcgtcacaaggaagtagaatatactctgtcatatatgagttcagtcagacgagatgcccctatagtatatattaacgataattttgtgtctatcccatgaaaaaatgacaatagtagcatagagtagcgacaatattccaacttttaaattcacaaatatgaaaatcattgacacttaatggtggatctatttctcaggttttcaaaggagtaggaacaaaaaaaggtgaagaacagggaagactctaacctccaaacccaggtaacagatggacgctccagtgacgttccattcaaacaccccatgactagatttgtctttcatcccctgccttagaagcgctaatgaagccaatccatcagagaagcaaaatcctggtgataatctgaagaagttctgtaaagcataacgaaaaagaatcagttcctagtcttttcaaggctcaccgaggtcagaaaatcagaagattccacacctttagatatgaatttgcactagcagtcgctggaataaggcccatgacaaatgagataaccataaggataagaccagagaagaagtggaccataagaataacattctgcgattacaacaaagtcatctatccatcagtaaagatcatctaacagtatgaagtaactgaggaaaaagaaaaaacaaataacgatatgggtaaaagcacagagtagctagaagttgcctgagccatgctatgctcggtgaagaaaaatgtaagacagtacgttgatgatgcaattgccaagccatactccaggagcataaggacagtcggaagaaaccgacctattccgataaattgttccagacctaaggaaagaaatcaatcatttcagtaagtttatagcaaactagcaaagtacagtgaattagaagtccaaatgcaaatggaaatcaaaaactaacttaccaaaagcgtagaaaaggattattgcaaatgttgacggaaataagaaactgatgaaatcccatacgtacgttgataaccagtatgaaagaacagaaacctgcagccataagagatcatgaggccaaatttacaggattaatagtaagaatctgggactgatgctatgcttgtttttggttctccagaagttttccagagaaaacttaccccactaataagctgttgatgctttgctttcacctcccgctcctgaataaaataaaatactatattcagaaaaaatactggaaaggtagcactaaacaaaaaacttatgccaaaataacttgaggtttgaccttacatacaggatacataccttaacaatgggaacagcaaaggaggccgggatgaacgagaacgcaatgttaacaataattgcagcggaaaaagcatccaaatcctacaatgaaaagaaataagatcaaaactactaatatcgtgacattttgtttttacgaataaaacaattttgagaggatgagacagggactagaatctgatcttttgtgtccgaggaaaaataaggtagacacgtgtcagtttttgctacaggctgttacattggttcacatatactgacaatcagtttgagggatcccatcaactctaacttatccttaaccctcaaactgaacataatttcaataaagtaataccattgtctattaataccacagaaagggaactactccaaaaagaaagacatacatgacgctgtatgcgctgagtttttgtagggggcaaaggatggtttcgggtttgaatggtcatattcttgttacccgtagcaagtcggagaatcgcagcatgcataacattgatgtagattggaccagcatgctgacaagtaccgttgtgtaacacggtgtatcctaaactcccatctggatgctggccatccattaaaattgacccatacctaaagacactcacgggtagcaattagcaaagtcagtacataaaatagtacactgtaacattctcaaagaggtcaccaacgtaggaaatgcaacaaagtaaatgttttgtctaactcaatgaactctttgattaataacagtgtaaggcatgtcccgcagaataaaacaaaatgttcacttagatattacgaaacaagaaactcataaatagctttgaaagcggaaatgtcttcgacccatgcatctttcagattggcagaaattgatgcgacataaagggccctccaaatttaaactgacatagttctgggagcagctatttaaatgcatacgttacatgaatcatgagaacttaagccttcacgactagcaacaaacaggggaacataatacttgtgaaggcaacaatatctggagcatatggattatttagcgtaactcacaaaagataacaaagcatgaatctgctggtgacctatacataccttgactggtaggactgatcaaaactagacatcagaaattcgctcattgaaagtagagtaggccccaacgtgggacctgctgcatcaattgcatcagccagtgcctcttttggattaggaaatttatatgaagtattcctcaagggctgaatccagcctccttcgatatattgtgcaacctaaatggccaaaaaaattgatacaaacaatgtttggtaaggtgaattcaaccatagtgcactgtgatcaaaatcatgtaagcataaaatttaaccagtgaatgtgtaacagaactactgcttttataaaaccctgggtcaattgttgacagctgcataagagcaaaccctctacatccagtaactcaaataatgaaatgaatacgtcaccaagcaattagtttttttatgcacgtgtagaagttaagaggtgaaatgaattttgatataccaggattaatgtgatagttactagagcgagtaatataagatgccacctaattgtatttaaactgccagtacatgcatccagagatatcacaaaatataaatgatactcaacagacctctttggcaattggcacagacagatcaaaaggaatcgggccaccaccaccctttccgctcagcagaggattaaaatatgcagttgtcaaagttatggatttttgatcaggatgtggcttgagctgaagaaaaagaaggccaaaaagcaagaaaactgctgggatgatgaattggaatgccactgttttgcggtctctgcaagcagatctcgctctttttatgaacaatgctttgcaatgccgccaaaacattgaccttgagataatggaacaaccacaacattgaatgctaataaatccaatgagagtccaaactgcagcaacaattaatctgaaagcttttgcaactgaggtaattataactccagcgccatcattacaacttgctagcaacttgggttgcatactacttttctgattagatccaatgcataccagagaagacttggtatcaggagaaacaaatatatcttcctgcttatcctcgatatctaagttacagccagcaactctcagaaacacctcttcaagtgtcgtgacagatataccataactctgaataccaggataatctgagtcctcaatctcactaatcttagatctgtcaacagaattcttcatgcaactttcgatttctctgaacatattttcgaaacaaggcaaggaagccaacggaagcttgaaagaaatttcgtttcccacctggacattcatcacttataaagatgaggcaagagatgggcttaaatttatctaaatgcagtaaaaaattactctaggggaaatatctgcagctatagatatgctatgatatccattatttagaaattaaggacacaattggaagattatcaaccaaattatgctctctactctagaagcttggacctctgcaaagtatcacagcatgcagcaaagcatggacctctttcatagaatttactcgttgctcagatgctctcagtatccttagagattgtaagtaatatacctcactcacacaggttgctgatggaatgtgacgatgaactatatgtgcggcaacagagacagttggagaagtctacaacataaaggaccaccagttattgatgtcctaaatagaaacattaacaacatagacgaaaatgaaaagaatacaaacaaaccttaactagcgtaagagtgtaaccaaccccatagtgatgcttcaggaaaatcgaactgcttagccataaaaaccccaaaataattggtaaaatgttaaatggttaactaaagtctagaaaactataaatgaataattcctatgggtcagaaaaagaaagatttttttttatttgtgaagcactttcacatgtctagttagatagcgtaagcttggggaatcttttgttttctttatttgaaattatcacagcaccaacaccaaatcaaaacaccttctacgagtcatgagcaaccaattgaaaaatccaacctaatcatatcacttcatagtaactaactcatgttaagcaatcccatggtgtgaatgctttgtataatttgtgttattagcatgccttcaacatatgcatcgttgttcttcctaacttggaatgaaataactttcttttttaaaaaaaatgggaaggacaagcaacagaaaaagccagagtagtctaaaaacacttaacctgccacaacacttaagagacccattagccatgattcctatccgatctccaagttcttcagcttcatccatggaatgtgttgtcaacaatattattctaccctttttaattttcttaattaactgccatgtaagacgcattgagtaaggatccattccactggttggttcatcgagaatgatcacctgaaatataaagcatattcaacgacaaccgattaagagaaacacaagaaataagatgtctttgtgtttctttctcaccttactgttacctatcaatgcgattccaagtgacaatttcctcttcatccctccagaaagtgcccgtacaagtgtattaattttatcagacaatcccacctggaaaaaaatcaatacccaagatcagacagtctgtgacctatacccaaaattggcaggaaagacaactacagctttccaccccaaacggcagcatcaaacaacaaaatgaattcatctgctgttctccaaactatgttacatactcaaacttatgcagtctgaagttttaatgcttttaggccataattgaattagcaaccagatgctatgaaatcaaatttcagaaatccaagtgtgtgaatatagattgtaggagagggaaaatctacaaagctt

SEQ ID NO: 363 - DNA, 91071 bp, Arabidopsis thaliana
aagcttcttcaagtgccatacctggtagaaatttgttttgaggttcttattcataatatcttcttttaaagtttgggtttttatttttggaaacacaggttttggattttggaatcatgttgagatgaaaccagtgtctctttccttgtatcttgctgttgttgttggatctctaaatcagacatgaagatgcttcgagctctgcttttgtgtctctctttagtgttcttcttggcgtttcagattgttgtttcagagattcaattaggttctaagctcgttgttggtgaaaacaccttgtgggtatccaacaatggtgattttgctctaggtttttttaatccacctggtttgcttaatcggttcagcattggtatctggtttaactccaattcaatcccttatgatcaacggaaggtcgtttgggttgctggagcaggtgttgtcgtttctgataacagctcttactttgagcttactcgtaatggagaattggttttgtttgattctttgttgggtgttccggtttggaatagcaagacgaaccggttctctgtatcctctgctttgcttcgtgatgatggtaatcttgtgttgttgaaagatagagaagagattgtttggcaaagctttggtactccaactgatactttgcttccaaaccaaaagtttccagcttttgagatgttaagagctgctagtgagaattcgaggtctagttattatagtcttcacttggaggattcggggaggttagagctgagatgggagagtaacattactttttggtcaagcggaaacgaagttgtgaagaagaagaagaagaagaagaatattggggctgttcttacttccgaaggagctctgtttcttgaggatcaagatctgatgagacctgtttggtctgtttttggggaagatcataacgacactgtgaagttccggtttcttaggcttgaccgggatggtaatctgagaatgtactcgtggaacgaggattcaaggatttggaaaccggtttggcaagctgttgagaatcagtgtcgtgttttcgcaacctgtggttcgcaagtttgttcctttaacagttctggatacaccgaatgcaattgcccttttaatgcttttgtatcggtctcggatcctaaatgcttggtgccttatcagaagccaggctgcaaatctggtttcaacatggtgaagttcaagaacttggagttgtatgggatctacccggctaatgattctgttatctctcagattagctcccagagatgcaagaagttgtgtttagagaattctgcttgtactgcagtcacttacacgaacgatggagagcctcaatgtcgcatgaagctgacccgatatatcagcggttactctgacccgtctctgagttcgatatcatatgttaaaacatgtttggacccaattgctgttgatccaaataatgtttctaaagagtcaccagtgactgtaacaaagtctcacagtatctgtattccttgtcttgtcggtgcaacttccactacacttgttctgtttcttggatttcagctcggtatcgttgtgtacatttaccggaggaagaagaagctagctaagaagaaagctgaacgattctccaaagcgacaaatccgaaaggtgtgatgatattctctgttgatgagattaaggccatgaccgataactttgacaataacataggaccacagatattcaaaggggttatgccggagaatgaacttgttgctgttaaagaagtggaagcaacattaacagaagaaaggaagtttaggagctctgcatccaagataggaacaatgcatcacaagaacctagcaaaccttgaaggttattgctgcgagctaggcaggaggtttctggtttacgaatatgctaagaatggatctatacttgaccatattgttgaccctttacgaagcaagaaactaacttggaggataagaactgatacctgcttaagcgtggctaaagctctttgttacctccacatggaatgcagagaatttgtcagtcatgggaacttgaactgcggaaacattctgcttggggaggatttggaagctaagttaacagaatatggattcggtttatgtgctgcagataaagatgttgaagattttggaaagacggttttagctctaataacgggtaggtacgaaccagaaggagtagtgagtgaatgggtgtatagagagtggattggaggaaggaaagaaaccgttgtagacaaaggattagaaggatgcttcgatgtagaggagcttgagcgggttttgagaatctcattttggtgtgttcagacggatgaacgattaagaccatcaatgggggaagtggtgaaggttttggaaggtacattgtctgttgatccaccaccaccgccttttgcttgtgcaagatcatcgcccactaactcgtcagagtctagtcaatcgttgtacgagccataaaggctctaagttagtaatgtttgtatagtttgagtatctgatttaacaacagctgtagtagtgaaggttgatgattcttgtttcattttttcggtaaggtctaaacttttatctttaattctattaagagaaagtaaatgttctattgcaacttgtaagcatctttattgggcctcaaagcgtccatgagccttttgtacggaccaattagaggatgatgtttactcattagcaccatgataaatcaagtgaatcaagttctgagaagtttaatgatgctcttgaatctcctggaagagaaggaggctttgtttggttcttcctgcgcgtcacgccacgcgcttgttttggcagagtctaaagtcttttgtacaagtatctgtagtggtggagcaggaccatgttgaggaccagaaccattagtgagcttacacgaaccttccttttactacaatccgaccgactttggccccaccagagtgatcctgagcctaagattcaaaagcagttggggtatatcagcggtgcagagagcaagatgcaaggaccatgacacatagaggctttgttccaaagtcccaacttgttctttggctgtctctttcatttgtctttctctttgtaatttcattggctgcttttaaaagttcaactgttaactgtcactaactgctgtctttttcctcccaacaaaggacaacgatcaatctaagtcttttgtacatccaaatcttgagttgtgtattcaagttttgcttttctaaatttgattcttgttcaaaatcgacaactaaaaaaataaaaaatcaactttgattcttcgagtcttgtcaaacaaaattacaatgaataatatcaacaccaccaaactctttcaatatcatcatcatcatcatatagactctttgaatgtttatctagtccaaggaaaaacggtaatgtaatgaatgaaataagttatttcaaataacagttctttttctagaacttaatggcgtcgacaagaatcccccttgttctacccggtgctcctccattaagcgaagatatatccactacaatcctgcataccattgtttaccacaaggtcaaattataacttttacatgcatagagagattatcagaaccataagatcattacttgttagctgcttacttattccttgtttcttttcctgtttcttgaataatgatcttatcttccattttagatactgcgtactcaatgggaagattgatcccctctactgcagaatcaaacaattacaaaagcaattactttccatattcacttatttttactatgcatagtgttaagtttctcactttctacaccattgacatgagcgagtccatctagccccaagagattctggaaacagatccggtaatgttatgcattcagaacatgacaacattttgagcaattaacaaaaggtggttcaccttgagcttcttgtagcattcctcaaggttgtcattatacaaaatgagaccgaaaatacccgaggatatcccttctttgatctctgcctcagcatttctaagccgcttttgaatttgctcctctgtctcggttcctctgtttttaagaagttgaactgataatgatctcccaggaaactgttatgaaagatatcaacaactcatattgtaaaagcctgctttttacctagcacggagccgatcttcaagctctttcattgaagggggacatacgaatatgaatatggcatcaagagaactcgctctcacagaccttgccccctgaacatcaatgtcgagaatacatctctgtgtagggcaaaagcaaaactcgttgtttaacaaatcaaagacacagaaagcatccgtgatcaatccaaaagctttcttatatacctttcctgaatctgttaccgcttcaacggactcaatgctggttccatagagattaccgtgaacagaagcaaactcaagaaactttccgtctttgatttctttctccataacttttttatcagcaaagtgataatgaacaccgtccatctccatagacctcggagatcgagttgtgtgactcacagagaacccaaacattgaaggaaactccttcataagcattgatataagcgttcctttgcccacaccagaaggaccgcttataacaataggcttctcagcattgcctctcacacctttactccaagcaacaacttccttccttagtaacttcttctgttcccgcacataaggactatcgacctatcaatgttccaacaggtgagaactccaaactgatacaccacaacatcctaagttactgcaacaaattactaacctcgaggaaccagatggagtcgttgcgaggtgaaccttttttaataaccaaaatccgaccttgttcaagaacaaacgcggagtaccccttgctgggcttaggacctgtcccaagcacaataggactaaacctacaacacaaagtgtttctatctttaagaattcttctgacatgcaagtacaattcttgtcacagaatttaaagaatctacataacattcacgcgcaccagttgttactgattttgtcataaatctgaaccccaatggaaaaattgttcctttcatgagttccaccgatcaaaaactgcaaaagataaacctcagtcagataattatcagccagcttaaacagatttggatcaaaacattaagtggacttactattcgatcgccgacatcgactgttatctcagtgttctctggttcagatttcacacagacaccattggagtgtccgttctccggatgatccactaatactgctggagcttctccctaataacaacaattaagaaaatagaaaaaaaaaactatcaatagaagaaattaaagaatgaagaatcaaaatttgataactttagtaaccatccattgagaaactagagttctctagcaaatggagtgaattagccaaggaggctcaccatagaaagattctatgcctccaagaagaacaacaacacagcctgaccaatggcactacaatcatatataagagatcaaataaaagcataataaaaacaaaatctttatctgattttcaacaagaactcaaggaaaataatgaaacactttagtcaaaactcaaatgcagaattcatggaaataaagacagaatctgtaacgtaacacacaaatcgataatgaaaaaaggtatcaatgggaataagccaaaacaaacaagaacccatgtttgttcgtaccttgagtatgaaacaggagaaagaccaatgctttttgggattgcaggagaaattagagttcttaattgcaataagaagattcgattttctccagagtttttgtctcgatttgtaatcccttgtccgtatgaatgtgtggattataaaaggagacaacttggagatgatcgagtctcggtgtaggcaaatctctgcttctctcggtggcgcgtccttgttattaaattataggtcgaaagagagagagactcagagtcaacaggtggctcctaaattggttttttattttattttattcacatttacttgtcaaaatattcgtactatagttttgttaatatgcgattaaatctaataattatgacaaatttgacttttcttatgtaaaggttgaaatacagttggatttcggttgcgctcactgaaacacgacatttttttttaatttaatttcaaagattatagtaaatttcataactaatgtatattttgcttgcatgcacgtattttagtgccaaatttaattcattttgcttctgtctattttttagatgaatttcaattacagaggtttgctatagaattgaaacaaaaatcctatttttataaatggaaatcattaaaaaaattatacagagagcgacacgatatttataatgttcaagatgcaccgactgttttatcaaagaaaaaaagatgcacacacttaaacaaatggattgagtttggcccccggagttatacatttttgacagctctaaatgtgattgggtaagaatacgtgacttcttagttcatagttctaagagaaacaacttaacaagttagaatgcttcaaattatgggaacaaagatatagcttagtgggtaccaccaccgctcattattcgattgaagaacaaatgatggagaggaatttgctctgccaaaacattgttgtttgcagagaaaacttcagttgctaaatttctggtttagtacctttgtactttctccaaagaaatacattactacatttaacatctttgtgtaaggatttcttatgaaaaagggataattgaggatatatagcaagagttgccagaagatctaacatgttggaataagtctgcttaagggatctatacggatgctctctttcagtcaagtttattacagtatatggatattttattctctccggagacataaataacttcgaattagtaaccactaacaaaatatttttggatggcgaataaattatcgtagatgacgggccttaaagggccatccaaatatgtgattttatgggccatccaactgtatatgtttatgatgttggtttgtatgaaatctataaacataaaagacaatgtggatggcagatcaaaaagataagggaaatgtattgggccatgggaaaaggttgttagttgggtctagtttaagactattgtcggaaactcggaatacactcaattaacctagcttcacaaaaataaatgaaacacgtatacaaaagtaacctatatgtgttatcggtattcaaagaatttatatgttgttgataatgcgtcataaatgtgatgaaaagacatagcagacagatataacaatttgctaaaatcactaccaagcttctcagaaaatacaaatacactcaaacgtgacatcaaatacgtggccacgcacaagtggtgtctccaagtcattagattcattttatgatgctgacatacgtgactcagtttgccgggaatgtttaactaatcaaatatggccacgtagacatcaatcttttttaagcgacatgtgtattatcttgttttcgtggtagggtctgaacttgccgacactcgctcttaatattttagtttctcccctaaaaaaattgtctcgtttgttttgctctttagaaattaccgatttacgctgaaaaaatgtgaaaaatacaatcgatcgcattatctttatccctagctaatcattcatgtacaagcatgtctccgaaggttaaaagcagtcgctatttaccggaccaacgtagttttctcgaagtggtggtccgttgtcatattttaaatttatcaccttcttgagaattccacatttttatcctttttgtcatgtagtgtatattttttcctctaacctaattaaaatcaaaacaaaatcctttgacccaattagcttcgcgatatatcagaagagatcaaactactttgatcagaccatgatcttcttcttcttcttcttcttcttcttcttctttttagacgatcacaattcctaaaccctatttctcagattatgctgactctttaccatcaagaaaggtcaccggacgccacaagtaatgatcgcgatgagacgccagagactgtggttagagaagtccacgcgctaactccagcgccggaggataattcccggacgatgacggcgacgctacctccaccgcctgctttccgaggctatttttctcctccaaggtcagcgacgacgatgagcgaaggagagaacttcacaactataagcagagagttcaacgctctagtcatcgccggatcctccatggagaacaacgaactaatgactcgtgacgtcacgcagcgtgaagatgagagacaagacgagttgatgagaatccacgaggacacggatcatgaagaggaaacgaatcctttagcaatcgtgccggatcagtatcctggttcgggtttggatcctggaagtgataatgggccgggtcagagtcgggttgggtcgacggtgcaaagagttaagagggaagaggtggaagcgaagataacggcgtggcagacggcaaaactggctaagattaataacaggtttaagagggaagacgccgttattaacggttggtttaatgaacaagttaacaaggccaactcttggatgaagaaaattgaggtaatttttttttataattaaattccggtcccacgtacgatgattaatttagtaacatgcgtcagatttggatttgagctatgggattaagtattggggttagtaagctggttaatatagaattagaccatgtgatagtataattaagtggacttagttggcacttggcagtataaacattttttttgggtttatcgccatttggaatgtcaaacgtaatcttctcatctgaaaaattgtaaactatagtaggaatggtgtggtggcataatttgtctgtaattaggtgtgagatggttagttctctcacatttctagcttctaattaatgtttttagtcttttaaatagtagtatttatttaccatcgtgcatggcatcgtcatttccaattatacaaacattgttgaattacctttccaggattcataataattaatatagtgaaaaatattcagtataatgtaggttcattcaacaatcgtctaaatggtgatcattcatgacgggttcataatgtatacatagagatatgtatgtataagttaagctaacaatttgggatcgatgcatgcagaggaagctagaggagagaaaagcaaaagcgatggagaaaacgcaaaacaatgtggcgaaagcgcagaggaaagcggaggagagaagagcgacggcagaggcaaagagagggacagaggttgcaaaagtagttgaagttgctaatctcatgagagcccttggacgtcctcctgccaaacgctccttcttctctttctcctaatttttagttatatcaaaccattaaattaaacagtactcgttatatatctagttagtaaacaaaggggcagttttatagctcatgtacacataattgagagtgtagtactgttgtgtcatgtgtggttttgtacttttcttagttacacacaccatacaagaaaaaaagaagattataattcaacttaattttgatttttgaataatgcgtttgtataagaagtcaaataaaaaattcgtttctactttctaccatccatctctagtgctttgacaattcaaaatttcaatttaatttacaactttggctcggtgcaaccctctcactgtgattcaaaagttatgacaaaagtgttgtgaattagtccataagagagaaaattactattaattaacaaaaaaaaacctatgaatatacgaaaatttcatgacagaatgtatgctctaacaactaatcaacataaaaatctatgaattatagattacttgactgaaaaaagaagagtagagctattacgaggaaaaaaaaacaaaaggcaatatgtattttgttttggtttgtttgtttttgtaaattttttatttaaagtggctctgtatgtttttttttgttaattatttgacttcgcgatgagttaactgaatttgccaattcatcgaatgccactaattaaagtgtatccctaattcattggaaacaaacaatggattttagaatttatgcgcttgtctagatacatatgattactaccacaaatgaaacaaaataaaataaatattgtgtaagtgatttaataagcaaaaattaagttttctcatgcccatatcaaaacataagatgatcttaatcctaaaattgttctttttattttggaattttttcttcgtccagaattgcttggataatacggcaaaaataatctaaaaataaattattaaaagtaagccatatctgatttatcaaaaaaacaaaaacagaaaacaggataacaagaagaaacagagagattagggagggaaggaatttgtgctttttcaaaaaaagaacttccttccatatctctctgtcatttttgccttcaacctttctgcatatatttgaataaatacaagaaccctttgatatgattcgcttcgtcttctcagattccaagtcaaacatcctttgattccatttaacttactaggcttccccaaagttttttccagaatctgtttctaggtttctttatctcccctaagctttgggaaagatttgattagggttctcgttccttctttcacttctgcaagaagttttcaatcgtttatttaattgatcacattttgtataatgggaaattgttgtggaacggctggatcgttgattcaagataagcagaagaaaggttttaaattgccaaatcctttctcaaacgagtacggcaaccaccacgatggccttaagcttatcgtgttgaaggaaccaacgggtcatgagatcaagcagaaatataaattaggtcgtgagttaggtcgaggagagttcggtgtgacgtatctgtgcaccgagatcgagaccggagagattttcgcatgcaaatcaatcttaaagaagaagctgaaaacgtcgattgatatagaggacgttaagagagaagttgagatcatgaggcaaatgcctgaacatcctaatattgttactttgaaagagacttatgaggatgataaagctgtgcatttggttatggagctttgtgaaggcggtgagcttttcgataggattgttgctagagggcattatacggagagagctgctgcttcggttattaaaacgatcatcgaggttgttcaggtttgtgaaacttttatctatgaatcttgttggacggtattgatttgtaacattgcttgaaaggcacgtttttatattagagtaatgtggtttattcaatctgtgttgcagatgtgtcataagcatggagtaatgcacagagatttaaaacctgagaacttcttgtttgcaaacaagaaggaaactgcatctttgaaggctattgattttggtctctctgttttctttaaaccaggtgatgtattatcatcttcgatgcttggtttccacggaattggaaggaatcttacccactaatgtttttgtttgcaggcgagagatttaacgaaattgttgggagtccttactacatggctcctgaggtattaaggaggagttatggacaagaaattgacatttggagcgcaggagtgattctttacatattgctctgtggtgttccacctttttgggcaggtttagttttgtcaaaccacttgtcttgtgtcagttcttgtagaatcatacaaatgtaaatgacaccttcgctatctttgtttgtttgcagaaaccgaacatggagtcgcaaaagcaattcttaaatctgtaattgactttaaaagagacccctggcctaaagtttctgataatgcaaaagatctgatcaaaaagatgcttcatcctgatccaaggcgtcgtctaactgctcaacaagtgcttggtatatatcatctctgctttcaaatgcaatataattgtttttttggtgctcatatgaaaacaatgttaagactcaatcatctttggtttgtagatcatccgtggatacagaatggtaagaatgcttccaatgtatcattgggtgaaaccgtaagagcaaggcttaagcaattctctgttatgaacaagctcaagaaaagggcactcagggttatcgctgagcatctatcggttgaagaaacatcttgcataaaagaaagattccaagtaatggatacaagcaatagaggaaagattactatcaccgagctaggaatcggattgcagaaactcgggattgttgttcctcaagatgacattcaaatattgatggacgcggtaagctcttaagcaagtagttccaatgctgatacaaagtttcacacgcaatgcattgactatagtggttacgtttgtttataacagggagatgttgataaagatggatatttagacgtcaatgaatttgtagccatatcggtacacatcaggaagttaggcaacgacgagcacttaaagaaagcttttacgttctttgacaaaaacaagagtggttatatcgaaatagaggagttaagagatgctttggcagatgatgttgacactactagtgaagaagttgttgaagccattattcttgatgtcgataccaataaggtaagatataagtgttgtaacctataatattttctatacgtgtaaaaagactaaaaaatttgatgttgttgaaccgaaatgttgtgcaggatgggaaaataagttacgacgaatttgcaacgatgatgaaaacgggaacggattggagaaaagcttcgaggcagtactcgagggacctgtttaagtgtcttagtcttaagctcatgcaagatgggtccttgcagtctaatggagatacaaagtagagcttgaaatacgcgacatggatacttattatcagtcgcagaatattgaactgaatctgaatcaaagggaagaaaaatatttgttctttctttttggtgttttatcttcactttctcacaacttgttgtttagtttcaacgggtatcaattaagctttaggcatttctattgttgaatgatcgatcatgtgatcaggagaagcccgtttgtgtagattaattaaattgtatgtgaggaaaatgaagatcattaattacttatttcgtttcttatgagttgtgtaattttcattattcatttaccatttgacatagtatatgatcattaatcaagtattttctagtgaactatgtattttttttttcaataataactttacaaaattatttgactttccttttgtcgaaacaatttggcttttgccatggttcagtgaactagccgtggtgtttcttgctctaaattagcggcgataacgttggtccgagttggataaagtcgtatgcttgtacgtagtatttctacattctcaagtaatgaattattttaaagtatatagaaatagtaacggaatagaacacctgatgcaattttccaaaaagaacattatcatagccatctcaaatcaattccttggcactatgtatatatatatccaaacttgccgtgtgaatgcgatttaggcaggcaatgtgatttgtggccattccataatttccgtaccaactaatttaacagaaacatcattttatatgtatataaattaaatattgatatagttttacacttacacaacaccccttcctcaactcttatgggcgtttacccgtttccaaatatttcttaacattctttatttattatatcaaataggtagcacaagaaagaattatgatatgtgatctatactttaccaaacgattgatgtctttctgattattgtgttaatagtttatggaaatttgtattgaagtattacttttgatattatgcataggccgcaaaagtttcatgataatatctcttaatcaaaagaactttttaaaacaaattgtcaatctatcataaattcgaattttacgtcactcatgagttttgtttccttgtatacatgtgtatgcaagaacatatttctatctctaaatgcaaatcggactaaagaattcaactacataatactttggacagtagttctatttgaaattttatattcagaatattctacaatacagataaatgccgttttctgtgcatatccatatatgcatggagagagttggatgtatatatagatccttatccattgctaaagcaaatgagagattttatatatatatttttttattttttttgttgtagtatgaaatttacttgggtgcaacaaagaatacaacatatcatatataatgtaatgtatatgtatcggattttgaccagctttttctatgaaggaattcttaagtttatagattttcactttttatcgttgcaatttttgcttagataaagtttatgacactggattttatttttgccgttttaggaggatccatcagctaagaggtaaaaaaggaaagaataatggtacacgcagaagaataataaattcaaccatcacaaattctaattatgaacaagaacctacaattaaggagagctataacaacgactaggaaattttccagaagtcatgctttcgtccatacctttgggtctctcaagcaagcttcgcacatgtgtattcatatatatccgtttgatgtattcatacgtttttgttatacgtataataaaaagagttcaaaattatatatattttatatattcaatgtatatataccatttttttgtttttggggtgtaaagtcaatatatacctttcgtacgttgacctagtttttattaattcagaaacatatgcatgggtaatagtatttctcgttgaattcggaagttcgtattgtagttgtttaggatctttttgaatcactaagtcaattttctatgtttaaccgggtttcattattattataataaaacagttttgttggaaaatcaaaatccgattagaacttgttactaattttaagggttcacgcatgattcttatttttctagaagaaacacgaaatggggttttactgctcaatcatgtgttaaaacttaaaagtaaacacattgaaattttgaccgcgtgttaattcaaatgtcgcccatgtcataaatcaaatttccacaagtaaaacaatgttcatattttttgaacgggagacacatgtgcttaactctctaattaagcttcacgtgcatcgcctaactttgcttcccatacgccatgcgtgtgtcgcgcgcaatagtagttgaacctacgacgtcgtttacttggaacatttaatttgttaaacaagtaactattatggggttctgtctttttaaaaatgcgattttcccaaatataatgtagttcagtcttcttctttttgtgtgtgaggtcagattcttatatttctatccagcattgatagataaatcgacttacgtgggtgatgggatgaacaaaaaaatatacatttaagtattcaattacggtccaacttgacaaacaaacaaaaagtctaatatgacgtggatatatttgaccatataaaccccaaatttcgttctttacaataagcaatgtgacgaataaggaagagcttgcggcggtcacgtgaaaggtagttatcgccatttcaactgaaccttcacgaacatacatttcggtttttctttactgaaattacgcatatctctataatacacgaaattacgactattcttaacgaaaacgtgcttctttcgtagtatgttgttatatagctcacgtatgttaattatttctcacgtaaatttgcatttatgggggattagcgacataattgtattatcatcatacggcataaaatacatgtttgaagatttaaaaatcacaattatatcataacgtataataatatatattattatataaccattatcatacataatttcttggaggaaaaatccacatacagtatatagtgcatttagtcaatctaaccaataaataatcgagctgacactagataaaataaaaaaggggaaagtaaacttcaataccttaaatccttaagcgatgtttcttgcagaaaatacgataagcatggtctcgctaagagacaactaaatttttaactaaatgaattaaacaatgagatagagagaggattaatatagatatatattttattaaaggagaggattacaatatgaaactctaaaggaagaaaataagataaaataaaattatagatgcctaaagtagtgtttacgtgacaatctcaatttcactccatacctcgaactcattcaagctcaagaaacctaaattttaaacgtcccttttgatttgcctataaatacacgtgcctccacacttctccaattaaaaaaaaacaaagcaacacaaggacaaaaaattcacaaacatcaaacattctccacctactgcccaaaaacgacagcattccttttccagcaacaaagaaaaaacacatttccttgccaatggcccgttgtaccaaccttgttaccgttttcctattatgggctcttttgatgttctcatggtgtaaagcttcaagaatcagccctaatgtatatgaccattcttataaaaggttcaaatccgatagcttaatcaagcgaagagaggacatcacgggattgagaagttttgtaagagcctctttgcggactccaaccaccgttagtgtttctgattttggagctaaaggagatggaaaaaccgatgacacgcaggtgtatatatacacataaaaatgtttttattttatttcatcgtataattaattagaaaactgtttttagtactaatgatccatgcatgcattgtttaggcgttcgtgaatgcgtggaagaaagcatgttcttcaaatggagctgttaatctcctagttcctaaagggaatacttatctccttaagtctattcaattaactggtccatgcaattctattctcaccgttcaggtaattacaagaaattgttatttgttagttaaatacgatgtgtgtgtggattttgaaacgagcgtttggtcgatggaacggcagatattcggaacgttatccgcatctcaaaaacgatcggattacaaagatatcagcaaatggataatgtttgatggcgttaacaatctatcagtcgatggaggcgacactggggttgtggacggaaacggcgaaacgtggtggcaaaactcatgcaaacggaacaaagctaaggtgggtatatatatgtaaaagtataaatcttctctttaattaataaacagctttgaatattgagttattgctgatattgaaacttttttttttttttttttttttttttttttttttgtatatgcagccatgcacaaaagccccaacggtacgttgaaacatatatgatatcaaaaaataatgttgatggatttgatcatagttggacaagtgttttacgtatatatttttttacattcaggctcttactttttacaactcgaaaagtctgatagtgaagaatctgaaggtgagaaatgcacagcagatccagatttcgattgaaaaatgctccaacgttcaggtctctaatgtcgtggtaactgcgcctgcggatagtcctaacaccgatggtattcatatcactaacacccaaaacattcgagtctccgaatccatcattggaacaggttactattttatacattaacatttgttttctttattttgtccgtgacttaaaaaagttgcttgcttaccaagagagatggattttaaggctatatataataatttacggagattgatctaaagggagttttaatagttgttttttcctaaatataggcgatgattgcatatctattgaaagtggatcacaaaatgttcaaatcaatgatataacttgcggtcccggtcacggtatcaggtatcaaatcattgttttgaataatatatcaaaagggttcgatcataatctaatactaagaaaatttgatatttatttttgaaaacatgagcagtattgggagccttggagatgacaattcaaaggcttttgtctcaggcgtgactgtggatggtgctaagctttccggtacagacaatggagtaagaatcaaaacttaccaggtgaaacttcacaaactagtccttcgattttaactaaactctcaaaaatttccccatctgttaattgttattccatttaatccaacccaatttatcagggagggtcaggaactgctagcaatattatatttcaaaacattcagatggataatgttaagaatccgatcataatcgaccaagactactgcgacaagagcaaatgcactacagaggttcactgcaatctgatcaaatctatccaatactcatcatcattggtaacacatattcttggatctaatcatttagtatatattttcagaaatccgcggtccaagtgaagaacgtggtgtaccgggacataagtggcactagcgcatcggaaaacgcaataacgtttaactgcagcaagaactatccatgccaaggaattgtgcttgacagagtgaacattaaaggaggaaaagcaacttgcaccaatgctaatgtggttgataaaggagctgttctgcctcagtgcaactccacttagttacttagatcgcttagatctatcaaacacatacatatagatatataaatacagatagatcgattacaaaatatactaaatatacttgtggatatatatatacatggacaataaataacagatattgtctaactatgaattataggattatagtataggaatacatgtataaacaatgttcttgagatttgttgttttatttgtattcttacatactaaattgtttatctaaagttatatgaataaagggatacattctttataaggttatggaccttatggtattatttgttctgattaacgtgtgacattagaatgtcaggcccatttaagcccactttctgtttaagttaccaaaacaaacccaacaaggcctttagaaaccctaaaaatccttattgtagcagctggagcaatatatatcccaatttgccgcaactagggttttctcttcctcacgcaaagcaatacatcgcagtctcccactgattcagcagctctttgaactactcttcgacaatggccgaacgtggtggagaacgtggtgttgagcgtggtggagaacgtggtgatttcggacgaggattcggaggccgtggaggtcgtggagatcgtggagggcgtggacgtggaggccgtggtggtcgtcgtggagggcgtgccagtgaagaagagaaatgggttccagtgaccaagcttggtcgtctcgtggcggctggtcatatcaagcagatagagcagatctatcttcattcactcccggttaaggagtaccagatcattgatatgctcatcggtccaacattgaaggatgaggtaatgaaaatcatgccggttcagaaacaaaccagggctggtcaaaggactagattcaaggcctttgttgtcgttggagatggtaatggtcatgttgggttgggagtgaaatgctctaaggaagttgctacggccattagaggagcgattattctcgctaagctgtctgttgttccagtgaggagaggttactggggtaacaagattgggaagccacatacggttccttgtaaggtgactgggaagtgtggatctgtgacagtgaggatggttccagctcctagaggttctggtattgtggctgctagagttcctaagaaggttcttcaattcgctggaattgatgatgttttcacttcctccaggggatccaccaaaactcttggaaacttcgtcaaggtttgttcttttttactttcatgtagttacctatacacgagattcgtttccttttgattggtttctggtagtttctttgaaatcacaatttgattattcgaaatttgagcattttctgtcattttagtacagtagtagctatataagtagttccaggagtccatttggttaggaaaaattctgacttcacactgtatttgatgaaatatctctggaaatgttattggtgtattgatggaagagaaaaagtgtttctctttcgtctagtgattctctttagctgtaatgaatgatcgctttgtaggaaacctttaatgtagcaaatgaagaatagattcagtttggcatctcttgatacttgactgttttcacttgcttatgatgtgtttgttttcttgctaattcacgagttttgtaacttgaatacaatataccctcagttttttatccatgtatagtattcacttgtaccttagtttttttcacggatgaataattgttttcatgatgttgattaaattgcaggctacattcgattgccttcagaagacttacggattccttaccccagagttctggaaggagacaagattctctagatcaccataccaagagcacactgatttcctggcgtccaaggctctttcgaccagcaaacccgacccagtggttgaagaccaagcctaaacaatgcttccaccttgtgttctttttggattataatccttcatgagttaattttggttgaacctttggtagtatatgttgctggattgtgcaccttctgttttcatctcctcttccaaactactttatttttgcttatggatcttaatgttctagttttgcttttacttttgttgagaaaagttaatccagtggtgccaattttaattttcatcaatattctacctctacaagtttggtttatgatatagactttgtttgatataacatgttcaatagacgaaccattactgtgaagaacattcgatgacaggttctgattcttggaaagtaaagttaaagaatttcctgaaaatttccgaatgattcaaagtattgacttttttttaattggattgttctaacatagacaaaagagaaagactgagaatatagaagaagaaatcagtttgacatttcccacatatttgaaagctttcacggcttctgcgatatttcagctcatctaaatctgcagaatcctatttctttttttccttgagtttctctctctcgccggatataaaccctatttttggtcggaattgttgttcgaattcgaatggggactccggaatttccagatctggggaaacactgctccgtcgatgtttgcaagcaaatcgatttcttgcctttcacctgcgaccgttgcctacaggttcctttctccttctctccttctctccttctctctgtttatattcacatgcaaagactcgatttttatgttttcgcgaatggtgtttgactctgactgaatcctatatctctgggatcaacgataatcatgctgttacttattttctcgttggtttcgattttgtactttaggactaagaagaagattgaattgaagtctcgaatatcgaatttatcacttgaatccttttggttatcgttaggtgttaagttaactgacattttgagcttaattatcggtattttggtaaattccaatttcttcattcttgtctcagaaaaattctgctcgtaactaatgtgatgattcttgactgctttcttgattcaagagaacaatgattcgtgtctgctctcttggttcggttgtctgttctcatgtttctgctagatccattgactgttgacgatttgaattttgtttttgagttagcgctctggttttctctgaatctttagtgtcaaaatgtttccttggtttggaggaaaagtcttacattggaaatttttacaggtgttttgtttggatcatcgaagctatatgaaacatagttgtccaaaaggcgatagagaagatgtgactgtagttatctgcccactctgtgctaaaggagtccgattaaacccaaacgaagacccaaatataacatgggagaaacatgtcaataccgactgtgacccatcaaactacgaaaaagctacaaagaagaagaaatgtcccgttccaagatgcaaggagtacctaactttctccaacaccatcaagtgccgagattgcaatgtcgatcactgcttgaaacatcgttttggacctgatcacacttgccctggaccaagaaaactcccattcatgggtttcttgagtagtagtaccaccagaaaagaagctaagacaacaagacccaacaaagctcatccatcaacttcatcatcttcttcttcttcgagatggtctaatctcctatcttcagcagaagcaggaattagcaggctcggtaatgacattagccagaagctacagttttcgagcagcaaagataatggtatcgtggaggtgtgtccacagtgcggtgcgaaattctcttcggttacttctcttgtggaacatgtagagaaaacacatgagaggaacaagaagcagaatcatggcaatgtcacggtcgatgtctgccctagatgtagcagaggattccgcgatccagtagatcttgtgaaccatatcgaaagagatcaccgaggcacttcgaaagcataggaacatatgcgtttacaagccacacatcacaacataacttgtgaaaggtactcaaacatctttgtatttttcttttcatatttgtactggttttaaacaaccaaaaaaaatgtcacattctttgaaaagtcatggactcatgtccagaagtgtagccagaagtgtagtagactaatgttatcattatccttgggccttggcccttgggctttgggtgatatggttttttcaatgaacaatatgagaagaaattcaacggcgaccaatgtggttaagtccgttaaaaaataagggtaaaaccgtaaaaggttacaattggcgagttcgcgggaaattttaccctctttccgcggtaagaaaaaaaaaacagattgctgaccccacgtgaccgtcatgtgcagttaacgacgttaatgataagtggcagctaacttaacggtgcaataaaccttaaatcttaacgaattgaatgtttcagtactttttctcttaaattcaaaacgtggtcatgtcgaaagaattcgacttgatttcaccactagcatcctaatctaacatttagcctttataaaaaccaggttaaattgacttaagtgaagtgtgtatcagttctataagaaaagaaatcatagtcagggaattaaaaaattacatatctccaaataaaactttcttcttctagagtgtataatacacaattacacatcatgcacacacacaccgtgtgagtaagtaattaactaattatagaataatttaagagattatttgctttattagcagtgtatgagctggccaaaatgcaataactacctcagcaaatttcaacaaagcaggaaaaaaattaaaataatacgttatataatcaaagccgcttatattcgcatccgacggctgaggtttttatgtgaagaatgtttaagagtagttttaatatgaactaaaaataagaatgaagtagcaagcaacgaaacggcagaaggtggaacccgcgtcgtggccgttgaaacgtatctgaggaaggaaatattattatcagagctaaaagcttcgccggacgatccggcgactaaatcctactgagagaataatccggtctctcagagagagaaagggtttcgagttttctggtgtgtcgccgatcagttttcagttaccaactggcttatttgtgctttgatctgaggtaaattgatttttcttttgcagcattacgttgaaatcttctgatcaatctgggttttgttaaatcattgattcctcgggatgtgatgatttttttgggtaattcgttttcggcggaatttgactctggattatacaatgaattggtttcgttttgatcaacattacatcgtttttgaatttttttaaattttggatgtttcaggcgaaggtttgagttctaaggagtgtatcgtttaatcatcgagctctgttttccttctttcccgaggaagctctagggctttttcggtggatcaagagggagggagggaggattaacacgtaaataagatttaacaggaatttgcggaattttgattatatcagtgagtagaagaaatgagcgcagtctcgggtgtaatctcgaggcaagttttgcctgtttgtggtagcctttgtattctttgccctgcgcttcgtgcaaggtctagacagcctgtgaagaggtacaagaagctcattgctgagatttttcctcgtaatcaggttcgtatccagccattttcatctcccttctattagacttgtgttgacttgttacttcttgtagtctatgcaagttggattttgatttcctttgacaagttcatacttaaatctctttaattactgagggttatggttgatgactgacttacgttgccatgcttctggaagcacaaaattgttaaatcaaccactctgcaatctgtgtttggaatttttccagagtggcataaatttttggtttttaatcttctatgctttcccttgtctatattaaactttttcgatcttaggtactataatagaaaactggatgtccctctgggttatcttgttgggttggtttaacttatcaatgcttctgatttctggcaggaggaaggcataaatgatcgaaagataggaaaattatgtgagtatgctgcaaaaaacgctgtgcgtatgccaaaggtataatttattcagtgccaagtctagatattaagtcttacaaatcttgagctggcctggagtattagcaattccttgacatttggcatttctatgttcatatttgagtcagattactcgttatagcaatgttttcagtttgctttgttcccaaattttgttctctggtgttgaaatttaagtttttccagatatcagattccctggaacatagatgttacaaggaattgaggaatgagaatttccactcggcaaagatagccatgtgtatttacagaaggcttctggtcacttgtaaggagcaaatgtgaggtcatccttcttttgctttctttacaaacaattcatatgttctctcttatgtctaagatattttttggcttaacataagaacctaaggggttttacccaaaaactgtaacctatcatgggattgggatttgggagcaagagtattccgggcatagatgggtaggtaacttgattgtttttctttgttcttttttcagacctctattttctagtggtttcctaaggacggtgcaagctcttttggatcaaactcgacaagatgaaatgcaaatagttggatgtcagtctcttttcgaatttgtaattaatcaggtcagcttcttacatattcgatagaattctcttatagccacatgtcagggtgctatctgatagaatggttaaagacatatgaaataatgaaatagcctgattgattcatgtgaccaaatttttcagaaggatggcagttccctatttaacttggaaggctttctcccaaagctgtgccaattaggactggaaggtggggatgatgacaggtcgcggagcctgcgtgcagcgggacttcaagccctttcagcaatggtaatttagttttgttgttatgtttctgtagatactattcttcattattgtaaatctataattatcttctgatgcattctggtccgtttatctatttccagatttggctgatgggtgaatactctcatattcccagtgaatttgacaatgtaagtaactctccgggttcatgtactagtttcttatgttttcttcacaggttttattgggtttccgggttcctatatactctgatcttctatccttcatcgaaatcaattggtttgtggtatctaacaatagacaaagtgagaaacactctgttggagacaaagtgagaaacactctgttggatttcctttccaaaatttcttggccaaaggttaaaaataccagaacaatctaccactcgtggttacattgcatagaactgggagttgggattggatggctagaattgtaccttagtagagttttagccttttaggtagtacatgtgaatatatgttaacggatatattcaatacttgtatggcaggttgtctcagcagtcttggaaaattacggtcaccccaaaatattaacaaatgctaatgatagtggcagaaaatgggtggatgaagtattgaaaaacgaaggtcatgtagcttatgaagattccctcataaatgttccttcttggagaacggttgtgaatgacaagggtgaactaaatgtgaaaatgtaatctcttctctcgtaagttgtgtttacggttggccttttgggttcttttcttctttaatatatctttgttttacagggaagattccttggaccctagcttttggtctaaggtttgcctacacaacatggccaagctaggtgaagaggccacaacaatgagacgtatacttgagtctttgttccgtaactttgacgagggatgtctatggtcaacagaaaattcgattgcattccctgttttaagggatctgcagtttttaatggaaatatctggtattacgctcccgacagttttcattcagtccttccctcatgatcagtgttctaagatagttctgtatttttgcagggcaaagaacacactttctactttctatgttgattaaacaccttgaccataaaagtgtgcttaaacacccaagcatgcagctcaacattttagaggttacctcctccctttctgaaactgcaaaagttgagcactctgcaacgatagtcagcgcaataagcgatatcatgaggcacttgagaaaatgcatgcattcttctctagatgaagcaaatcttggaactgacgcagcaaactgtatcagaatggtcagtgtagctgttgataagtgcctcgtccaactaacgaaaaaggtatataccattctcagagcaagttcctcttcaatatattcttctctaaagagatgtgaggctgatctgtcaattttctaaggttggagatgctggcccaattctagatgctatggctttgatgttggagaatatctccgctgtcacagacgtagcaagaaccacaattgctgcagtttttcgcactgctcaaattatagcctctataccaaatctacaatatcaaaacaaggcaacctccctgtaacataaaatctgtctcttttctttgcgagattagaccaattttcatgaaattgctaagcttttattactcttttcgtttcaggcttttcccgaggccttgtttcatcagttacttcaagctatggtccatccagatcataaaacacggattggtgctcaccgtatattttctgttgtgctggtaccaacctcagtctgccctcgtccttcctcgaccactactgaccttaagaaaggaatgggtcttcctcgttcactttcaaggaccgcttctgtcttttcctcctcagcagccctattcgagaagctgaagaaggataaattttcatcgatgctgacttctgatcatagtcaaaacggaatgcctgaggaagaacgtggaagcagtacgggggaaatccttgacagattgaaatcttcataccgtcaggcatatagcacttggaatcaaccattgacctcggtagtagataactctgtggatcttttaaactctgagctggtacatccttgcaaccttctttgtgtgaaaaagcttactagaagagtagtacatttcttattgaccttaaatgggaccctagagttctatatatacgtaagtcagaaaatttcccaagtctctcaaaatagcttcaggatgggaccaacagtatatataataaatgaatacaaagtagcttcttgaaaccacaataaatttgtgtgtcctactaactacggttctaattatatacaaattcttgatttatgcttacaattcttaggtacaccttggatcaatcttcactctctaataatatttcttatatgctcctcaggatgttgttcatataagactaagtagtcaccagataggtcttttgctttcatcaatctgggcacagtccatatctcctgcaaatacaccagacaattatgaggcaattgctaacacctacagtcttgtattgttgttctctcgtgttaaggtaacatattcatacctcaatatctctgcatctgactgtttcttattgtttttatgatctatgagctaagtctcactagatctccgtatgaattatttgcttccaactttatgttaaacattcacaaaatttgaatctttcagaactcaagtcatgacgctttgattcgaagtttccaaatggcactttctttgcgagatatttcattgatggaaggaggtgagcttccacatgttttgattcctccctgctagatatttatccttggtttttggtttggaaaccctgatgtagactcttattgcaatttcctacgagacatatcatgtatgcagtaaatggccgtatagaaattatgtttaaaacgagggagagctatgtttgaacatcatctaaaagaaacttagtcattttgttcctactatttcaggaccacttcctccatctcgacgaaggtcactttttacactggctgcatcaatggttcttttttcctcaaaagcattcaatcttttttctctggcggattttacaaaagtaacacttcagggaccaagggtacgttgatcattctagtaaaatatcacgcaactcaatttgccaaaaaagactattatcgtgctcttgacagtcgccccagacttctatgttcaatattcctatgatagcctctatacacagagagaaatttacttaccatttttcattaacttcttcttttgcctgattcagcttgacccattcttgaacttggttgacgatcacaagttgaaggctgtaaattcagatcagctaaaagttgcttatggatgcgaaaaagatgatgcttcagctttagatactctttcaaacatagcactgtccactgagcatagcagaggaacccttgtctatgaaatcgtcaagagcttagaagatatgtgcaatgtaagtgttcccagtcacaacctcccaactaaattactctacccgagcttaccattcatattttgataaatcaattgatagacacagtagactaacaaaagttaaactgtttccagtctgaaatggacaaaatgcgagagcagttgctcacagaatttatgccagatgatgcatgtccacttggtacccggtttttagaagatacccacaaaacctatcagattgattctggtgatgttaaacctcgaaaggaggtaacttccttcttttgcttcccataatattctctgaaaacctcgagctgaacataagattgaaatatgttgcatctgtgtcttcaggacgcggaggatcaagagtttggagatggcaccgaaaccgttacaaagaacaatcatgtaacattttctgaaatcccagacctcctgaccgtcaatcaaattctagaatctgtaagttacatttttcagcttcctagaaactagattacaaagtcttcatcaaaagtaacagcacactataaactatacttattttgtattgtttgaaggtcgtagagacaacacgtcaagtgggtagaatttccttccatactgcagccgatgcttcatacaaagagatgacgctgcattgtgagaatctgttaatgggaaaacagcagaagatctcgagtcttttaaattctcagctacgacatgagagttctgttaactgctctccacgacaacatgatgaagagatcaagattgcatcttttcatcctatgatcaattcagcatttcatactggggtatgtatgccttcgctatgaattcctgtggatagcctccggtttcatattccaagataactgtttaaccatttttgtattgattactgaaatttgtttaggtcgaagtccctttactgtcgaaagaattcgacatgaaatcgccaagaacaccagtgggaactattcagtcaccgtgctatgcagaactacaaaataacccacaagcatttagactaccagcctcaagcccttacgacaacttccttaaagctgctggctgttgatcatcggcaggatccaaaccatgtttggctttgaattccagtcaagaactcaaacaaaacataacaaaaataggtttgcttggttttcaaagtcttgggttacgtttttatagattctttagcatcataaatcggaattatctccgtcgtgctataattagatcattcctcctaggtttttactcctatcttctcttttcacttattcttttgtccaattcttgtttctttttggtgtgatgtgtaaaaaattgaaagaggccatctggttttcacatggtattgtaatcttaagattctacaacagatgctttgttgaacagtttccctcaagatgtacattggttcttctatgatctaatttataatttgtgtcattggataagtaaatcaaccataagcggatcaattttatcataaaaacctatataatacacagaggagaagctcgcatatataggaatgcgttttcttttgtatatgaatgtcacaagaggaaactatatattcatttgctcatttgatttgcttaacctcttgaagcatttcaactactttcttcatctttggcctttttgcaggtgtgatgtctgtgcaaagcaatgcaactttcagagctgcaagcatctctctcctccaagcaaaagacacggtgctaagcttggcatcgagtatctgttccggtgtttctcctctcgctgaagctccatggacccatttcaccaaatctactccttcaccaaactcttcctccaccggcgctcttgaggttagaatctcaagcaacacaactccataactgtaaacattccccggagctgtaacttgcattgtgtatgcatactctgcagaaataaaccaagggaaagtgttggattttgtataaagttactggtaacaaaattaagactttatacctggtggaatgtagccaaaagagcctgcaactgagctaatactcgcggtgcctctagagggatctagaagtttcgatatttcgatttccccaagcacggctttgtaaccagagtctagcaagacgttgctagaggaaacgtcgaggtgaatgatggcgacttggtggagaaatgctaaaccttctgctgctccaacagctatggacagtctcattggccagtcaggttggtactctggtttcttggtggactcatgaatcagctgagttaagttaccattaggtaaatgctgatgcaacaagagagcaacgtcttcgtatataacaaaccctatcggtctaaccaaatggtcatggcaaagtttgctgagtctttcgagttctctgatcatcttgttctgatgatgagatatggctctatccatagacttgagtttcttcaccgaaacaatcatccccgaaggcataacggctttataaactgaactgaaagttcccgtactgagtttatttgactccttcatagttgctttcacaactgcatcaagatcaattccttgtttaagattttcaaggaagacatttcccgcgataattgctggttgctcatcctcaacattttcttcaacatcaacatttttagccgctgctttctcttgtttctccctcatcatgaagagaagaacaaccacagtgactgatacaaagacagctacaccagaaccaatcactgcgagcacaattctgtaggagactctgtgattatatctcaaatggtcaagatcttcagaatatccacaagaagagctcaatggtgctccacaaagctctttgtttcccaaaaagctcgaatttggagacttttgaaagggaacaaagactggcactggaccattcaaaaggttgtttgagaaattaacctcgatcaaactcatcataccttttagtagtggcggtatggatcctgtgagcaaattgttagagacatccaatgacacgagcttgtcgagttttcctaactcgggaggcaatgatccatgaagatggttgaaacttaagttgagtgctatctgcaaattcctcatgcgaccaatctcaggaggaatggttcccgtcaagtaatttcgacccagttggagctgaagtagcttcacacagtttccaatctcatgaggtatgtctcctcttatggaattttgatcaagaagtaaatactgtagccttggcatgctgcagagttcctttgggatggttccgttgagtctgttgttactcaaatcaagcttgtttaggtttccacttccaagaaacgacttagggatctccccaaagagactattacctgagagaatcagttcttgaagattaatgagctgaccaagctctgttggaatggttccagcgaacccattagctgccagattcagcagagtgagattagaacacttggagaactctgcaacaatctcacctgaaagattgttcttgtctgcttcaaagtaagtaagtccactaatgttcccgattgtcctcggaatgactcccacaagctcgttattcccaattctaatgctcgagaggccgctgcagattcctactgcttcagggagttcaccggtcaatctattctgtgtcaagaccaaaactttaagcttccctttctcaaaaatcccttttggaatcttcccctcaagttggtttgagtgaagattcaacaattccaactcagaaaccaaacctaacccattcggtatctcacccaccaaatcattctcataagctgtaaacaccctgagactgctcagattccctacccagtgaggtatagaaccatttaacccatttccagagacctgaaactcctctaacctctctagaaccttaagctcatcaggtatctctccaacaagcaagttattagaaatgttgaatgctctaagccctctaagcttaccaaactcaaccggaatcgctccaacaaaacgattcagagacaaatcaagaaactcaagctcagacaagttgccaaaagaagtaggaattcgtccattgaagttgttaccagaaagatctagatgctttaagcttctgaggtcagagattagagtaacattacctctaagctgaagccctgagagatcaagcatttcaacaaaagagttgttgacaccacacttaagcccaacccaagtacaatagtcagtgccattactactccatcctggaactccaagctctctattaatcgcaaccaatgtggcttcatcgcttagttgagcttcacaaagctcagattttgataagaacccaacaatcagaagaattgacatacaccaaaatgtcatttttaagaattgaatcaatcacacactcttgttcttcttcttctttcccccaaatacaaaattatcattgaatttttaagccaaatgaaacaagaaagtgagagaggaaaagaaaagtaatgctctttttgccatgaatccaggattaaagctctggtttttcaagtcaaaataactgtttctgaagaaaaagaagaagaaagacgagtgctttagagtgtgagtgtggcttagagagagagcaaagcccataaatttagggagaaaaaaacatgagagaacaaagagaagagagcaaggaaaattcgatcaaagagtagtagggtctctgcttataagagagaagaggaaattgcattttttttagtatatcacgaaattatgattgcagaaccaaacaaagatcctctcacttcacacacagacagagagagagaagagagagactccacaaagcaaacgcacttggaaaggagggaattttttttttcttttcttttaatgtaattaatttctgatacaaaaaagtttaattttcttcacgagacagtgcaagtgatgaatgaatgaaagctgcataaatctttctgacacattttttctgcttttgttttttggaagaaaaaaaaaagattttaatgaaaatgaagagtgtacgttttttgataattcttttcctctgacgttttttctgtaccatactgattgatactgtcacaatgttcaataccaaagaggtaaaagattgtttccaaatctatcttttttatttttttaccttcttttaaaatcaaaatttacacacactttgcagttatcatttgtggtataatgacatttttcttattcgtagggactaggttatatttgtagcctacatgttttctctttgatctatatttgacaatagggaatctactctcgtgtggtgatttttgatgattactttaaacacgatccatgtttgatgtataccaaattttgacgacatttatgtcaagaatataagattatagaatcacacgaggtggaagattattactattattattcgtctgcgacgatagtcaggaaacactgtgtgttaatatcaatagatatgattgatttccgagtttcaaaatacacgtaaatttttgttgtaagatgctcaatataacaatacgtaaacaacgatttgtcaaatcttgaatgttggtagaagacatgttttctcagatgtctgcctcaaacagcgagattagtatcttttgattttgtgataattgttataaataaaacataccaacaatttattaaatagctatgtcttaagctgcttccgatactcctacgcgacccaaaacattgaaaagatgtcggatagatcatatatgagttgagctaaactgtgttcatattctcattggtgtgtactttaagctagatgatggtcgtaaactcacatacaaataattgttgtttatattacaccattttcctctttcctctaactattacctgatacagatgacataattaagtatagtactaaaaggtaaaatactgaaaacgagtttgatttaatttgcacaattgtaaactagaaagaaagattcaaagtatgcaacagtcaagcaaattcatacaattatactcaaatatccgatagtcattaacattccagaaaaaaataaaaaattaagaacatgagtttgggtttcgagaaatactagatatactagttagctcttaatttatgtttctaagaaattgttggtaaatgttttaaaaaaaatatatcataatgaaacaaaatcataaacaaagctccgttttatcaacatattcctttatgctgcaaagagtttgtatatttatgtttatttttgaaaatatagattgagaataatagaatgaggaagagtggggttcactcacgggatggggtaaaagaaaaaggaatgtggctctttacggttaggcaaattgtaggacccttctttgtctgctccgaccaccaccactcaccacctccgtcccatcgtttttttcctcttcttgaaacctaattgcctaattaagtatatataaataacaccaccaattaagcaagttttattctattaatactataaaaaactttattacatagttacatttcttttcacgtgagttttcacaactcatgatactatcaacaagacgttgaacttcttcttgttttggtagtacaactgaagttttagctacaacaaaaaataaatccatgaattgacgaaagtacgactgaatttttctatgaattgatttttaattatgcatatacattttttcagttgattagttttatgcttttcaagcaatctatttttttcacaaataggcgaatgagttaaagacgaatcataagaagagcaacaagaaaaagagaagacataatgatggaagcacctcgtcgctttaaactcgtgaagaaggggagataagaagtgtagttaattgttttaaattttcaataattaacattgttagagaaaatgttaaccaatgattacaatgaaaacttagtcattagcttatggatgctttacctatcaaactgactttctgcgtaatcatttgtgaatattcatgaatatgctttcgaactcttgaaacgaagattatgccgagatttatgctctcatcattaaggatttgtgggatgtcgtaccaaaaactattattctcatttattagtagcactacttctttaggctcaccaaccgtacgatctaattagtgttttgggggaaatgttcatctttttaaactcattttgtaaccatgaattcctgaaaccttcctttttattcatatgtataaatataatataatttattaaaagtataatattatacaattggaacttatggacttatgtgtgagttttaactatttaagccatattttgattaatatcgaataatataagattatcatggttgattccacaattaccaaaacgtaaagttgttaattagcctccctaaaattcctaagatttttctactagtgaaggaggaatataaaatttaaaaacaaagaggaaatgtcaaaaggacatgactcggctgtccatcttgtagtgataccaaatggggcatgtggaaggttgaaagaaagctatccccactttttgttgattattttcatcatttttttctatttgttttctattagcttttcaaaagaaagtgattagaaaatttcatagaaatatgtttttggcagtaatattgattgagacttagttctccctttatcggacacatatcatgacctttggatcatggtctgtccctcttcttttacgcattcatcgacatttctttgttttcctatcacttttcaacattaattccataataatgaaaaaacaacaaatcctattttttcaaacttgttgaatcaaagggtcctgaatttacataaaaaaacgtttcaagaaaacaacttcaaatcgaaacggaacggagttcgtatgttgggcctaaatgggctgggctactgtaaagattttacacggtgtcattttcagaagattggattcgaaaaactcacatctacaccgttacaaagtcgctactcactaccttcattttcctttagtttcatttttgggtctttttctttttacataaatcctctcaaggctttcgatgtttaataaaaacaacttatagtatgtgaaacagagaaacacaagtaattagtggaagagaacggagggaaagcactgtaatgagaaaagctggaaccgttcagctagattaggtttatggaaggcttcaagtgtggaaaggagatctaggaaaaaaaagaataaccattcgttttagacactgggatcttattttccaaaataaactgcgggaccaacaccaactggatcatggatgtgtataaataagatccccaacaacgtttcatttcctcttcttcctctttcagtcaaaacctaaacaccaatcccaatttggtacgtgacaaattaagttatatttcagtttggtgtatatgcttcatactttcttttttcttggaataattcgtcttccacatggatccttcgtctgttgacgattatacggataagaaagatcgctgactttttcaaatccacatgatgggatccagatccatagttccgtatgttataagatgtaatcgttgattaatacatgaacatgggaagacagccgaaagttgacaaattaaaaaggagtaaaaaaatagatgagatcggaattaaaaaaaactctagctggtttagtgcgcactgcaggagtcatagatatctttaaaagttatcatatttgatatgatctaatctcacccgaaccgaaatcgatcatacaatgacaatgatacaaaaattcactagaagaaccatctctcttcttgttatatatcctctttttcttcatatacgtttcatctatttcctcattagttgcccaaattaatacttttaattttactaattggtcgtcaactatataatcccgaaaagcaaccttttcttacgactttcttaaccaattaaaaacacaaatcccagtaatatttatatagaatgaatgaatcaacactcgtaagaataagatagtaatttatatcgatattactaactgcagtctctatacactctacaaagtataactgaatcgctgtacagaaaaagttggttcgaggcttttttttttcctgacatcaaagttagttagagctagagacgctataaaattaatataaaagttggttcaaactacctttaccaggaaaaagtttttatttatataatttgcgaaacgcagaaatatgatttttctgaaatacattgtacccaaaaggacagaggagcacacgcagcacacatacacacgtacatgtattatacatacgttgtcgagattgtctaatattattatatcaattcaagaatctagttactttggactttggatgcatatttggtttccagtatttgactcggagcgcaaatctcgccgatgaaccgacacatagcattcgtatacaaacacatgtaattaatgatgtaactagttgctcatttttataaattaataatcccaaaaactagtcgataacatgtaaactgtaaaccgataagttatctatattttgcttaagattcaacttatattaatacagaaaatcgcatttttagtcagatttagaatgtgtttaacaatcaaattcttgtatggttcatatgagcaaatatagctaacagtctaaaacagaacaaatatatagaactaaacagtcggtatttatgtacgtacacatacatctataatcctataatcattgactctttttttggtttggttagcaacctataatctttgactttttgatcgcctaaaaatattagtttaaacaggtattaacgttggctacgtaatcagtaaacttacaaaatgatatcaatgatatttatttagttgtcaaaatttgacgataaaacaaattgaaagtgggttgatgaataacatgaacggacagtacggccacaccacaaacattgcggctcattttatggagatattcaacgtgctcctacttatctatgctattatcaccttcgtattaatacgtacggtgcatcgccgtattaacattaatatatttcttccaccattaatcattttatattttgaataatttctaaaaacaacgtaaaattattgatacgtaggtcggctatatatagcttgtaggaacttgtgcatatatcacaaccctcttatcttatgtatactcttttattagagacaattgatagatttgtttttcagtgtcacttggcctaaaagctcacaatgtctctcgttctctctctttgcttggtcttcctttgttctcttgttcatggttctcatagcttaccagcacaacggactcctcatcttgatggtaagacagtaagactatacgttagttaagtactgcaaaaattatcatataatggtcgatgttatatatatttgaattatttagtatgttatgttaattgagctatccatataaaagttatgatagcagaagaagaaaatagtttcccagttttggaattgacgtgctgtcaaattaattgggaacatgaataaataattaaatagcgttattttaaatttcagtaagaaaaattattttgcatttcataaggccagtgtgttcttaattctaatttaatttcagtaacacatgtcacatgaagggtgaaactaatacaaagaactaaactataagctccgatctttttagtttaattaacgatgataaattgttgtttacgctgatatattatagttttcatcgtagaactaaatgtaaaatttcgctttttatgtttacgtgtagggcttctcccaaatgggaactttgagcaaattcctaacaaatcaaacatgagaaagaggcaaataattggcaaatactctcttccacattgggaaatctccggccacgtagagctagtctctggcggtccacagcccggtggtttttacttcgcagtgccacgtggagtccacgcagctaggctagggaacttagcatcaatatctcagtatgtgaaagtgaaaagcggcttggtctattctctaacgtttggtgtcacgaggacttgtgctcaagacgagaacatcagaatctctgtgcctggtcagaccaatgagctaccaatccaaacattgttcagtaccaacggtggtgatacgtacgcatgggcttttaaggcaacgtctgacttggttaaggtcactttttataatcctggtgttcaagaagaccctacttgtggcccaatcgttgacgctgttgccattaaggagattcttcctctccggtataccaaaggtaacaactttcaattccggttcggtattggtcgtgtctcattccacattccggtttgactttattttagaatattaaccgattcacatacaaatcttgaaatctaccacacaatggcttagtatataggtttcatttccggtttggattcatttcttttatattttaaccgggttaaattggatttctggtttttgaagagtaaattcaatttaaccaaaacttccacataccagtttggttttgcaatttggtccttatcttttcatattattttctctttcgcccctaacttttaatttgtttacgtaaaaatcaaccagggaaccttgtgaaaaacggcggatttgagaccggtccacacgtattcagcaacttctctaccggaattttaattccggcgaagatacaagacctaatctcaccgcttccgggatggatcgtcgaatctctaaaaccggttaagtacatcgataaccgccacttcaaggttccctcaggtctcgcagcaatcgagcttgttgccggaagagaaagcgcaatcgctcagatcatccgtaccgtctccggtaaaaactacattctctcgtttgttgtgggagacgcacacaatggttgtcacggatcgatgatggtggaggcgtttgcgggaatatcggcgtttaaggttacattcgaatctaatgataaaggagcgttcaaagtggggcgtttcgcgtttcgtgccgattcgaatcgcacaaggataactttctatagtgggttttatcataccaagcttcatgattttggacatctttgtgggcctgtgcttgataatgttagtgtttttttggcccattaaattattacaaaagtaaaataaatattgttcgatttcaattatataattttctatacttctgtaaaaaggtcgttaagaaactgatattcaaaaaatatcgatattcatatttcttgatccaaaaaatattgcattgtatttatatatatctaatatactgagtgacaaaaaaaaatagtatattacactgaacaatgggattttaaatctgtggatctgtagatcagatataaaagattacataccaaaacgtcatagcctaaaagaaaatcagattcaaaatcacaactaatattcaatctatttttatttgtggacgtaaatttgacttaaagagcaaatcatggcgatgattatgagcggagaccatatatggacttctggaactccgcttaacatatctctcgtgtacacacatgcgcatttaattataaatcttattgacacaaatttctttgttttaacgttttttttctttgtaagttaaacgtaaagctttattaaacaaagaacaaatactacgtagattgcggagaaaagaaccaaaaagttgattatgttttgcttacatataaactcagtgaatgcaattagatgaacacagacgattagctaggtttcgtcattgtaatttataaattcatgttggtgcttgcatctactctaaaatttgatgaattcagcgccagttaataaatattatgctccatagattggcttttttcgcccactttggtgagtgcaacttttccgatagtaattttatcaaaaagaaaagaaaaggcacaacaattcctttattttgttaattaaagggaaaaattggctagacgacaattcatttaacatgttgagatttttttttgtcatcgatcgacggttggacttggagttcatttaatgtcttgattatatttttcacagcagcatcgctcgtgatatgtttgaatcacaccatgcacatgttaggattcgtgcttggaaggttcgttgcatatttttcagcgtctgatagctcactgcacacaaagtcacaaagcacaagacacgtatttttaattattcttttggtaaagtgtaaattagtaattttccatcgtttaatacaaaaccgaagtaacatgacagacagtgagtcatacattgcggctcgtaaggtgcggtctttaacgtggttcgagtttcccttcgtatacttctacacggaaactttctctcataaacaatttttttgccgacaatttagttttgttgttgtatatttccaaaaatgtacatgctgctgcttcctctttgtttcttatttataatatctcatgtcaagtgataactgataagtataaaacctcctatatatagcccacaaggtcctcattgatataggcgaactaattaataagactttaaaatgtctctctatcactctcttagcattttcctcctcctatctctctgccatggctcttacagtcttcaaccacgtcgagttcctcatctagacggtaagacaatcaacatgaagttataatattcatttctatatcaattaatttgataaactaattaaacatgacgttgtaatattcatggtttccatatctatagggattctcccaaatggaaacttcgagataacccctctcaaatcaaacatgaagggtcgacaaataatcggggctaactctcttcctcattgggaaatcgccgggcacgtggagctagtctccggtggacctcagcctggaggattctatttccccgttccacgtggagtccacgcggttagactcggaaacttgggcaccatctctcagaacgtgagggtgaagagtggtttggtctactctctaacgttcggagctacgaggacttgtgctcaggatgagaacatcaaagtctctgtgcctggtcaggccaatgagcttccgctccagaccgtctttagctccgacggtggagacacttacgcttgggctttcaaggcaacttctgatgtggttaaggtcactttccataaccctggtgttcaagaagaccgcacgtgtggacctctcttagatgttgtcgcaatcaaggagattcttcctctccggtataccagaggtaaatcaattaacatatccggtttagttaatgtaatatattttgagcttttgcagtttgatccttatactttagctatgtgtttatgcttagcctgtaacattgttttgttctcttaggaaacttggtgaaaaatggaggattcgagatcggtccacatgttttcgctaatttctcaaccggaatcttgattccagcaagaatccaagacttcatctctcctcttccgggatggatcgtcgaatcccttaaaccagtgaagtatatcgatagacgtcatttcaaagttccttatggacaaggggccgtcgagctagttgccggaagagaaagcgcaatagctcagatcatccgaaccatcgctggtaaagcctatatgctctcattcgcggttggtgatgcacaaaacggttgccacgggtcgatgatggtggaagcgttcgcaggaagagaaccgtttaagctttcttttatgtcagaaggtaaaggagcgttcaaaacagggcattttaggtttgttgctgattcggatcgaacgaggctaacgttttatagtgcgttttatcatacaaagcttcatgacttcggccatctttgtgggcctgttcttgatagcgttgttgttaccctggcccgttaacaatttgtggcttttaattcttattagactgaatattcgaaacactatactctattcgtaacgaatttgtggttgcactacattttgttgtttcttgtcattagtcttgtcactcataccagtgatgcagaaaatatttataatatgtatggaaactttgtggaaattaaactaaaattaaaaagaatggtgagatagatttcaatttaataataatttacatctttcatccatataatgtatattgctaaaatatgatgtattcaaagtgaattctgaatctctgatataagaacatagaaattcaaaattttacaaagaccagtttacatggtcaactagaattaataagacttcttctatagctcatgggatatattcattatacaaatgacgtggctaaatctataccgtagataatattcagacgtagacgttagcacagtagataaattcctgtcctctgtatcttctctgagctgagaaaagaaaaaacagacgccggagaagagataaagaggtaagaagacccaccgaagacgaaacgtaatcgaacaaagatggccgtcgagaaatcgaacacgacggtgggaggtgttgaaatactgaagccacgtacggataacagagaatatcggatgattgtccttaagaacttgctccaggtcctgttgatcagcgatcccgataccgataaggtttgagatcgctacgatttggtttctgatattgattcctttgattttggattatcgcttactgattcgtaaagtttgattcttttcttcaagtgtgctgcttcaatgagcgttagtgttggatccttctctgacccacagggattagaaggccttgctcatttccttggtacgttgaattcttcaggattttggaatttgccatggaatgattcaaccagtgtgctatatttcattgattaaagcgagtttcaatatggagtggctttgttataacgttgtactattgttttttggttgttagagcatatgctattttatgcaagtgagaagtatccggaggaagatagttactccaagtatatcacagaggtaatatatattcttacactctcctcgaatatgaactcaagtatactcgaagttgttcttgataccactcgatagaaaattttgaagaatatggaatttttttggtgtagcatggaggcagtacaaatgcttatacagcctctgaagagacaaattaccatttcgatgttaatgctgactgtttcgatgaggctctggacaggtacagttggtgttttcgtactcttgctaactaatcttctctaatcttttaccatttttttgcctgtgtaagattttattttgctgcttttaaatcagatttgctcagttctttatcaaaccactaatgtcagctgatgctactatgagagagattaaggctgttgactcaggttcgctcgcttttgttttccttacgtttttcttgctgcagtttgtgagctataaacaggttataacgagttttcttttatccagagaatcagaaaaacttactctcagatggttggcgaatccgacaggtatagctctgatctaaagaacaattatcagagttatttgtatgtataggactcattttctcatttttctggtaacagttacagaagcatcttagcaaagaagaccatccgtatcacaaatttagcacaggtctatgttctctctttattactgttattgcttttgactgccattgatgaaatgagatttattctgatgaatatgaatagtcagttgtgattcccaatattttctcaagctgaataagtgaggtttgtgcttagggaacatggatacacttcatgtacgaccccaagcgaaaggagtggatacaaggagtgagcttattaaattctatgaggaacactattctgccaacatcatgcatctggttgtatatgggaagggtatgttttggtgctaacacgaaactcaattgttttttttttaatggagataatgatgtttaaataggtaacatctttgctatttctctgcatgtcttcagaaagccttgataaaatccaagatcttgtggaaaggatgttccaggaaatccaaaacaccaacaaagttgtccctagatttcctggccaaccatgtactgctgaccatttgcaggtttttttctttccgcatatttagaatatttttacatgaagtgtatcatgctagaatgattatgatgtcgtatttttggtgatgttgtattactttggttttagattcttgtgaaggctattcctataaagcaaggacacaagctgggtgtttcatggcctgtaactcctagcattcatcattatgacgaagcaccaagccagtaccttggccatctaattggccatgagggcgaaggaagtttgtttcatgccttaaaaacgttgggtatgttttctatgggcacacaccaagttcgatcttcagtctccttctcttacactcttgaaatctgacaaaactcttttgaggttccctaaaatgatttatatattcttcagaaactacacctcttttttgtttcaggcgttggtggtatagataaaatattttggtatcttgacatggagtatagcctagggtgccctaaccaatttttaatagagtaggataggagaattttatagaatcattgtagaaagtgggcgtctttgtcttctagaggttccattctagtcatgtaaacaaacttattggatgggacaggttgctgatgtcattcatgtatgaaacatgctcgattacaacatttagtagtctggcttatttcttcttattacttgcaggttgggcaacgggactgtctgctggtgaaggagagtggactctagattattctttcttcaaggtttcgattgatcttaccgatgctggccatggtgggtttctctattatatttttattttcattctaagaagttcacaacagtctttcttgtgttgactagagagtatgggtgtgtttggtgttttgtaactattaaattcatgggttttctccttggtgggtttacagagcatatgcaagagattttggggttgctgttcaactacattcagctattacaacagactggtgtttgccagtggatttttgatgaggtatagatacattaacttgtacggctcattctaatgtatttccactgatatgctaagattgtagtttcccttttttcttcattttttgaccttgtgacttttatattgctaatacattgtttattgttattgaagctctcagctatttgtgagacgaaatttcattatcaagacaaaataccaccaatgtcctatatagtggatattgcatcaaacatgcaggtaataatttagctctttctctttttacctaagctttatttttttatacatgcttacatctgttactatgtcatcaatcattccttcaataaatcttgcatataaagttatgcaatgtgattaaagttttgtaatttatatctttaaagcgcaaacctaagctcacggctaagaaataatagttcttttaatatcttctgtatactttgcaattactcttcagatatatccgaccaaggattggctggttggatcatcactacctactaaatttaatccagctattgtacaaaaggttgtagatgagctttctcctagtaattttcggtaagtctgtggttttaagagttttactttgcatacataaaacttatgggtagctgcctattgtacactaaacttataatgaaatcattggttttcgcctaagctaattttactttttttttttttttttttttttttttttttttgggcaaatggcaaattttacatctgttccatttattctgaaaataactgaggatcgcattagagtattttattgctattgatatatgatggctaatttatgtactattcccattagcttttctgcagtttactttcaccatttctggcatgttatcaaagtttacttgttaaagcactgatatttagacacagctcggacttgtttccaaagaatcttgataatgccattgcttttgtagaattttttgggaatcacagaaatttgaaggacaaactgacaaggctgagccatggtataacactgcctattctcttgagaagataaccagctccaccattcaggttcactttttgatatgttatattagctcgaaatgattcgtttattttctatgcgtctactacctccgcttcaattttgtttccttaatatctttttgtgtttatgtaaaataattacaggaatgggtgcagtccgcgcctgatgtacatctgcatttacctgcgcctaatgtctttattcctacggatttgtcattaaaggatgctgacgacaaggttcaatttcacggcataaattagaagattttttaaccttattaatgtatgaagcgggcatcttatatgatcaagtactggaacaggaaaccgttccagttttgttgagaaagacacctttctcaagattgtggtacaagccagatacaatgttctctaaaccaaaggcatatgttaagatggatttcaactgcccacttgcagtcagctctcctgacgcggcagttcttactgatatttttacacgattgctgatggactatttgaatgaatacggtaagatttggtcgatacatctctcagtattttccatttaactaggtgttttatctaggctttagttcagagaactctgttctaattaagtggaaccgatcttctgaaattggtaaatttgtccagtaagcaccaaacttgtcttatgaatttttatttatttattacatgctgttgattgagcatttcttgtagcttttgacaacgtcttcactgctttctagttttcggctctgttttgcagcttcgttgtatgtctcgaagacaaatgaaaaatagtataaataagtaaaataaaatgtttgagtaaagacacaaatcttctattttgataaatctttcccatcactctttacttcttctatgctgtagcttattatgcacaagttgctggtctttactatggagtgagcctttcggacaatggtttcgaggtgagtttgacattgacctcatctccactacacacattttctcatcttttactgaatgctttttctcttattttttgtgactacctgtttttgttcctagttgacccttcttggttataatcacaaattgaggatcttgctggaaactgttgttggaaagatagcaaattttgaggttaaacctgacagatttgctgttatcaaggtaaccatgtcagacttcgtctctttttagaacttcacttaatggttgaacgacgtcctctgtaccagaataattgaatctgtgttattctgtttccgaatcttttacaaggaaactgtcacaaaggagtatcaaaattacaaatttcggcagccatatcaccaagcaatgtattactgctcactgatattacaagatcaaacctggccttggacggaggaactggatgtcctttctcatttggaagctgaagacgtagctaagtttgttccaatgttgttatcaaggacatttattgagtgttatatagcaggtatcaacattttgtgtttatttatttattttgcatgatcttttttggctgtgatgttttctgttcttttctatgtcttcttctttttccggaagctgaatacttacatatttcatatcaggtaatgtggagaataatgaagctgagtcaatggtcaaacatattgaagatgttctttttaacgatccaaaaccgatttgccgacctttgttcccgtcccagcacctcactaatagggttgtcaagctcggagaaggaatgaagtatttctaccaccaagatggctctaaccccagtgatgaaaattctgctctggtgcactatattcaggtaattccttattcgtaattccttattcagattaagaggtagctttgaaatttcttcttggcatctaccaatttttacttcttctttggagtttctttgtgtagatctcggtatcatcttagaacatatttccagagatcatattgttttgtctaactgtaactttggttgccacaaacaggttcatagagatgacttttccatgaatattaaacttcagctattcggtctcgttgcaaagcaagccacctttcaccaacttagaacagtcgagcaacttggttatattactgcacttgctcagaggtacattggaattttccttgtgtttcttaaatagtcccctgaattctgtttaactgcgcttttttgcaacttaggaacgattctggcatctatggtgtacagttcattatccagtcctcggttaaggtaccaaaccatccagccatctcagtcattttttctaattaaggctcatctccttaaattccttgaggtttaatctttaatagggtcctggacatattgattcgagggtggagtcattactgaagaactttgagagtaaactttacgagatgagtaatgaagatttcaaggtaagacggatcaaccaatttattatatatctcatttgatctagctatgcaatatggtcctcatccggagctatttaactgatatgagttactcttcctctagagcaatgtaacagctttaatagacatgaagcttgaaaaacacaagaacttaaaggaggaatcccggttttactggcgagagattcaaagtggaacactcaaattcaaccgtaaagaggcagaggtacatggaacagcttctttttccttctatattttctcataaactaagaaaaccgcctcccgaatgcatgacccatgcatatatacttcctcgaatagttgtatcacttgtacgattaaatacaagttggtatgatggtgttgaaagtgactgatcgatgagagaatggggttgcaggtttctgcgttgaagcagcttcaaaagcaagagttgatagatttcttcgacgaatacattaaggttggagcagcacggaagaaatcgctgagcataagagtatacgggagccagcatttgaaggagatggcaagcgacaaagacgaagtcccatcaccgtctgttgagatcgaagacattgttggtttcagaaagtcccaacctcttcatgggtcgttcaggggatgcggacaacccaaactgtgagggctgaatgaaactcacttctttattatacaaagacaaaattgtttttcgtttgtcctttttctggttgtaataacaatatttaggtgaaccttaaattgttagaaaacagagtttgaatcatcaaagagaaaaacattgattactacgcatttcgctatatgaggctgtacctaagttaatcgctaagcaacccttgttcctcaattaataacataaatcacaaactctcaagcaccagctttgttttccatgcaatcgagttaaagcagagagaagcatagtaaaagataacaatccatttgatggatagagttgtccagaaatgcttgtgtttgtggtttatattcagacatggtgcatatacaaaggcggtactgtcttccaccccctccagatacttgttgttgctgcatgtgatcagttaaacgagatcatcagtgttttgtttcattttggttgttcgatctgaattcaatctttgctttacaggattgttggtgtagtgttcataacgctggagctctacttagttcactaagaaaacttgaggaacactcaagacgataaaactgaatcaagccgaatcctttgatatggaaaaactcgagcaaccttgatgaattccgaatcaaagctatgaatactaagaagagaagagatattctcttttaatggtatttcttattattaaaatctataactcccacgaagataagaggaaacacaagtccttatttgaaagcaaaatgaaaaagaaagagggctttaattagacttgttgaaactttggatcaggactccgtttaagaatataagaatacactgactaaaacacttagtcgtgaatggaaacgtaagagaaaagtaatcttcaatgtcagatataggagtaggaccaaggcttagatactaagcggggtgatctctatcgcggatctccttgacaatcttagatatgatgttcttgatggcgagcttgtgatcctcgctaaaagaagttggctgtggaacattactcattattacactcgcctccgaacccatcccctccaggtcaaccatctcagatctgctggctttcttgacggcgagacggtgatcctcgttaaacataagctgctgatcatgattcatgattatcttaccgctggccttccggtcaaccatctcagatctggtggcttccttggcgagagcgagacggtgatcctcctgcttccgcctgttttccataaacaaaagcagttgctccttattcatgacaatcttaccacccgccgtcttgtcgtccatcgagatcggattcgggtttcaagtagaagggaatccctagggctgtttcggttgcacacggactcaaccctaataataaagaatttagtatataccttttacgaatgggccccaaagaaaaacaaaacccactaatttttagctcctctccgaaagtgacattgatctattcagtttttggaactgttactgcgaataaatgataaacttgatttgtgttgtgtatatatcataatcagcccatttatgatccgctactattttgtcgtttttttttcttaaacctcaagcaaagtcttggagtttgatctttggggatcttgatggtgtttctccagcagcatcggaacgatacctctaggcttggaatttgaatcaatccaaagtgtttgattttgactttcttgaagatgatttcagagagatgataatgagatcatttcgccaagattttttttttgcttcttagggttatactagaggatcactaacgcaggctttgtggatctcgttggtccatttctattcactctatgcataaaagctgtgttgattttttgtttgatacgaacattttcgtattatatgatgtttataattagttatagtggaaattcgttagtagatcaaattctataataatttcatcctcgtatcctttttttatttttatttactatttgcctatttctatagtaagtaaatagtatttatttgtcgggtaaagtaaacgtattaaacatttccgtataagaaaatgcatttttaataatatttaaggctttgcttcatgcggtggctttgcgtgggtcctacagagaatacagcaagcaagaattactgtttagttgtctctttggttggtttggtgattaaagaagaaaagaacccaaagttttgcaattgcattgaccttacagctcacagagactctcagacttggctttcctatcaaagctcttttacatttgcattcaagcttaagcaacgtcaattccaactacaacaaccgcattactttcacttgcaaacaaaacacgaatccaaaacttccatttttgttcacaaatctcagcttcttctgattcaaaaagttttgagctttattgatccaatgttggttcaggatcgtgcggcgccttctcctgccaagccgccgaaatctcagatcagagaactacctactcatcaacagatccgacgacgattcagtgaacccaaaaacttagatttctcgacttggttctctgagaatctctctagaattgctgtcttctctctcttaatcgtcaccatagtagctttcttcttcctctacaacaccaccgacactgcttctctcctttgtttccagtctcagtcaactcaatttcttcaatctctctctcgccctcaaatcaaatggaattcgatcccagtcgtccctgataaaacctccccgtacgctaatttccagacagagaaatggattgttgtgtcggttaccaagtacccaactgaggagctcaagagcttggtgaagattcgtggatggcaggttctagctattggaaactcggcgacacccaaggattggagtcttaaaggttccatctttttgtctctcgatgctcaagctgaattgggttatcgagttttagatcacttgccttatgattctttcgtaaggaagagtgttggttacttgttcgcgatccagcacggtgcgaagaagatctatgatgctgatgatcgtggtgaagtgattgatggagatctaggcaagcattttgatgttgagttagttggtctagattctaagcaagaaccgattttgcagtatagtcatgagaaccccaataggactgtggttaatccttatattcatttcgggcaacgttccgtttggcctagaggtttgccattagagaatgtaggtgagatcaatcatgaggagtattacactgaggtttttggtggtaagcagtttatacagcaagggatttctaacggtttaccggatgttgattcggtgttttacttcactaggaagacgactttagaagcttttgatattaggttcgatgagcattctcctaaagttgctttacctcaaggtgtgatggtgccggttaattcgtttaacactctttaccattcgtcagccttttgggggttaatgcttcctgtttcggttagttccatggcttctgatgtgctgagaggttactggggacaaaggcttttgtgggagcttggtggttatgttgctgtttatccacctacagctcaccggtttgatagaatcgaggcttacccttttgtagaggagaaggatcttcatgttaatgttggtcgtttgatcaagttcttacttgcttggagatcagagaagcatagtttctttgagacggtccttgatttgagctttgctatggctgaagaagggttttggacagaacaggatttgaaattcacagctgcttggcttcaggatttgattgctgttgggtaccaacaaccgagattgatgtcgctggaattggatcgcccgcgagcaagtatcggtcatggagatagaaaagagtttgttccaaggaagttaccttcggttcatctcggggttgaggagactggcacagtgagcactgaaatagggaacttgattaggtggaggaagaattttgggaatgttgtgctggttatgttttgtaacggtcccgttgaacgtaccgcactcgagtggaggttactttatggccggatattcaaaactgttgtgatactttcttctcagaagaactcagatctctatgtagaagaagccaaactcgatcacatttacaagtatgaatattctcaagattactatgtatatgttgtttaaagttcatgcttctaacggtaagtttgtatgtatatttcaggcatctaccaaagatatttgatcgatacagcagcgcagaaggatttttgtttgttgaagatgatacagttctcaattactggaatctacttcaagctgacaaatctaagatttggactacagacaaggtacaacattttcatcaatattttcagcttctctttgttctactatcttgatatgtgtatctgacaaggaaacgtcttgttgtaaactggtgatttaggtatcaaagtcttggacatcagtgaaaccgaccgggaactctgattggttttctgtacaagcagagttagtgaagaaaactgtaagtacaatgccagctcatttccaagttaactacaaggacgccaccaagaacaatcatgagaccttaacagtatgcagttcagaggtattctatgtgcctaaaagactggtaactgactttatcgatcttgttgatctcgtgggcgatatggacttgcattacaaagtggctgtgccaatgttcttcttgtctatggattcgcctcagaattttgacccggttctcggttcaatggtatataagaggaaatcagcttcgtttaacacttcttcgagtctgtattctgctaaagcacctgcggttcacccgtggagcatatcaagcgaacaagatttcatcaaattggttcagcaaatggctgagggcgacccgcttctgatggagttggtatgatggactcagggtatagagcttgcagtaatgcaatgatagaaacagagttatacaaaaattgtgtttttgattcttttcttattggttcccttttcagaatttttttcttctgggggttgtgaagaaagtcatgtaatgttccattgtaaccatacgttttgtgagtgtatgatatttccccatctaaaatcagtctctgcttcatcaataaagacaaaaagacaactgaaaacatgcctgaatatacaagtaatgacacagttttgatcccataagaaaaagacattggaatgctaaggaagcttggtgaagagatcctgaagctgagtgtggctcaccacaacaccaagtttctgtgaaattgctgctgtcactgtttcgggatccaagcttgacaatgtatccgcaccgctcatggcaatgtactcgctcaaattgtgcaagattccatcttcagaagtaagacaaaagcgagctgagcagatgaatattgttgatgaaagggtaaaaagtaacatcttaccttgggcaacaatgggttcatagggtggaggttgagcagtccaacttccatcaggttctttcatgtgtcttctatcggaagcgaaatgcttaaagaacagaggagcatgaacaatgcggaagaacctgatctcaacaaaacaaaaagaaaaaaccaactacattacaattacatgatgctgaatttcctatccaaatctatattgctccttatgcctttcataaactgttttgcggataaatatacggttcaggaacacaagaagataaagaagcctatatagtttctcggtgatagaaaagtaaaggctactgctttggcaccctgatatctattacttggtggtacagtgatgtgaaagttatagattacctctggtactctgcgaaaagctgaaaagatggctggatagtttcagtcacatatgaggctaagggtgaagggaaaggcaaagtcgaatcaagatcccacaccaaaggctcagaatcactttctttcttcctctaatcaatattcatgcgaatacaaaacaaaaaccaagtttaattctaaaaactgacatcactggtttggacattataggtttacctggacacagatgacatgataatcccacagtacaaccccatcagctctggtactagctttctgatgccaaagtggaacctacaagaaaatcaaatcagtacaatggacattgaaatatacacactctgattaccaaacgacttcgtaacggtgatgtaattccaacatgaaacaagaccaaagataagaattattaataaagagcaacaagcttgcctgcttcttctcattggagataaaaacaacaaacaaatcagaacacgttgcctccgctacaccattctcgcacaacgtcttgcagagcagatacacattctcttcgctacaagaaaaagtcaacatctttatcttaagtactcctacccataagtcaaaataatcaactacaaccctctaaaacgagtaatctggattcggaagttacatagaacatgtagaagagaccgttctataatttgaagaaacctaaatcgatgagaaattttgttttaaaagaagaagaataccagtagtaaggagtgtgctggaaccgagtggcatccatagcaataggctccgaggtgacgccggacattctctcttaggatttgatcagtactcttatctaattttcctacttccagcaacgttgatcatctaatcgtcaaaactaaaaagtggtcgtgtacaattgggtaaatggtgaccggagaagagacagagagttaaataagttaatgcccaacgacgatgtatcgtgaacagaccaaacgacgacgtagtgaatacaatcgtaatcgtattcgtattcgtgaatgggtcaaacgccgtcgttcagaaacttagtttaaacgatgccgtgtttctaatagaccaaaaacgacagcgtattattttattttttctaatttcccattaatgttggaatgctcgcgtgacagagcagtgacgatggaggacgagcaagacgcgcatcatcgccggcagatctgcgacaactgcgatcgcccaaatgcgatttgtctctgccacgtcttaccagcggatctaattccgacgaatacagaaatcatcatcctccaccatccacacgagtcacgccacaagctcaacaccactcctctccttaccaaatccttactaaacgtcaccagaatccccgcccgccgtctcctccgccgtcacatctccaccgccggaggaaccgcactcccagcaccgccaacaatctacctcttcccttcttctccttcctctcccgccgtcactatatccgaattcaaatccctaaacctcttaaaccatcgtgagatctcaaatcccccgccgctgagactaatcgtattcgacgcgacgtggaaacacgcgaaggagatggtcaaagctagcgaggtggtgttaagagaagcaggagcggttagagtgtgtttggatacggaaatagacgcatcagtgagtggaggaaccatctacgattcagagcttgtgctaaggaaggaaccattcggaggatgtgtaactacggcggaggctgtggcacggtgcttaggagctattgaacctgacggtgaagaaatagagaggaagctgattagtgttttgaaagagatggttagatttcaatctaagtacttgaagcctatgaaaccaagacctaagttattgaagaagagatttcagaatcagcaaccacttgaacaagaagaagaatgagttaaatcctgaagtttagcaaaaaaaaattgctctatgacattagtccattgtattaatttgttcttctatatcaataattagttaatttacaaaatatcaaataattctgtgatttctcaaatttattcacgttttcttgcgaatttggagtagacaaatcaatcaatatatttgtgtgtgtggaacagatagattatgatgaactttatgaactagaaaagaagaaataatgggacatgggaccttgttccacgtgaagtgagaaatagaggtgagggggtcgtggattgttttgcgatcatataactaactttcgagatttataaatgaaggtgacactttttttaaaaaactagacactcactgaatcacatgatatgtttttaggccttttagtaccgatgttataatatatagatgcctaattcctaaagcacacaagttcaatcattaaaaccgtttcctgtaaattcatattcctttttacggtccatattcgaattggagatcaaaataagtctgacttactattttgaatgaagaaatgtattgttggttgctaatcgatatcgttggtcgttgtccgaataacttcaaaacaaacatgatctatgctacgtaatacgtacggcacaaatactaatttcagaattagataaattctgaattgaaagctcgaaacttgttagtcaagaaaaaagagatgaaactgctaagttacgatttcaactttaatttgtttaggttgaatcttacttaattacattagttttggccctgctcaaagaataaaccgagcctgttcattctatgcaatcggaaatatctgatcgaaactcctatcatctctttatagagtttacttaaaaaatatatatatttttgataccgattatatatatatcaaccatacatagtatatttctcgaaattttaaaacatataatttctttcatttcattcggtgtggacattgcactctctttattcatttttacgttttccttaatttacgatggagtgaccttcaattataatttttattcatttcttgatggtatagtacaagttaataacttttatctgttttcgatatttattgtttgtttacgtgaagttgacctggcaacacacaaaataaaacaatgatcgatttatcaagtatagcaactttgttttgaacaccttaaaaaaacattcactgatatattgtgaaataggctacgggagagggatttggatcctagttaagtgcatggtagtcgaaagtctgttatgtaccatcggtcatatagaagctacactttgtaccctttttttttgggaggtttcaagtcaagtgtatcatatgcgaatgagactatcaaaaaggagagatataaatggaaaacggtacggtgaacttttaaatgcataattatattagtcaagtagagaagtttgtaagagtttgaacaaactctagttggcaaagcattgatggaatgatggtagctgattctgaaatttcttcttctatgtatttacgaatacgattatatacatgacataacttttttttttccttctttttttttgagttgaaaacgagagtagagaaaaaaggagtattatccatccatgacatctgccaaaagcctaaaagtagaaaagaaggctgttctctatttatctggttattgtatttcattcatgattgttgtttttcatgttaaagagtatattattacgaagaaatactatagtgtattcttttaatatacgaaaagtgcatatccttcaaaaaggagttgaatcgtgcaaattcacatgctaaaaaggacatcgtgtcatgctgaaatagcgaatgatgagaccaatctctccaaatcaaataatttattccgaaatacttttcttttttacaacattctatatgatattaactatgtataatgaatttggatagttttttttaatttgtgttaaaagatcttatacggtctattctacacctacataggttatatccaaatcaagtatgatttcacctatcttttcttgcaaatatttgcatcatttttttgttaatgtttatatataactaggtctaggttggtagctatttatggtacaacaaatccaataaatgtatgtaagtatatatatatatatatatatataagtttagatgcaatatatatttcaagacaaaaattagcgacgtttccaattgtataatgatgacctatttttttccatgtatattatattaaaatccaaaatattggtaatatattaattaaaatagctaaaaatagataaattttttttttttattgtttgcgaaggtctttaaaggtcggtactaccgaaaatccaatccgttggataatattaaattatattctccatcttatggatgaagaagtattgtttctgatcgatctctggttaacaaaggatttattaaaagagtcggttttggggcgtccatttcagtttaggaggattcgtggattccaactcaattcccgagaccagcaaaaagtaatggctcagttattgatccatgcctaaaagttcaaagtcttattgacactcgaacaaatttctggaagattgacttattaaatgagctttttgtcccagaagatgtttcactaataagtgctctgcacttgggtgcgtcaactacggaggatactcttggttggcactttacaaagtccagaaaatattcagttaaatctggatatcatacggcaaagctagaaactttggatgtaaatgtttcctttattgggccagacatcaaagctttaaaagctttcatttggaaagtgcagtgtccgcccaaattgcgtcattttttgtggcagactctagcgggttgtgtgccggttacagataatttacggaaaagaggtattaattgtgattcagggtgtgtctgatgtggtaacgtagaggaaacaattaatcatgtacttttccaatgtcaccctgcgcgacagatatgggccctttcacagattccttcggcggcaggaatatttccatatgcctctatttatgcgaatttggattatttattttggaggattatttcggattttgattctttttcatacccatggataatttggtatatttggaaggcaacgaatgaaaagatttttgacaatgtcgataaagatcccttaaaggtattatgtttcgcaaaaagtgaggcacagtcatggaagtcagctcaaattgagttgcatgttgaaaatcatgaaactcctaatttcggatctaggagtagagcgagggatatctatcctgatatcaatttcttgggatatcgttgttacgtggatgggtcatggaaaaaagacgattttttctctgggacaggatggtactgtacatcagcaattggagagacgccaacaatgggagcagcaaaccttagacgaagtctatccccactacatgccgaagtggaagctcttctatgggcgatgaagtgcatgattggcgccgacaatcaagatgttgtgtttctcacagactgttcggatctggtgaagatgatgtcttccccaaccgaatgaccggctttctcagtgtatttggaggaattgcagagtgacaagaaaaaattttcaagtttttttttatctttaatttctcgtagtgcaaatgtcaaagcggataatttggcgcgtaaagttcgtgtccaaccgcatcatatcacttatgtaaacaaaattcttcaggaatggctcttttgagctctaattaattttggatgacaaaaaaaaaaaaaaaatatttttacagttattaccataatttcgaaaaaacaatatgtattaaatttgggattaatgtggatttttggaattaaaagtgtggtaaagaaagaaaaagaaaaaggcaaaacaagattggtcgggaggaaattgaatcacgaccggatctaatttacttggccttaaaaattgacagactcttctttaaacgtcttttctcaaaactttgtctccctcctctatattcttcgtcttcgacctcgtcgtctggcagtaattcaatctctctctctctctctctactgtaataaatctaaggaaacaaaaaacgttacgaaagaaaaagcattaaaaagaaaagctttagagagaaaaaaaacacagctcacaacctcttttcaattattcaatttagctttttttctcttcttcttcttcatcttccctcgtcttctttgccagttcttcttcatctttcgtcgttttcttagtgccacccaaagatcttcgtgcaggttcgtacttctttctacctcgatcgattttgactaaatgtatggatcatctgatttccgatttgatcgtggttgttccttgctctgtttcatgatctgtgaatctgagtttctcgatctggctgcgtctttttcggaaaagtcgagaattttttcctgctgggtcttctgaatcacatttgatcaattcctggaaatcgcaaagttttgagtttttctaatttctaaaggttgatcgagccaaaatcctttacgtgtctgtgtctgactctctgtagacctttcctgtttcttgatcactagctagctttcgagattggatttaaaattttctagatgaatctcaaattataattacagaattgaccaatgctttgcttgagaaacagtccaagaagaaatgcttgagatccttcatctccaagtaaatgggaggatttggttgattatctgctcattttcttaactttgttccgtatttttttttttgactcaacaggttcattggcgtttgtagtacataaattttccctgacacacagaaaaagaggatttgactgttatacaatgtcaacaaaagtgttggatcctgcatttcaaggagctggccagaaaccgtatcctttcagctacataactactttcccattagtgtttgatatcaaatgagcaatctaattatgttcttcctgaatgtttggactgtttgagcttgtgaaccttaacttttgttattagagggactgaaatctggagaattgagaattttgaggcagttcctgtaccaaagtctgagcatggaaagttctatatgggagatacttacattgtcttgcaggtttgtaattcttttctttgctcttttctttcctctgttttctgtgttctataaaaatatttagttatgatctcttacaagacagactaacttatgtttgagaaatgttatcttccctttgcgcagacaacacagaataaagggggtgcttatttgtttgatatacatttctggattggtaaagatacaagccaggtacttatctccaagactcttttatttagtaaagactgtttttggaagagaatgcaaaggtgaaactgtgttttactaaattatggtttgatgattttaggatgaagctggaacagcagctgttaaaacagttgaactcgatgcagttcttggaggccgtgctgtccaacaccgggaaattcagggtcatgaatctgacaaattcttgtcttacttcaagccatgtattatacccttagagggtggtgttgcgtctggtttcaaaacagttgaagaagaggtgtttgagacccggttatatacttgcaaaggaaaacgtgcaatccgtttgaagcaggttttaaccattgtactctccttgtattagaacgagtgaacggtgattaccaatgtacatcaactttttcttctgttcctcttttttgcaggttccttttgcccgctcatcactgaatcatgatgatgtatttatcttggacaccgaggaaaagatctatcagttcaatggtgcaaattcaaacattcaggagagagccaaagctttggaagtcgttcagtatttaaaagacaagtatcacgaaggaacttgtgatgttgcgattgttggtaagccaattgcaccttcttcctcagtttcctttaagtcaatgaacagtgttttaatacttaaagaataggttttgtgtgtggaaacttatctatattcatactttcctgctataacagatgacggaaaattagatacagaatcagattctggtgcattttgggtcctctttggtggttttgctccaatcggaaggaaagttgccaatgatgatgacattgtcccggagtcaactccacctaagctttattggtctgttaatttctaattttgtcttcttgatataatgcatgccatcctgatacttatatcttctgcagtagtacctattttaaaatttacttaatagattattatgatagagttattgattgatatgttgttgctgtttaactttagcatcactgatggtaagatggaaccaatagacggtgacctatccaaatctatgctggaaaacactaaatgctacctcttggactgtggcgctgagatatatatctgggttggccgtgtcactcaagtagatgagaggaaagctgctagtcaatctgctgaggtaaagaatggaaatctattaaaaacatttctccggtccttagaatatctatctcaatcatggcttctcactttttacctttcatctacaggaattccttgctagtgaaaataggccaaaggcaacacatgtaactcgtgtaatccaaggttatgagtcccattctttcaagtctaactttgactcttggccatcaggctcggccactcctggtaacgaagaaggacgaggaaaagtcgctggtaaaacaccactatgaaactcaaatctttatagaaaacattgacggtcttgtagccctgactgactattttcaatgccccatttctctagctttactgaagcaacaaggcgttgggctcaagggcattgcaaaaagtgcaccagtgaatgaggatattccacctctgcttgaaagtggtggaaaattggaggtctgtttgtgacatgttccgggtattttacacatttggctatgaatgtatccattctgataattcattatgtctatgtatcaggtttggtacgttaatggtaaagtcaagactcccttacctaaagaagatattggaaagctctattctggggactgctatttggtcctttatacctatcattctggggaaaggaaagacgaatatttcttgagttgttggtttggaaagaaaagcattccggtaatttttatctaaatcataacagaatgtgaatccttagtatacatactgtataatcctccatttcagttaatttctctatttctaacttttatattggctatcttagtttcttcctggtattgcctggttgtgactgtagaactttgtatttcccttctgagtattgagggtaaccagttaatgttgcaaaatggtactgttgcatgattcatatttgtgagtgcgctgcagttttagctttgaatattattgagtcctgatatcattagtgtattgtaagttagctatatatgaacatataaatgttatggatatcagaaattcgacttaacttaagtttagccatctaaaagttctgatttctctcttatccaggaggaccaagatacagcaattcgactggcgaatacaatgtcaaactcgttaaaaggaagacctgtgcaggtacaaagttttatttttattgaaagcaatgatgactagtactggaagatcgattactaatgggggtcttcttgtagggccgtatatacgagggtaaagagcctccacaatttgttgccctttttcaacctatggtggtcttaaaggtatttgtatgctgtttacaagatgaggatgaagttgattttagtcgcaagagaatatacagtgattaatatggcttacatggactttttagggtggtttgagctctgggtacaaaagcagtatgggagagtcagagtcaacagacgaaacctacacgccagaatcaattgcactagttcaagtatctggaaccggagttcacaataataaggctgtgcaagttgaaacggtacgtgaccaccctagcttctttctttctaagtagtaaagtttagttttcttatttgtgaaatattgcaaattgaataaaggtgtgtagttattgttaagctttgtattagaagcgacttaggcgatacataatattctatgatttgctattttgactcataattgtgtgtttgcaatacttccattaggtggcaacatctttgaactcttatgagtgcttccttctgcaatctggtacttccatgttcctttggcatggaaatcaaagtacgcatgaacagctagaactggccactaaagttgctgaattcttgaaggttagtttctggttgtactgtgttgttttcagtttatcttaaatctttccaaataggtgctttacagttttacacggaactcataatagaaaatgtctttttgttaatcagcccgggattactctcaagcatgccaaagaaggaacagagagctcaaccttttggtttgcacttgggggaaaacagaatttcaccagcaagaaggcttcctctgagacgatcagggatcctcacttattctcatttgctttcaacagaggtgaatgtttaataggataataattgtgatttcttacaaatatatactgagaagttgagaatgtcctgtatccttctaactgtatcatttttcttttatatgcgtctgcctggatccccgcaggaaagtttcaggtgagattatacaactttcattactcgagatgctgttctgcatattctacccttcttaacaatatgctctgcaacaggttgaggagatttacaactttgctcaagatgacctcttgactgaggatatatatttcctagacacccatgctgaagtttttgtctgggttggtcaatgtgtggagcctaaggaaaagcaaactgtatttgagattggccaagtaactatttccttatcaattttgcttcttgttttgcttctttttcttttcttgtactgtttgttcattgagacagtttatgagcagaaatacatagatcttgctggatccttggaaggcttgcatcctaaagtcccaatctacaaaatcaatgaagggaacgaaccatgcttcttcaccacttacttttcttgggatgccactaaagctatcgtaagtgacttagtgttgaagagggatttagataatataactagataactctgaatgttacctcatggatttcctttactgtttctctttcttttctccttgaatttacctttcttctgttttaaacattgggatataggtacaaggaaattcattccagaaaaaggcatcgttgttatttggcactcaccacgttgtggaggtaatacaaatttgctttttcagttcggttaggacttgggacaatgaaagaaaacgctcttattactttccggctacttcatgatatttgtcccttttctgctgcaggataagtctaacggtgggaaccaaggactaaggcaaagggctgaagcactagctgccttaaattcggcatttaactcttctagtaacaggcctgcctattcggtaaatatctataccctaattcaatgtttctactatattctttctgagatataagtcaaataactgaagatattgataaagaataatggctttgattttatttttccgtaagtatcccagtaattgacatttcaataactctgcttgtacaacaaaccaatctatgactatttagctgttaaatcatctatctggttggaagctgaacacattttcaaccttctagttcagagtcccgtcctaaattcagagagtataattcttgacacgattctcattacaatgacttaagaaatttgttgcagtctagactaaactgcttgaatacatcaaacaagttcattttcgtttgcattggccaaacctaacccattacaaagaaaaataaacttttgtatgtttagcaagtcgcatctgattcgtcgattagttaacttagacagtcatctattttaactgcagagccaggacagattaaacgaaagtcacgacggcccaagacagagagctgaagctttagccgccttgtcatccgcattcaactcttcttcgtcatcaactaaatcgcctccaccaccaaggccagtggggacgagtcaggcttcacagagagcagcagcagtggctgctctttctcaagttcttgttgcggaaaataagaaatcacctgatacctctcctacaagaagatccactagctccaacccagcagatgacatccctctgagtaagtctttctccttgattccacgttctgaaacttcgataacacaattgactataaatatcttcatccacagcggaagcaaaagatgaagaagaggcttcagaggtagctggtcttgaagccaaggaagaagaggaagtttcacctgcagcagatgaaacagaagcaaagcaggaaacagaagagcaaggtgattctgaaatacaaccaagtggagcaactttcacctatgaacagctgagagctaaatctgagaacccagtgactggaatcgatttcaaacgcagagaggtgaattagttagatagttagctactaggagataactcactttactacattacctaactaacttgctgtttctttttgttgtgatcaatttactacaaggcttatctatctgaggaagagttccaaagtgtgtttgggatcgagaaagaagcattcaacaacttaccacgttggaagcaagatctgcttaagaagaagttcgacttgttctagtttggttttatgtgggtcagtcaatttgttgttggtttgaagagtgtgtttttttgtttctcttcttcaattttatttacttggctcatttatatttctctcatgggttggtttgggtttgattctttatattttctgacagcacaatgaggtttcttgtaatgatgatgatcatagattgtaatgaatgttttacccgagacagatttgtgagtgggtagcaaaattctttgatttgtgatcttccatctttgtgactactttttttttttttttgttcaaagtggttgagtctcagcgttgtgactatttatgagcattgtttatatattcatcgtggagcaatacttggttcactccgaggatgacccttttattcactccttttgttttagccaataaaattgcatcatgttattacaattaaataaaaaataaaaaataaataaataaactcactttagaaaatcattaacaaaaatatgaatgttttatgcatttatcatgagcaaaataaaataaaatcatatgcttcattgttttatgcatttatcagaacaagtctttatgttgttagtatttactatactttaaactaaattaactttaaactataaaatcacactattccattcaaaaacaattagctttatatataaatttgctaatagtatttttcttaaaaatcaaattggtttacaaattgaccattcaatcaataaatggtaatgagccgaaatatattggagatagactttaagatttgtaaccgcgagtaaagttatccttttatccacagaagagccttccttacttgctcgtttggttgtggaccggcttattgctctcaaagtctcaatcgttgggaagaagttgatgccttgatggtgttctcaattcctgggctggccggtttgctagaaagaatttcccggttcttatcaaggtacgtatgtttgattttgattggtattcactgagtgtgttttgaaactaaaaaatttgcaatgacaaaaaagtatttcttcccataattaatatcattggttatcaaagttcaaaacataaaagaaaaaaactataatcatcatacatctcaaacaaaatgatttaatcaatgttcatcatgatcttcaccacataatgtatccaaaatatctttagcagaggacgagtccgacccgatgagccggtctagcttatcctcactccaccaacttgtaggttgtagcttacggcgacccttagatttgtggcccgacttgatagctggcgacacgtgacaatgactgtacttggaccgctcgctttctccggtggtatttgaatggttggtagtctttgatggaacttttgtaaaatctccaaaagctggtggtgaatcgagccggttggaggtgggtcgcggattaaagccccgcggatgaatcattcccgtccttacgatgccttggtgacgaccttcactcttcatgtttgcttattttgatttgagacttgttgaattaccgatgtcttgtttatatttatatttgtggggcttactaaatatgtttggggtacaagaaaatgagaatagtcaaaaatgcttgtccagcaagatattaatattatattctttgtctaccttttgtttttgtcggcattatctgaggattgaaagaaaagtcttttttgaaaacattttcgtttgctcttcctaattttgtggactttttaaggattctatgtaaaatgttattgagctttatatgatttaagtagtattaaactctaaatcctaaaaactgaacagtaagcatgaaattcttaaattttaaagtttaccttatttttagtaagttttatatttaaaaattttaccctgaatttttttaagttctttttagtttatattttagctactataataatgttttcctaattatcaatagttgtcaatctggacctaaatgtatccctatttttatcctaacaaaacgggccaaaaaatatgagagatgggctttaagatccgtaagagggtgataaataaatataagctacttatatatttaattaaatttaagtgataaataaatataagctacttatgtattgagatatgtggtgaaattggattttaaactacatcaaatgggtttttaaaatgacaaaatgagaactaatatctactcggtctcctactttgtgattattttatatattcaatgataaaaaaaaactcacttaagagctcttcatgattaagaacaaattttgtacaattagatgctcattatttcatgcatttttatgacatcaaatcaccatttggatttcaaaatcctaatctggtcaaactagtgctaagcacacatatccaatgtatatctgttcttaaattatcttaatctttttttaatgtttgaggatgatcgccatattttcatgcggctggatcgcaaatatttcttaagtttttgcacattttgtctttaccatttttttcattgacccttattgtttcttcacttttgacgaaacatgaccctttttattctttctctcaagagaatgtatggcagagatctacatggcatgacgctcttcgagctgatgttgttcgaaggtcgtctactcgataccttgaccaatgtcaaggcttagatgcttgaaccaagaatggacgaaatcgctagacagctcgaacatgtaataaaaacatttatacccaatgtatatctctcctcgtatctagttaaatcatctaaatctcttctcactctttctttgtttctcgcaaggaatcaatgtctctctctactgagaaagagacatgtggcaaagttgatcaccaacagatttccctgcggttttgatcgcacatcttttgcctctctttgtcaagaacatgtggcagatccgtcagactcaaatgacttccaattgatcaatcggttgatagtttatctttgctttgatgtttaactttgatcccatcaaccagggtttaatttccttttgctattattattagttactcttgttattattcagagctggagaaacgtagcatcattcgtatgctagctgttttaactttttgtgtcgaaatttaatcttcttatgtagttatatggaattttgttgctcttagtgttataatgtacaaagttttttttgtctttggtaatttatgtaccttttctttggctaatgcctctattgtgaccgagaaatattgattttggccaagttaaaatatgtgcacaacattctaacaaaaaacctttattttaccgtttaagacaaactatgaataaataaaacggatctcataatagggtaattggttggtactgttagatggtgatacgtactgtctgataaacctcgagaaggatcctcccattgtcatttttgatgaaccatctccagataccaatatatattggttgatcttcaagacaacttaatcacatcatcttcttcattatcatcattggatggatccataagcatatatatatgatcatgtcatttgctcgtcacttcaatttcccttcttcaaagaggcgattgtaaggaattaacaaactcatgttctcaccccaattcaaggaatttctcttgttttttatgcatttatcgaaacaaagtcttttatgttgttagtatttatttactatactttaaaataaataaaagttatttttagaaaatcaagttagtttacaaattgaccataatgggccgaaacatatcggatatggggcctaagatccgtagccgcgagagtaatgttatcctcttttatccaccgaagagccttccttactcgtttggctgtgaatggctaccgttaccaatttcaagctcgtcactccgccggaatcttcccgcgccgataagccaggagctacgaaggcctccgacgcattccaggagaagaaatctgtgtctgtgaactacgaccgtggtgagcatgaggtctcggtcaacatcggcgggctcaggaaagctgatattccgagacgttaccgaattcgggttgagaacgaccggtttcagaaggattggagtgtatcggaggttgtggaccggcttatggctctcaatcgttgggaagaagttgatggcgttcttaattcctgggtcggccggtttgctaggaagaatttcccggttcttatcagggtatgtatgtctcgatttcgattggtattattcactgatgctcttttgaacttattggagttttgaattttgtaactttgcaggagcttagtagaagagggtgtattgagctttgtgtgaatgttttcaagtggatgaagattcagaagaactactgtgcaaggaatgatatatacaatatgatgattaggcttcatgctaggcataattgggttgatcaggctcgtggtctcttctttgaaatgcagaaatggaggtatgtgtgaagtttttatctgaaaatgttctatattgtaagtgcgattatcttggatattaatttattgagaaggtatatggtatggttgtagctgcaaaccggatgctgagacgtacgatgctcttatcaatgcccatggtcgagctggtcaatggcgctgggctatgaatcttatggatgacatgttacgtgctgctgtgtgtaactttgctttactcatgtaaagtttacatttttgttttgggtttccatgatgcccaactaacaattaagaataatctatttcacttctgatatggttttgacttttgactcttctctggttttgcagattgctcctagtcgttcaacctacaataacctgatcaatgcttgtggttctagtggaaactggagagaggctctggaagtatgcaagaaaatgacagataacggagttggaccggatttggtcactcataacattgtgttgtcagcatacaagagtggtcgtcagtattcaaaggcgctatcttattttgagctcatgaagggagctaaagttcgtcccgatactacaactttcaatatcattatatattgtctgtcaaagctcggtcaaagtagccaagcccttgatcttttcaattccatgagggagaagagagctgagtgcagacctgatgttgtgacatttacgagcatcatgcatttatactctgtcaagggagagatagaaaactgcagagccgtgttcgaagcaatggttgcagaaggtctaaagcctaatattgtttcctataatgccttaatgggtgcctatgctgttcatggaatgagtggaactgctctctcagtgttaggagatatcaagcagaatggtattatcccagatgtggtctcttatacatgcttgctcaattcttatggaagatcacgtcaacctgggaaggcaaaggaggtattcctcatgatgaggaaggaaaggagaaagccaaatgttgttacttacaatgcattgattgatgcttatgggtctaatgggtttctagctgaagctgtggaaatctttcggcagatggaacaagatggcattaagccaaatgttgtttcagtatgcactcttttggctgcttgtagtaggtctaaaaaaaaggtgaatgttgatactgtactttccgcagcacagtcgagaggcattaatctcaatacggcagcctataactcagccattggaagctatataaatgctgcagaacttgagaaggccattgcattgtatcagagtatgagaaaaaagaaagtcaaagctgattctgttactttcactatccttataagcggttcatgtaggatgtcaaaataccctgaagcaattagttacttgaaggagatggaagatctcagtattccattgacaaaggaggtgtactcttcggttctatgtgcttacagcaaacaggcaagtgcttagagtttgagctcagaagaagacgtgtgtattcaatagaattctgattttcatatggtttgactgtcactttctttgtgataatttccagggtcaagttacagaagcagaatccatattcaaccagatgaaaatggctgggtgcgaacctgatgtgattgcatacacttcaatgctccatgcttacaatgcttcaggtaaataccatgagtgtaagactgttaaaaatggtaacaaaatgttttcagtggatctgagttggcttggaatggttttgtgttgccagaaaagtggggaaaggcttgtgaactcttcctggaaatggaggcaaatggaatagagccagattcgattgcttgttcagctttgatgagagctttcaacaagggaggtcaaccgtcaaatgtctttgtcctgatggatttaatgcgggaaaaagaaatccccttcactggtgcggtcttctttgagatattttcggcttgtaacacgtaagttcttgtatgtctatttaaaacattacagtaaaatacttgctcgaattacagaaagagcaatatatcacccttcttctttcaacattgcagcttgcaggaatggaaaagagcaatagacctcatccaaatgatggatccgtacctgccatcgctttctatcgggttaactaatcagatgctgcatcttttcgggaagagtggtaaagttgaagcaatgatgaaggtacaacgaacttttagttgatcagctaattagacttccacattatctttcttttctgccaacctgtttacaaaagaatgttaacgaaaccatgttgtaccactaaacacacgcagctgttctataagattattgcctctggtgttggaatcaacctcaagacttatgcaatactgttggaacatcttttagctgttggaaactggagaaaatacattgaggtaatacttttttgtttgtctcttgccaaatgaatttcaattagcaatgaccaagcaagttttgcggttgagaaataaaatttgacttttgtgtgaatgatttgcaggttttagaatggatgagtggtgctggtattcaaccctcgaaccaaatgtatcgtgacataatctcctttggtgaaagaagtgcagggatcgagttcgagcctctaatacgccaaaaattgggtgagatgagagaggaatgcaaaataaatgattctgtcacatgattttcgatctttttggtgtctcacatttcattttttgttggttattccatagaatcactgagaaacaaaggagaaggtctgattccaacttttagacacgaaggcacattgttgtaatttccactatatgcttgtatttttggcccagtgattatgcatatgatgtttgtaacttgtaatctcctctatcgataatatgataattcaattcagaaaacgaaatcattttagtattgaaaataaacgtagattgttggctagagttacatattgaattgctataggatccagcttgtatgtgcagataatagataaactgatacaagacattcaattcaaccaatcatttcaaaaagtttgaattatgatttttaaatggaatgattcgatgtgtaagtcattacaacggtagcaatatgaagaatcaaatggtaggaaagaaaatccgaatttaaaatattccgaaaattattaagcttagtttgataaacaaaacaacaacatcgtgagtgtaccataggaagaatattccttggaacgaggcgagagttgggaaacacttcacattaaaatgtcagaatccagaaacagatcacgtacacgtggacataattagtacacgtcagcatataaacctattctactaatgacgaaagcaccctcgtctccgtacatagccgttgcagttattatctttcgcttcgttgaaaaaggaaaaacaaaattgggacgtaatggtaaattaagtccgtaattttattttgccgttgtttagattactagaaaagactcaaaaatcaaaatcattgtattcggtgaaaaaggaaagagtcaaagttgaattttctcagctctcactctctttttctctctctttacttctactgtatcaagaagctccgttttgcttagccatagtgcgtctagggtttggttggtgggaagaaggttccgatcatggcgtcggtgtcgtcgtcggatcaaggacctaagacagaagcaggatgtagcggcggaggaggaggagagagctcggagacagtggcggcgagtgatcagatgttgttgtatagaggttttaagaaggcgaagaaggagagaggttgtacagctaaggagcgtattagtaaaatgcctccgtgcactgctgggaaaaggagttccatataccggggagtcaccaggtactgtgacttttcaaatcgggattgtcggtttatgatgcggaggagattggagtataggtttggttgtgaattgggagttgtgttatctgtattagagtatggaatgtttggattggtggatatgcactttggttagggatcttgtgtggagctaaattatctggaatctgtaaactgttctaaaacacactaattttcacctaatgtcagattttatagtgtctaggctcaaactagaagaaatgagtaggtgtgcttagcatctgtatgaggtttttgttccatagcagttggagatgttgatgcgttttgtttgtcgtatttgtgttgagtacagacatagatggacaggtcgttatgaagctcacctttgggataagagtacctggaaccaaaaccagaacaagaagggaaaacaaggttcctcttcttcttttttttttctctctgcatctgataaaattgctgttgtcatttgcaataagttttctcttgtttggagtatcaaagctgatcttttctgtttcctatatattttcatgggtgacggaatttcgccacaccagtttatctaggtaagctaaaagctttatatgtgttgattatattcttgtatatcaaattggataatttttcactgaagaacccaactcttacttgacaggagcatatgatgatgaagaggctgctgctagagcttacgaccttgctgccttaaaatattggggtcctgggacacttataaattttccggtgagattgctaccgtagtatgctttctaagttactcttcaaccgtgtggtttccttaataattttcatggtcaatatatatgcataagtggagtaaggatggttagaagtgttttggagccacccttctcaagtttcactgtttttagctacatgcatttacgtatttcattctcgtaggtgactgattataccagggatttagaagaaatgcaaaatctctcaagggaagaataccttgcatctttacgtaggtgcgtatgtatttaaaagcactatagttttcttttaagaaccatttattgctgatactctttagatatccctttggcagaaaaagcagcggtttctctaggggaatagcgaaatatcgtggacttcaaaggtaaaactggaccagcaattgagttctcatttctctgttttgtctgaaaaactatggaatcaagagtgatcatctttgtgtaattgcctataaggaagattctttagtgacacattgtggatcatcacggttttgattaattgacatatggtggatatgctactagttaatttcatagaaaagtctatatgctactcttaagaatagggatatggcaaaactatcttcactgttttggctgtagccctctttagttttgtctttttaaccttctttctcacaattaacattcatacctgatatgcatttctgctgtctttccatctattctgcacttcccgaccagccgatgggacgcatcagccagtcgtatgcctggacctgaatacttcagtaacattcattacggtgagttgctaacaatattgacctaattgaaacaaatgtttgcttgcatcagactattcaaaactcattgtcattattaacaggggcaggtgatgatcgtggaacagaaggtgactttctaggtagcttttgtctggaaagaaagattgatctaacaggatacataaagtggtggggagccaacaagaaccgtcaaccagaatcttcatcaaaagcatcagaggatgcaaacgtcgaagatgctggtactgagcttaaaacactggaacacacatcccatgcaacagaaccatacaaggcgccaaaccttggcgtcctttgtggaactcagagaaaagaaaaagaaatatcatcaccatcaagctcttctgctttaagcatcttgtctcagtcgcctgccttcaagagcctagaggagaaagtgttgaagatccaagaaagctgcaataatgaaaacgatgagaatgcaaaccgtaacatcatcaatatggagaagaataacggcaaggcaatagagaaaccagttgtgagtcatggagttgctttaggcggtgctgctgctttgtctcttcagaaaagcatgtacccacttacctctctcttaacggctccattgctcaccaactacaatacattggatcctcttgcagaccctattctctggacaccatttcttccttcaggatcctctcttacttcagaggttcgtagtcatatatctatagaaccagagacttcagaggttactacaacacatcttccttatgtcattttctttggctctctttcttctgcaggtgacaaagacagagaccagctgttccacgtacagctacctcccacaagagaaatgagccgttccctttagactttatgtatgtcagattctccttttttgagatgaattcgtcgacttgacatctctttgtctcttttatggagaaaaagttgggaaaagtgtgacaatggtctgaagcaggaatgtacaggttttgttagtggttgtgtttttttttttccagtgtggaatatagaatcatgatattttgtgtaaaacagaaaaaagttatcattatagtatagaagtttgctcttaatatttctgcacaaggtataatataatttgattgtgaccgatctaattattcatctctaccaaatgttacgactatgtattatcacatcatctgcacaagacttatctagctttgatacaactaactgaatcctattacccagacagggactgagtatataatagttccaatcgcaaaagaaaccacaatggtaaaagatgcatacgcataggctctccatgggtaatcactttctctcatcgcattgaactcagccatgaaggtcgaaactgtgctcagacatcccaacagaccaaactgtatgctcgaagcaaccgtgttacatgttctcgtgttcacctgtttcccaaaatatatacaatgaatgttatcttttgtgatttgatctgtttggtagagagaggaggtgaggaagtttataccgatttcttcaaggtagccaatgctgccataacgcaagctgcaactacatttgcaatgagggtgccaaatgggacccatctcaaattttgactatcctttcccagcccacgtccattgagtcgggctaagaaccatctgagccagacaccaggggctgcaactaagcaaccaaaccatagctgagcctcgcttgttcctttgtcaaactctttcacaagcagtatggaactggcagtgagtaaagccacaagcaacagaagcatcagggtcagagacacaatatggctctggaaggtgttaaccttaagacaatggaatttatcctcagaagaagctcttctatgaagaagccatttaaaccctttggccgtttccactcccagaattatggagtatgacgtgagaaacaatcctgtaaagtcgtttatgctgtaagcaagtatgtttcatccaatttagtaggtgattggagattgagaagggaattttttgtttttacctaataaaaagccaagcacagcatacacccattgaccatcagcactaagatccagcattttctggttccaaccgctgaatgttgtcagactccccaaataaccagtcgataatcctatcgccacaaattcagaaactcttgctatatctgctttgaatacaacgccaaaccaacccatcaagaatgatcctacctataaggaagcatttggagaatttttattaagaaagataggtttgtaattaagtttgagatgagtgcattgcgactttcaccatgttggagggaagatcaaggtacaagatgctcccatcacttgttactcgagcaccagttggcccaaacaatttttgcagcaaatatctcgtaatggcctgtatatttggagtcaacgagttgattataatgatttaaacaaaaacaaagcacaacagagagacagacagaaaatggaaaataagcattttaccccaaaaatcccaaaaacagccaaatgaattaggcatgatatgtactccaaggactttggtaacactcgctcttcctcctttccctgtgcaacccacgagctacaatagatcaaaacattggacaaagaaaccaatactaacaatgatgtgactatgcaaagttagaggtagtctctacggagttgtttatttcaggtgacaagagtgacttggtcggtaaaggagatgctgttatgtcctcaggcaaagttttatttacggaagcagtgttgaaagctcgaaggtcatgtaatatatcttgttcttgacgagaagtatcatgagtcccttgttctataaaatcatcagcagacaaacggctgcttctaccagcactatgccttctccgaagtgagcggtccccaatatcccctgcctctgagacactctcactatcgacgtcattgtcaattaggtgaggcaaactacgtgataagcttaaagaagaggctacactgctctcccgactaaaagacttggcttgataaggttctatgctgctttgacccgtatccataggcgttgtagccaaagcataagattcttaaatgatgctccacctgcacatattttaagccacagccacacacacaagaaagaagacatgaaggaatgtgcaaaaagagacaagagataatcgaacaatgtggcaagtaaacattcgagaaattcctaatgcttattaaagacactgtttgaaaagtttagctgtaatcttcaaaaccatagctttttgatactaagacaacaaattcaaaaaagttcacatattcatgatagattatgactttagtttattactttctacagaagcagaataagaatgacctggtgaagggatccaaaaacagttttcaagattttgtcctccactatcccttaaaacaaaagataaaaatttacttgcgttttagttagtggaaatcgaaaaaaaggtagactaaaataatcacttgttcaccaatagagaaaaaaacgaaaatcttaaaaagttgtacaggtggcaaagacgaatgaatacttttcttagattgggacctgttttgggtttggattttgagctagacatttaaaattcagcagctttacctaatggcgaattcaatcttaatcgtgaagaatcaaatttgatcccaaaagtcgccggcggagaaatcgagctaacaggagacaatcgaaaaccatcaatttattctctggtttattggatgttaagggaagtaggttcgattgtagaagatggacgaacaacaaagcagaagacgattgtaactttgtttagtcgaacacacatgtacagacaagtagagttggtttagtcgggaaaatcgcaccctaaaaaaaacaaaaacaatacataagttttaaaatatttctaaattatgggccacaaagagctggcccagtagccccgcttctcataacagattttttttgtctctggcggataacaaaaatatccttggaaacgacagcccaaacaaaatcatctttaacatatatttagatgttacttgaaatttgatcatatattttgaaaaaatccagataaattattaaaagttaatggtattaaaaaaaaagtttcattgtttttagttgaagaaaatagtgtcattttgattctacatttgatataattttactaaaaattgttttttttctgtgttaaaaaaaaacagcatttttgaggattgaatatgaaggtggatttctttaaagttgtgtcacaactgataaaaataaaaataagaatcaagttggggagtggcaatgaaaggaataattctaatggcggcttttattggcaaccttcggaaaaataataaaaacattcgtatactttgccgtcaaacttaggaacgtcgtcgttttcgtcgtaatataattggcgtaacgcaactctaaaacgaatcaggatgttccacgtacactacactaggcttttaatgtggagcccgtgagagagccacccctacttggcattgacgcaaagatttatatttgggtcaacatcagcaactgtacttaagtacttatatatattaattataagattatcttcttctttttttttggtttaatataagattaccttcttaatatcacgacaactaatctaatcttctccttattttttgggttttttgatagaagaagaaaggtcccgtaaataaatgaaacagtttcggaattcttctatttttgtcgaccacttgtgttatccgcagctagttgcaaaattcttttgtttgattgtataatcaaattgattaatgaatcaaataaattggcaggaaaaaaaaaaaaaaaaaaaaggaagcacaaatgtcagtgaggtgagcccaagtcttcgccacctctctctgctttcttagtttgctactttgctttgccttttcccaaagaagaaccataaaagtatgatttcttattgaagccaagactagaatctatcgtctagggttctttctgggttccaaggaaaaatgggttcatcgaagaggcaattcaaggccatgctccgcaagaattggctcctcaaaactcgtcatcccttcgttacttcagctgaggtttctctctttttctttgctcctcaaaactatgtcgttttcatgcttattcactgctcgtcttaatgggtcttcttctccttgatgctgaatgcaatttttgtttttaaaatttcgaattgttgatcaaattttgcttctttctcttattcattggcagattttgcttccgactattgtaatgttgctgttgatagccgtcaggacacgggttgacaccacaattcacccggctcactcgtaagatatcagttttttacactcgtcactagcctctctctctctcgtactaaaattggattttgatttcgttttctgcattttgttctgttgatcatgaaaggaacatagacaaagatacagtcgtcgaagtgggcaaaggcaactctcctagttttccagaagttttgaagcttttgcttgctgagggggattttttagcttttgcacctgacactgatgaaactaataacatgatcgacattttgtctcttaagtttccggaactgcgggtaatcatcatcacgtcttcatcttatgctgcattctagatcgatagttactcttcatatgtcacacgtttaatcgaccctgtgtcttctgtttgcagctagttactaaaatttttaaagatgacatagagctggaaacttatataacatctgcgcattatggtgtctgtagcgaagtgaggtatgttttgttcttttttccagctaataagaaggcaatttcatccctagtttcttgtcgccttcaaactttttcttgtacatctctctgtttattctgtgaattggttagcatttcttgaataatggcagtatctccttgggttagttgttacaaatttgctacaactttgatgattatactacctgaacaagactggtatcttttctatgttggaaacagggagatattttggcttcacatgcccagtgtgtctgcattttatcttcactagtactatcatcaaagttataactagctgtctatgctttttcgttttttttttttttttaaatgttaaaactgattaagcctcatcatgtttgcttaggaattgttcgaatccaaaaataaaaggagcagtggtattccatgaacaaggacctcatttgtttgattatagcatccgcttgaaccacacatgggcattcgcaggattcccaaatgtcaagtcgatcatggacacaaatggaccttatatcaatgatctcgaaatggggattaataccataccaacaatgcaatacagctttagcggattcttgactgtatggccattacttattttcattgaaagtttgtctaatctgtgcccatgatttttctatcatctttgtagctctccccataaagctactaggcagtacagtagtcagataattcttgtctgtagactatataatctatgctattatagggaaatataggattagtcaaagaaattccaaatcaggtgttagattatcacacactaaagtagtagttaccatttagtaaactaaatcagttcatctgatttgaatagaaattcttgaagtagggggtttcatcttggtttcgcccagttttgattggtcttatacccttttgcagctccagcaggtggtagactctttcattatatttgcttctcagcaaaataacgacttgccattatcacattcaaatcttagttcagctctacgctttgagctgccatggacactgtttagcccctcagtgataagaatggttccatttccaacccgtgaatacactgatgatgagtttcaatctattgtcaaaagcgtaatgggattgttgtatgtatcacctgctctatattttctttccttacatgtatgcatggtatttgagtgtttatggtttggatgattatataattgttgagcaggtaccttctgggatttctgtttccaatctcccggcttatcagctactctgtctttgagaaggttggtttgggtttatgtattttgcttactttggaacacagctgatatgtatctttcgtttaccaatagttgcttttctatcacttacgcttttttttctgaccttgcaggaacagaaaataagagaaggactatacatgatgggcttgaaggatgagatctttcatttgtcgtggtttatcacatatgcattgcaggcaagtttctgcttgaaatttgacttgtgaacttttgtttgcctctcttcccgtggctatggtagcattttctgttgtcaacaatattgacttcagctggaagaagcagacgctttacttcttttgatatatctaataacttgtagttcttggtatattttgtcttttctaactagactttgttctgcagtttgcattgtgctctgggattattacagcttgtacgatgggaagtctctttaagtatagtgataagaccttagtcttcacatacttctttttatttgggctcagcgcaatcatgctctcatttatgatatcaacattttttactcgagcaaagacagctgtggcagttgggacccttacctttctcggagcctttttcccttactacactgtaaacgatgaatctgtctccatgtatgtttgtgcttttcacttttgttatttttttcgtgacggctgttttatggatagacaaaagttatgcttatctttggcacaaccatttggtctagaatacattaatgtaaaattaattgtctgacttgtagggtattgaaggtagtggcttctttgctttcgcctactgcatttgctcttgggtcaatcaactttgctgattatgagcgtgcacatgttggacttcgttggagcaatatatggcgggtatggtagttatgtaagtggctacaggccaaggttgattctccttgtattcttaacttttgttctggtcaatcttcatgcaggcatcttctggagtaagcttttttgtctgcctcttaatgatgttgctcgactctattctttactgcgcacttggactttatctggacaaggtacctccttttgatacatgtctatatttagtgcctgtcttgtaaatttatgtctgctatgtgacgttcaattttgtgaactgattcttttgttcttgacattattccttgttaaaatataattgtagttaggaggtttatcttttctttttcgttattgtatcctgcatctttgggcctaatccaagagttcatttcctcaggtcctccccagggaaaatggtgtgcggtacccatggaacttcatcttcagcaagtattttgggaggaagaaaaacaacttacaaaatcgcattccaggttttgaaactgatatgtttccagcggatatagaggttaatcagggagagccttttgatcctgtttttgaatcaataagcctggaaatgaggcaacaagagcttgatggaaggtacattcgtatcacaaccaaaaacaaaatccaattaattggtttccatagctggacatttggtttaccttttatgtttgccctgtaggtgcatacaagttagaaatctgcataaggtctatgcctcaagaaggggaaattgttgtgcagttaattcattgcaacttacattatacgagaaccagatactttcacttctgggtatgtctttcctgcttattaaacattcccatctcctctaatttggtcagtttttatttattcattgttgggaaattcatttttaacatattgagaaaagctttcttataacacatttatctacatcttttgatattttctattccctggctttgtcatctaaatgttgtctctgatgaatcttggtctctgcaataacatcatgacaccatgcatgcaatctcaattggcagaaacaacgaaaatcacgttgaaaaaagatagtgctaatcttgatatattcgttaaatcgtgcttcctttgcttgaaggacataatggagctggtaaaagcacaacaatatcaatgcttgttggccttcttcccccaacgtctggagatgccctgatacttggaaacagtattataacaaacatggtaaattttttctgttgctattacttgaatctctaattttcttgcataaccaaaaaactctgacctataagctactaagatatgcatttttgttttctagcatcagttgaataccatctgtatgttttttatgctgttaattcccctattcttgcatttttgtttctgactatacgactctcttttggtaggatgagatacggaaagaactaggtgtttgccctcagcatgacatcctctttccagaactgacagtaagtgaaaaaaatcccttcttttgcctcttgttttattctaagtgacggatgagatgcttgcaattcggatccaataacatggtaatattatcttgatcaaagaaagagaacataaaatgtgaaaaaggccaggaaaaaaaacacggcattcttttttcatttaggcagatttggttggttttcttattttctttaaattcacagggctcattcctcagatgtttttgttttttattcttttactgttactggtttttgtccaattatcttctatagtcaattgtcaatttatgctatatagttcatacattttctataccagaagtaaaaccactgctagggtcatgcttgtttcaagcgtaggataggaacatgtaccatatatgtgttgtacaatgaaacatttatctgcttcttttgttgttatatcgtttctttctatgcaaaagtttcagtcttatgacagattagatgttttccatccgaatgatgatatataatatgatttcgaaatgatttatatctactgtaggttagagaacacttggagatgtttgcggttcttaaaggtgttgaagaaggttccttgaagagcacagttgttgatatggcggaggaagtaagtatgtagtgaaattcaagctttgtagattttccctctcctacaatctatattcacacacttggatttctgaaatttgatttcatagcatctggttgctaattcaattatggcctaaaagcattaaaacttcagactgcataagtttgagtatgtaacatagtttggagaacagcagatgaattcattttgttgtttgatgctgccgtttggggtggaaagctgtagttgtctttcctgccaattttgggtataggtcacagactgtctgatcttgggtattgatttttttccaggtgggattgtctgataaaattaatacacttgtacgggcactttctggagggatgaagaggaaattgtcacttggaatcgcattgataggtaacagtaaggtgagaaagaaacacaaagacatcttatttcttgtgtttctcttaatcggttgtcgttgaatatgctttatatttcaggtgatcattctcgatgaaccaaccagtggaatggatccttactcaatgcgtcttacatggcagttaattaagaaaattaaaaagggtagaataatattgttgacaacacattccatggatgaagctgaagaacttggagatcggataggaatcatggctaatgggtctcttaagtgttgtggcaggttaagtgtttttagactactctggctttttctgttgcttgtccttcccattttttttaaaaaagaaagttatttcattccaagttaggaagaacaacgatgcatatgttgaaggcatgctaataacacaaattatacaaagcattcacaccatgggattgcttaacatgagttagttactatgaagtgatatgattaggttggatttttcaattggttgctcatgactcgtagaaggtgttttgatttggtgttggtgctgtgataatttcaaataaagaaaacaaaagattccccaagcttacgctatctaactagacatgtgaaagtgcttcacaaataaaaaaaaatctttctttttctgacccataggaattattcatttatagttttctagactttagttaaccatttaacattttaccaattattttggggtttttatggctaagcagttcgattttcctgaagcatcactatggggttggttacactcttacgctagttaaggtttgtttgtattcttttcattttcgtctatgttgttaatgtttctatttaggacatcaataactggtggtcctttatgttgtagacttctccaactgtctctgttgccgcacatatagttcatcgtcacattccatcagcaacctgtgtgagtgaggtatattacttacaatctctaaggatactgagagcatctgagcaacgagtaaattctatgaaagaggtccatgctttgctgcatgctgtgatactttgcagaggtccaagcttctagagtagagagcataatttggttgataatcttccaattgtgtccttaatttctaaataatggatatcatagcatatctatagctgcagatatttcccctagagtaattttttactgcatttagataaatttaagcccatctcttgcctcatctttataagtgatgaatgtccaggtgggaaacgaaatttctttcaagctt
